United States Patent Application Publication US 2023/0026259 A1 - sequence listing, part 61

SEQ ID NO: 158128 - DNA, 20634 bp, Homo sapiens
  Payload ID: 10961
  Gene Symbol: NEB
  Gene Name: nebulin
  Uniprot ID: P20929
  ENST ID: ENST00000172853
  CDS Start-End: 204-20213
aggcatcacgctggcttttgcctggggttctcaggaggggagagttgggagaggctttgctgctgaggaaatttatttggtagattgaaggtttgaacgagagctacagaaacgaaagaaaaagtctgtataagccaatggtgttcgggaagaaaataaccccattgccttgagtttgtaggtgccactactactctggaaaaatggcagatgacgaagactatgaggaggtggtggagtactacacagaagaagtggtttacgaagaggtgccgggagagacaataacaaaaatttatgagactacgacaacaaggacatctgactatgagcaatcagaaacttccaaaccagctctggcacagccagcactggcacagccagcatcagcaaagccggtggagaggaggaaggtcatccggaagaaagtggatccttcaaagttcatgaccccctacattgcacacagtcagaaaatgcaggatctttttagcccaaataaatacaaggagaagtttgagaaaacaaaaggacagccatacgccagcacaacagatactccagaacttcgcagaatcaaaaaagtacaagatcaactcagtgaggttaagtatcgaatggatggtgatgttgctaagactatatgtcacgtagatgaaaaagcaaaggatattgaacatgcaaagaaagtgtcgcagcaagtcagtaaggttttatacaagcagaactgggaagacaccaaggataagtacctgcttcctcctgatgcccctgaacttgtccaggccgttaagaacaccgccatgttcagcaagaaactgtacactgaagactgggaagcagacaaaagtttgttttacccctataatgatagcccggaactgaggagagttgcccaggcccagaaagctctcagtgatgttgcctacaaaaaaggtctcgctgaacagcaagctcaattcacgcctctggctgatcctccagatatagaatttgccaagaaagtaaccaatcaagtgagcaagcaaaaatacaaagaagactatgaaaataaaatcaaaggcaaatggagtgagacaccttgctttgaagttgcaaatgccagaatgaatgctgataacattagcacaaggaaataccaggaagattttgaaaacatgaaagaccagatctacttcatgcagaccgaaacaccagagtataaaatgaataaaaaagctggtgtggcagctagcaaggtaaaatacaaagaagactatgaaaagaataaaggaaaagcagattataatgtgcttcctgcttcagagaacccacagcttaggcagctgaaggcagcaggagatgccctaagtgacaaactatacaaggaaaactatgaaaagacaaaagcaaagagcataaattactgcgagacccccaaattcaagctcgatactgttctgcagaacttcagtagtgataaaaaatataaagattcctacttaaaagatattttgggacattatgtaggcagcttcgaggatccataccattcacactgcatgaaagtcacagctcaaaacagtgataaaaactacaaagcagaatacgaagaagacagaggcaaaggcttcttccctcagaccataactcaagaatatgaagcaattaagaaactagatcagtgtaaagaccacacctacaaagtccatccagataagacaaaattcacccaagttacagactctcctgttctgctacaagcccaagtcaattccaaacaactgagtgacttaaattacaaagcaaaacatgaaagtgaaaagttcaagtgccatatcccccctgatactcctgcttttatccagcacaaagtcaatgcctataacttgagtgataatctttataagcaagactgggagaagagcaaagccaaaaagtttgacattaaagtggatgccattcccctgctggcagccaaagccaacaccaagaacaccagcgatgtgatgtacaagaaagactatgaaaaaaacaaagggaaaatgattggagtcctcagcattaatgacgatcccaagatgctgcactccttgaaggtggccaaaaaccagagtgatagattatacaaggaaaactatgagaagacaaaggcaaagagtatgaattactgtgagaccccaaaatatcaacttgatactcagctgaagaacttcagtgaggctagatataaagacttatatgtaaaggatgttttgggacattatgtaggcagcatggaggacccatatcacacacactgcatgaaagttgcagctcaaaacagtgataaaagttacaaagcagaatatgaagaagataaaggaaaatgctatttccctcagacaataacacaagaatatgaagcaatcaagaagctggaccagtgtaaagatcatacctacaaagttcatccagataagaccaaattcacggcagtcactgattctcctgtactgttgcaagcccagctcaacacgaaacagcttagtgatctgaattacaaagcaaaacatgaaggtgagaagttcaagtgccatataccagcagatgctccacagtttatccaacacagagtcaatgcctataatctgagtgataatgtttataagcaagactgggagaagagcaaagccaagaagtttgacattaaagtggacgccattcccctgttggcagccaaagccaacaccaagaacaccagcgatgtgatgtacaagaaagactatgaaaagagcaaagggaaaatgattggagccctcagcattaatgacgatccaaagatgctgcactccttgaagacagccaaaaaccagagtgatcgcgaatatcgaaaagattatgaaaagtcaaaaactatctacacggcacctcttgatatgctccaagtcactcaagctaagaaatctcaggcaattgccagcgacgttgattataagcacatcttacacagttacagctacccccctgatagcatcaatgtggaccttgccaagaaggcatatgcgctgcagagcgatgttgaatacaaagctgactacaatagctggatgaaaggttgtggctgggtgccttttgggtccttagaaatggaaaaggcaaagcgagcttcagacatcctcaatgagaaaaaatatcgccaacatccagacaccctcaagtttacctcgattgaagatgctccaattacagtacagtctaaaattaaccaggcccagaggagtgatatcgcttacaaagccaaaggagaggaaattattcacaaatacaacctgccaccagacctgccccagttcatccaggctaaagttaatgcctacaatatcagtgagaatatgtacaaagcagacttgaaagacttgagcaagaagggatatgacctgagaactgatgcgattcccatcagagctgccaaagctgccaggcaggcggcgagtgacgttcagtacaaaaaagactatgaaaaggctaaagggaaaatggttggcttccaaagtcttcaagatgaccctaaactggttcattatatgaacgtggccaagatacaatcagatcgggagtataaaaaagactatgagaagacaaagtccaaatacaacacgccccatgatatgttcaatgtcgtggcggctaagaaagcccaggatgtggtcagcaatgtcaactataagcattctctccatcattacacctacttgcctgacgccatggacctggagctgtctaagaacatgatgcagatacagagtgataacgtctacaaggaagactacaacaactggatgaaaggcattggctggattcctattggcagtctcgacgtcgaaaaagttaaaaaggccggtgatgctctgaatgaaaagaagtacaggcaacatccagacaccctcaaatttaccagcattgtggactccccagttatggtccaggcaaaacagaacacgaagcaagtcagtgatatcttatacaaggctaaaggagaagatgtgaaacataaatacaccatgagtcctgatcttcctcagtttctccaggccaagtgcaatgcttacaatataagtgacgtctgttataaacgggattggtatgacttaatagccaagggcaacaatgtgctgggcgatgctattcccatcactgcagccaaggcatcgagaaacattgccagtgattataaatacaaggaagcttatgagaagtcaaagggaaagcatgtgggtttcagaagcctccaggatgatcccaagctggtccactatatgaatgtggcaaagctgcagtctgatcgtgaatacaagaagaactatgagaacaccaaaaccagctaccatacccctggggacatggttagcatcacagctgcaaagatggcccaggatgtcgctaccaatgtcaactacaaacagccattgcatcattacacatacctacctgacgccatgagtcttgagcatacgaggaatgtcaatcaaattcagagtgataatgtgtataaagacgagtataacagcttcttgaagggcatcggatggatccctattggttccctggaggtggagaaggtcaagaaagcaggcgatgcattaaatgagaggaagtatcgacagcacccagataccgtcaagttcacaagtgtgcctgattccatgggcatggtgttggctcagcataacacaaagcagctaagtgatttgaactacaaggtagagggagagaaactgaagcacaagtatactattgaccctgaattgcctcagtttattcaagccaaagtcaacgccctcaacatgagtgatgctcattataaagcagattggaagaaaaccattgccaagggctatgatttgagaccagatgccatcccaattgttgctgcaaaaagttcaaggaatattgctagtgattgcaaatataaggaggcctacgagaaagccaaaggcaagcaagttggatttctcagtcttcaggatgatcctaaactggttcactacatgaatgtggccaaaatccagtctgatcgtgagtacaaaaagggctatgaagccagcaagaccaagtaccacacacctctggatatggtcagtgtgacagctgcaaagaaatctcaggaggttgccaccaacgccaactacagacagtcataccaccactacactctcctgcccgatgccttgaatgtggagcactccaggaatgccatgcagattcagagtgataatctgtacaaatctgacttcaccaattggatgaaagggatcggctgggtgcccatagagtccctggaggtggagaaggcaaagaaagcaggagagattcttagtgagaagaagtatcgccagcaccccgagaagctgaagttcacttacgccatggacacaatggaacaggcacttaacaagagtaacaaactgaacatggacaagaggctctacactgaaaaatggaacaaggacaagaccaccattcatgtcatgcctgacacaccggatattttactctccagagtaaaccaaatcaccatgagtgataaactgtacaaagctggctgggaagaggaaaagaagaaaggatatgacctgaggcctgatgccattgcaataaaggctgcaagagcctctagagacattgccagtgattacaaatacaagaaagcctatgaacaagccaaagggaaacacattggcttccggagcctggaagatgaccccaagctggtgcacttcatgcaagtggccaagatgcagtcagaccgggaatacaagaagggatatgagaaatccaagacctccttccacaccccggtggacatgctcagtgtggtggcagccaagaagtctcaggaagtggccaccaatgccaactacaggaacgtgatccatacctacaacatgcttcctgatgccatgagctttgaattggccaaaaatatgatgcagattcaaagtgataatcagtacaaggctgactatgctgacttcatgaagggcattggatggctccctctgggctccctggaagcagagaaaaacaagaaagccatggagattattagtgaaaagaagtaccgccagcacccagacactttgaagtattccacactcatggactcgatgaacatggttttggcccagaataatgcaaaaattatgaacgaacatctctacaaacaagcatgggaggctgacaaaaccaaagtccacatcatgcctgatatcccccagattattttggcaaaggcaaatgcaattaatatgagtgataaactctacaaactttccttggaagagtctaaaaagaaaggctatgatctcagacctgatgcaattcctatcaaagctgccaaggcttccagagatattgcaagtgattataaatacaagtacaattatgaaaaagggaaggggaaaatggttggtttccgcagtctcgaggatgatcccaaattagtccattccatgcaagtggctaagatgcaatctgatcgggagtacaagaaaaactatgagaacacaaagaccagctaccacacccctgccgacatgctcagtgtcacggctgcaaaggatgcccaagccaacatcaccaacactaactacaagcacctgattcacaagtacatcctccttccagatgcaatgaacattgagctgaccaggaatatgaatcgcatacagagtgataatgaatataagcaagattacaatgaatggtacaaagggcttggctggagtccagcaggttctctggaagtggagaaggccaagaaagcaactgaatatgccagtgatcagaaataccgccagcacccgagcaacttccagtttaagaagctgactgattccatggacatggtgcttgccaagcagaatgcacataccatgaacaagcatttatacaccattgattggaataaagataagaccaagattcatgtgatgcctgatacaccagatattttacaagccaagcagaatcaaacactgtatagtcagaaactctataaacttggatgggaagaagctttgaagaaaggctatgatctcccagttgatgcaatttctgtacagctagctaaagcttcaagagacattgctagtgattataaatacaaacaaggctaccgaaagcaacttggccaccatgttggattccggagtctgcaagatgacccaaaacttgtgttgtccatgaatgtagccaaaatgcagagtgaaagagaatacaagaaggactttgagaagtggaaaactaagttctccagcccagtggacatgttgggagtggtactggccaagaagtgtcaggagttggttagtgacgtggactacaagaactacctgcatcagtggacatgtctgcctgatcagaacgatgttgtgcaagctaagaaagtttatgaactgcaaagtgagaatctatataaatctgaccttgagtggctgagaggcataggatggagtcccttgggttctttagaggcagaaaagaacaagcgggcttcggaaatcatcagtgagaagaaatatcgtcagcctccagacagaaacaagttcaccagcattcctgatgccatggatatagttctggcaaagacaaatgccaaaaataggagtgatagactttatagagaagcttgggacaaagacaagactcagatccacatcatgcctgatacacctgacattgttctggctaaagcaaacttaatcaacacaagtgataaactctaccgaatgggttatgaggagctgaagagaaaaggttacgatcttcctgttgatgccataccaatcaaagcagcaaaagcctcccgggaaattgccagtgaatacaagtacaaggaaggctttcgcaagcagctcggccaccacattggtgcccggaacattgaagatgaccccaagatgatgtggtccatgcatgtggccaagatccagagtgacagggagtacaagaaggactttgagaagtggaagaccaagttcagcagcccagtggacatgctgggggtggtgttggccaagaagtgccagaccttagtcagcgacgtggactacaagaactacctgcaccagtggacatgcctgcccgaccagagcgatgtcatccatgctcggcaggcctatgacctccagagcgataatttgtacaagtcagaccttcagtggctaaaaggcattggctggatgactagtggttctctcgaggatgagaaaaataaacgagccacccagattttgagtgaccatgtttaccgtcagcacccagatcaatttaagttttccagccttatggattccataccaatggttttggcaaaaaacaatgctattaccatgaatcatcgcctctatacagaagcttgggataaagataaaaccactgtccacattatgccagatacccctgaagttttattagctaaacaaaacaaagtaaattacagtgagaaattgtataagcttggcctagaagaagccaagaggaaaggttatgacatgcgggtagatgccattcctatcaaggcagccaaggcctccagagatattgcaagtgaattcaagtacaaagaaggctatcgtaagcagctcggccaccacattggtgcccgagctatacgtgatgaccccaagatgatgtggtccatgcacgtggccaagatccagagtgacagggagtacaagaaggactttgagaagtggaagaccaagttcagcagcccagtggacatgctgggggtggtgctggccaagaagtgccagaccttagtcagcgatgtggactacaagaactacctgcaccagtggacatgcctgcccgaccagagcgacgtcatccatgctcggcaggcctatgacctccagagcgataatatgtacaagtctgatctccagtggatgagaggcattggctgggtgtccattggctctttggatgtggaaaaatgcaaaagggcaactgaaattttgagtgataaaatctatcgccagcctccagacagattcaaatttaccagtgtgactgactctctggaacaagtgttggccaaaaataatgccatcactatgaacaagcgtttatacacagaggcctgggacaaagacaagactcaaattcacataatgcctgatacaccagagattatgttggcaaggcagaacaaaatcaactacagtgagactctatacaaacttgccaatgaagaagcaaaaaagaaaggctacgacttgcgaagtgacgccatccccatcgtggctgccaaggcctccagggacgttatcagtgattacaaatacaaagatggttaccgcaagcagctcggccaccacattggagcccggaacattgaagatgaccccaagatgatgtggtccatgcatgtggccaagatccagagtgacagggagtataagaaggactttgagaagtggaagaccaagttcagcagcccagtggacatgctgggagtggtgttagccaagaagtgccagaccttagtcagcgatgtggactacaagaactacctgcacgagtggacgtgcctgcccgaccagaatgatgtcatccatgctcggcaggcctatgacctccagagcgataacatttacaaatctgatctccagtggctgagaggcattggctgggtccccattgggtctatggatgtggtcaagtgcaagagagctgctgaaatactgagtgataacatctaccgccagcctccggacaagctgaaatttaccagtgtgactgactctctagagcaggtgctggccaagaacaatgctctcaatatgaacaagcgcttatacacagaagcctgggacaaagacaagacccaagtccatattatgcctgatacacctgaaatcatgttggcaagacaaaataaaataaattatagtgagagcctctatcgtcaggccatggaagaagccaagaaagaaggctatgacttgagaagtgatgccattcccattgtggctgccaaggcctctcgggatattgccagtgattacaaatacaaagaagcatatcgtaaacagttgggtcaccacattggcgcccgagcagtacacgatgaccccaagataatgtggtccctccacattgccaaagtgcagagtgaccgtgagtacaagaaagattttgagaaatacaagacaaggtacagcagcccagtggacatgcttggtatcgttttggccaagaagtgtcagaccttggtcagcgatgtggactataaacatcctctgcatgaatggatctgcctgcccgaccagaatgacatcattcatgcacggaaagcctatgacctccagagtgacaatttgtataagtcagaccttgaatggatgaaaggcattggctgggttccgattgattccttggaagttgttagggccaagagagctggagaattacttagtgatactatctaccgtcagcgtccagaaacgctgaaatttaccagtataacggacactccggagcaggtgctggcaaaaaacaatgctttaaacatgaataagcgcttatatactgaagcctgggacaatgacaagaaaactattcatgtcatgcctgatacaccagaaatcatgttagccaaactcaaccgaataaactacagtgataaactctataaacttgctttggaagagtccaagaaggaaggctatgacttgcgtctggatgccattccaatccaagcagccaaggcttcaagagatattgctagtgattacaagtacaaggaaggctaccgcaaacagcttggccaccatattggggcccggaacattaaggatgacccgaagatgatgtggtccatccatgtggccaagatccagagtgacagggagtacaagaaggagtttgagaagtggaagaccaagttcagcagcccagtggacatgctgggggtggtgctggccaagaagtgtcagatccttgtaagcgacatagactacaagcatcccctgcatgaatggacctgcctgcctgatcagaatgacgtcattcaggctcggaaggcctatgacctgcagagtgatgctatttacaaatctgatcttgagtggctgagaggcataggatgggttcccattggctctgtagaggtcgagaaagtgaagagagctggagaaatcctgagtgacaggaagtatcgccagcctgcagaccagctcaaattcacatgcattaccgacactccggaaattgtcctagcaaagaataatgccctgacaatgagcaagcatttatacacagaagcttgggatgctgacaaaacctccatccacgtgatgccagacaccccagatatcctgctggccaagagtaattctgccaatatcagccaaaaactttacaccaagggatgggatgaatcaaagatgaaggactatgatctgagagcagatgctatttccatcaaaagtgccaaggcctccagggacatcgccagtgactacaaatacaaggaagcctatgagaaacagaaaggccaccacattggagcccagagcattgaagatgatcccaagattatgtgtgccatacatgcaggaaaaattcaaagtgaaagggagtacaagaaggaattccaaaagtggaaaaccaagttctctagcccagtggacatgttaagcatcttgctggccaagaaatgtcagactttggtcactgacattgattatcgcaattacctgcatgaatggacatgcatgccggatcaaaacgacattatccaagcaaaaaaggcctatgacctgcagagtgatgccctctacaaggctgacttggagtggttgcgtggcattggctggatgccccaagggtctcctgaagtgttgagagtcaaaaacgcccagaatatcttttgtgacagtgtctatcggacgcctgtggtgaaccttaagtacacaagcattgttgacacacctgaagtggtccttgctaaatcaaatgctgaaaatattagtattccaaagtacagagaggtttgggacaaggataaaacttcaatacacataatgccagatactccagaaattaatctcgctagagcaaatgctcttaatgtgagcaataaactttaccgtgagggctgggatgaaatgaaggcgggctgtgatgtccggctggatgccatccccatccaggctgccaaggcctccagggagattgccagtgactataaatataagcttgaccatgagaagcagaagggacactacgtgggcaccctcacagccagggatgacaacaagatccgctgggccctcatagctgacaagctccagaatgaacgagagtaccggctggactgggccaaatggaaggccaagatccagagccctgtggacatgctttccatcctgcactctaaaaattcccaggctctggtcagtgacatggattaccgcaattacctgcaccagtggacctgcatgcccgaccagaacgatgtgattcaggccaagaaggcctacgaactgcagagcgataatgtttacaaggctgacttggaatggttgcgtggaattgggtggatgccaaatgactccgtgtccgtcaatcatgccaaacatgccgcggacatcttcagtgagaaaaaatatcgcacaaaaatagaaactctcaactttacgcctgtggatgacagagttgattatgtgacagcgaaacaaagtggcgagatcctcgatgatattaaataccggaaagactggaatgccaccaaatcaaagtacaccctcacagaaacccccctgctgcacactgcccaggaggctgctaggatactggaccagtatctctacaaggaaggctgggagagacaaaaagccacaggttacattttgcctccagatgctgtgccatttgttcatgcccatcactgcaatgacgttcagagtgagctgaaatacaaagctgaacatgtgaagcaaaaaggtcattatgttggtgtcccgacgatgagagatgatcctaagctggtttggtttgagcatgcaggccagattcagaatgagagactatacaaagaggactatcacaaaacaaaggccaaaatcaatatacctgctgatatggtgtcagtcttggccgccaagcaggggcagacccttgtcagtgatattgattatcgtaattacttgcaccaatggatgtgtcatcctgaccagaacgatgttattcaggcaagaaaggcctatgacctacagagtgataatgtctacagagctgacctggagtggctccgaggcattggctggatcccactggattctgtggaccatgtaagggttactaagaaccaggaaatgatgagtcagatcaaatataagaaaaatgcccttgaaaactatcctaactttagaagtgtggtggatcctccagagattgttttagccaagattaattctgtcaatcaaagtgatgtaaaatataaagaaacatttaataaagcaaagggcaaatatacgttttcaccagatacaccacatatctcccactccaaagacatgggaaaactctacagtactatactgtataaaggggcgtgggagggcaccaaggcctatggctacaccctggatgagcgctacattcccattgttggagccaagcatgctgatctggtgaacagtgagcttaaatacaaagagacatatgagaagcagaaaggtcactacctggctggaaaagtgatcggtgaattccctggtgtggttcactgtctggatttccaaaagatgaggagtgcgttgaactacagaaaacattatgaggataccaaagcaaatgttcatatccccaatgacatgatgaatcacgtgctggctaaaaggtgccagtacatcctcagtgacctggagtatcgacactatttccaccagtggacgtctcttctggaagaacccaatgttatacgcgtccgaaacgcccaggagatcttgagtgataatgtgtataaagatgacctgaattggttgaaaggcattggttgctacgtttgggatacaccccaaatcctccatgccaagaaatcatacgaccttcagagtcagctacaatatacagcagcaggtaaagaaaatctacaaaactataatctggtcacagacacgcccctctatgtgactgctgttcagagtggcattaatgccagtgaggtaaaatataaagaaaattatcatcagattaaggacaaatacacaacagttctagaaacagtggattatgacagaaccagaaacctgaagaatctttacagcagtaacctgtacaaggaggcctgggatagagtgaaagccaccagctacatcctgccttccagcaccttgtccctgacacacgccaagaaccagaagcatctggccagccatatcaaatatcgggaagaatatgaaaagttcaaagctctttatacgttaccaagaagtgttgacgatgatccgaacacagcacggtgcctccgagttggcaagcttaacatcgatcgcctgtacagatcagtttatgaaaagaacaagatgaaaatccacatcgtgcccgacatggtagagatggttactgccaaggattcccagaagaaagtcagtgagattgattaccgcctgcgcctccacgaatggatttgccaccccgacttgcaagtcaatgatcacgtcaggaaagtcacagatcagatcagcgatattgtatacaaggatgacctcaactggctgaaaggcattggttgctacgtctgggacactcctgaaatcctccatgccaagcatgcttatgatctacgtgatgatatcaagtataaagctcacatgttgaaaacaaggaatgactacaagcttgtcacagatacaccagtctacgtgcaggctgtcaaaagtgggaaacagctaagtgacgctgtctaccactatgactatgtgcacagtgtcagaggcaaagtggctccaactaccaaaaccgtggatctggaccgggcccttcatgcatacaagctccagagttcgaatctatacaaaaccagcctgcgcaccctgcccactggatatagacttccaggtgacactcctcacttcaaacacatcaaggacacccgttacatgagcagttatttcaagtacaaagaagcctatgaacacaccaaggcatatgggtatacacttggccccaaagatgttccatttgtccacgtccggagagtcaacaatgttaccagcgagagactgtatcgggaattgtaccacaaactgaaagacaagatccatacaactcccgatacccctgagatccgccaagtcaagaagacacaagaggctgtcagtgagttgatctacaaatcagacttcttcaagatgcagggccacatgatctctctgccatacacaccccaagtgatccattgccgctatgtgggagacatcaccagtgatattaaatacaaagaggacttgcaggtcctgaagggatttggctgcttcctgtatgacactcctgacatggtccgctcccggcacctgcggaagctctggtctaattacctatacactgataaggcaaggaagatgcgagacaaatacaaagtggtgcttgacactccagaatacagaaaagtgcaagaactgaagacacatctgagtgagctggtctacagagctgcaggcaagaagcagaagtcaatctttacttcagttcctgatactcctgatcttttaagagccaagcgagggcagaagcttcagagtcagtatctgtatgttgaacttgccaccaaagagagaccccatcatcacgctggaaaccagaccacagccttgaagcatgctaaagacgtgaaggacatggtcagtgagaaaaagtacaagattcaatatgaaaagatgaaagacaagtacactccggttccagatacgccaatcctcatcagagccaagagggcttactggaatgccagtgatctacgctacaaagaaacatttcaaaagaccaaagggaaataccacacggtgaaagatgccctagacattgtctatcatcgcaaagtcacagatgacatcagtaaaataaaatacaaggagaactacatgagccagttgggtatctggaggtccattcctgatcgtccagagcatttccaccaccgagcagtcactgacacagtcagtgatgtaaaatataaagaagacttgacttggcttaaaggcattggttgctatgcctatgatacccctgatttcactctggctgaaaagaacaagactctctacagcaagtataagtataaagaagtatttgaaaggacaaagtcagatttcaagtatgttgccgactctccgatcaataggcatttcaagtatgcaactcaattgatgaatgagaaaaaatacagagctgattatgagcagcggaaagataaataccacctggtagtcgatgagcctagacatctgctggctaagaccgcaggcgaccagatcagtcagatcaaatacaggaaaaactatgaaaaatcaaaggacaaatttacctcaattgtggatactccagaacacctgcgtactacaaaagtcaacaaacaaatcagcgatatcctttataaattggaatacaacaaggccaaacccagaggctacaccacaatccacgacacacccatgttgctgcatgtccgcaaggttaaagatgaagtcagtgatctgaaatacaaagaagtataccaaagaaataaatccaactgcaccattgagccagatgctgttcatatcaaagcagccaaggacgcctacaaagtcaacaccaatctggactataagaaacagtacgaagccaacaaagcccactggaagtggactcctgaccgaccggacttcctccaggctgccaagtcatccctgcagcaaagcgattttgaatataagctggaccgggagttcctcaagggttgcaagctttctgtcactgatgacaaaaacacggtgctcgccctcaggaatactttaatagaaagtgatctgaaatacaaagagaaacatgtcaaggaaagaggaacctgccatgccgtacctgacacgcctcagatcctgctggcgaagactgtcagcaacctggtgtctgagaacaagtacaaggaccatgtcaagaagcacttggcacagggctcatacacaacactaccagagacccgggacactgttcacgtcaaggaagtgaccaagcatgtcagtgatacaaattacaaaaagaagtttgtcaaggagaaaggaaaatccaactactccatcatgctggagccaccagaggtgaaacatgctatggaagtggccaagaagcaaagtgatgtcgcttacagaaaagatgccaaagagaacctgcattacaccacagtggctgatcgaccagacatcaagaaggccacacaggcagccaaacaggccagtgaggtggagtacagagccaagcaccgcaaggaaggcagccatggcttaagcatgctcggtcgcccagacatagaaatggccaagaaggcagccaagctgagcagccaggttaaataccgagaaaatttcgataaagaaaagggcaagacaccaaaatacaatccaaaagacagccagctctacaaagtcatgaaagatgctaataatcttgcaagtgaggttaaatacaaggctgacctgaagaaacttcacaaacccgtgactgacatgaaggagtctctgatcatgaatcatgtcctgaatacaagccaacttgccagttcttaccagtacaagaagaagtatgagaagagtaaaggccactaccacaccatacccgataatctggagcagcttcacctaaaagaggccacagaattacagagtatagtgaaatacaaagaaaagtatgaaaaggaacgaggaaaacccatgctggactttgaaacaccaacgtacatcactgccaaagagtctcagcagatgcagagtgggaaagaatataggaaagattatgaagagtccattaaaggcagaaacctgactggcctggaggtcacgccagctttgttacatgtcaaatatgcaactaaaatagcaagcgagaaagagtacaggaaagatctagaggaaagcatccgtgggaagggcctcactgaaatggaagatacacctgacatgctaagagcaaagaatgccactcaaatcctcaatgagaaagaatataagcgagacctggaactggaagtcaaaggaagaggcctgaatgccatggccaatgaaactccggattttatgagggccaggaatgctactgatattgccagtcagattaagtataagcaatcagcagaaatggagaaagccaatttcacttctgtggttgatactccagagatcattcatgcccaacaagtcaagaatctttcaagccagaaaaagtacaaggaagatgctgagaagtccatgtcgtattatgagactgttttggacaccccagagatacagagagtccgggagaaccaaaagaacttcagccttctccaataccagtgtgaccttaaaaacagtaaaggaaaaattacagttgttcaagacacgccagaaatactgcgtgtaaaagaaaatcagaagaatttcagctcggttttatataaagaggatgtctcaccaggaacggctatcggaaagacacctgagatgatgagagtgaaacaaacacaggaccacattagctcggtgaagtataaggaagcaataggacaaggaactccaatccctgacctgcctgaagtgaaacgtgtgaaggagacgcagaagcacattagctcggttatgtacaaagaaaacttgggaacaggcattccaaccactgtgactccagagattgagagagtcaaacgcaatcaagagaactttagctcggttttgtacaaagaaaatttggggaaaggaatcccaacacctatcactccagagatggagagagtcaaacgcaatcaagagaactttagctcggtgttatacaaagaaaacatgggcaagggaactcctttagctgtcactcccgagatggagcgagtcaaacacaatcaagaaaatattagctcggttttgtacaaagaaaatgtggggaaagccaccgcaacccctgtcactcctgagatgcagagagtcaaacgcaatcaagaaaacattagctcggtgttatacaaagagaacctggggaaagcaacccccacaccctttactcctgagatggaaagagtgaaacgcaatcaagaaaactttagctcggtattgtacaaagagaacatgagaaaagcaactccgacacctgttactccagagatggagagagctaagcgcaaccaagaaaacattagctcggttctttattctgatagtttccggaaacaaatacaaggcaaagctgcctatgtattggatacccccgagatgagacgggtgagggagacccaacggcacatctcaacggtgaaatatcatgaagactttgagaaacacaagggttgcttcacaccagtggtgacagatcctatcactgaacgagtaaagaagaacatgcaggacttcagtgacattaactaccgaggtattcagaggaaagtggtagaaatggaacaaaaacggaatgaccaagatcaggagactattacaggtttacgtgtctggcgtactaatcctggttcggtttttgactatgatccagcagaagacaacatccagtcccgaagcttacacatgattaatgtccaagctcagcgccggagccgggagcagtcacgatctgccagtgcactaagcatcagtgggggtgaggagaagtctgagcattcagaagcaccagaccaccacctttcgacttacagcgacgggggtgtctttgcagtctcaacagcttacaaacatgcaaaaaccacagagctcccacaacaacgatcatcttcagttgctacccaacagacaacggtatcttccatcccatctcatccatctactgctggaaaaatcttccgtgccatgtatgactatatggctgctgatgcagatgaggtgtccttcaaggatggagatgccatcataaatgttcaagcaattgatgaaggctggatgtatggcactgtgcagaggactggcaggaccggaatgctcccagccaactacgttgaagctatttaggcatttcaaagcatcacacttgtctgcaggacttacagatcctgcagtcaatgtttcggtttagactctccactgttacctaagttctcaagctgcctatggtttttctgtgtcaatgtgatttatggtagtaccatcctttctcctttgggttttaaaataagttgcagaacagacactttaaaagcttctgcaatattatttctgtgcctagagtctttctccattataaacatgttttaacattatttcttttctaaaacagggattttgaatatgccaaacacattaaaggaaaaatagcagagatgttcaccttttccttgctgattgctaatgcttattatttctaattcagttctgaagttataaacttataatcaatacaaaccagcaactaataaaacctctaattctgcaa

SEQ ID NO: 158129 - DNA, 2400 bp, Homo sapiens
  Payload ID: 10961
  Gene Symbol: NEB
  Gene Name: nebulin
  ENST ID: ENST00000397337
  CDS Start-End: 1-1979
tacagagagtccgggagaaccaaaagaacttcagccttctccaataccagtgtgaccttaaaaacagtaaaggaaaaattacagttgttcaagacacgccagaaatactgcgtgtaaaagaaaatcagaagaatttcagctcggttttatataaagaggatgtctcaccaggaacggctatcggaaagacacctgagatgatgagagtgaaacaaacacaggaccacattagctcggtgaagtataaggaagcaataggacaaggaactccaatccctgacctgcctgaagtgaaacgtgtgaaggagacgcagaagcacattagctcggttatgtacaaagaaaacttgggaacaggcattccaaccactgtgactccagagattgagagagtcaaacgcaatcaagagaactttagctcggttttgtacaaagaaaatttggggaaaggaatcccaacacctatcactccagagatggagagagtcaaacgcaatcaagagaactttagctcggtgctatacaaagaaaacctggggacaggaattccaatccccatcactcctgagatgcagagagtcaaacacaatcaagaaaaccttagctcggtgttatacaaagaaaacatgggcaagggaacccctttacctgtcactcccgagatggaaagagtcaaacacaatcaagaaaatattagctcggtgttatacaaagaaaacatgggcaagggaacccctctacctgtcactcctgagatggagagagtcaaacacaatcaagaaaatattagctcggtgttatacaaagaaaacatgggcaagggaactcctttagctgtcactcccgagatggagcgagtcaaacacaatcaagaaaatattagctcggttttgtacaaagaaaatgtggggaaagccaccgcaacccctgtcactcctgagatgcagagagtcaaacgcaatcaagaaaacattagctcggtgttatacaaagagaacctggggaaagcaacccccacaccctttactcctgagatggaaagagtgaaacgcaatcaagaaaactttagctcggtattgtacaaagagaacatgagaaaagcaactccgacacctgttactccagagatggagagagctaagcgcaaccaagaaaacattagctcggttctttattctgatagtttccggaaacaaatacaaggcaaagctgcctatgtattggatacccccgagatgagacgggtgagggagacccaacggcacatctcaacggtgaaatatcatgaagactttgagaaacacaagggttgcttcacaccagtggtgacagatcctatcactgaacgagtaaagaagaacatgcaggacttcagtgacattaactaccgaggtattcagaggaaagtggtagaaatggaacaaaaacggaatgaccaagatcaggagactattacaggtttacgtgtctggcgtactaatcctggttcggtttttgactatgatccagcagaagacaacatccagtcccgaagcttacacatgattaatgtccaagctcagcgccggagccgggagcagtcacgatctgccagtgcactaagcatcagtgggggtgaggagaagtctgagcattcagaagcaccagaccaccacctttcgacttacagcgacgggggtgtctttgcagtctcaacagcttacaaacatgcaaaaaccacagagctcccacaacaacgatcatcttcagttgctacccaacagacaacggtatcttccatcccatctcatccatctactgctggaaaaatcttccgtgccatgtatgactatatggctgctgatgcagatgaggtgtccttcaaggatggagatgccatcataaatgttcaagcaattgatgaaggctggatgtatggcactgtgcagaggactggcaggaccggaatgctcccagccaactacgttgaagctatttaggcatttcaaagcatcacacttgtctgcaggacttacagatcctgcagtcaatgtttcggtttagactctccactgttacctaagttctcaagctgcctatggtttttctgtgtcaatgtgatttatggtagtaccatcctttctcctttgggttttaaaataagttgcagaacagacactttaaaagcttctgcaatattatttctgtgcctagagtctttctccattataaacatgttttaacattatttcttttctaaaacagggattttgaatatgccaaacacattaaaggaaaaatagcagagatgttcaccttttccttgctgattgctaatgcttattatttctaattcagttctgaagttataaacttataatcaatacaaaccagcaactaataaaacctctaattctgcaa

SEQ ID NO: 158130 - DNA, 26202 bp, Homo sapiens
  Payload ID: 10961
  Gene Symbol: NEB
  Gene Name: nebulin
  Uniprot ID: P20929
  ENST ID: ENST00000397345
  CDS Start-End: 204-25781
aggcatcacgctggcttttgcctggggttctcaggaggggagagttgggagaggctttgctgctgaggaaatttatttggtagattgaaggtttgaacgagagctacagaaacgaaagaaaaagtctgtataagccaatggtgttcgggaagaaaataaccccattgccttgagtttgtaggtgccactactactctggaaaaatggcagatgacgaagactatgaggaggtggtggagtactacacagaagaagtggtttacgaagaggtgccgggagagacaataacaaaaatttatgagactacgacaacaaggacatctgactatgagcaatcagaaacttccaaaccagctctggcacagccagcactggcacagccagcatcagcaaagccggtggagaggaggaaggtcatccggaagaaagtggatccttcaaagttcatgaccccctacattgcacacagtcagaaaatgcaggatctttttagcccaaataaatacaaggagaagtttgagaaaacaaaaggacagccatacgccagcacaacagatactccagaacttcgcagaatcaaaaaagtacaagatcaactcagtgaggttaagtatcgaatggatggtgatgttgctaagactatatgtcacgtagatgaaaaagcaaaggatattgaacatgcaaagaaagtgtcgcagcaagtcagtaaggttttatacaagcagaactgggaagacaccaaggataagtacctgcttcctcctgatgcccctgaacttgtccaggccgttaagaacaccgccatgttcagcaagaaactgtacactgaagactgggaagcagacaaaagtttgttttacccctataatgatagcccggaactgaggagagttgcccaggcccagaaagctctcagtgatgttgcctacaaaaaaggtctcgctgaacagcaagctcaattcacgcctctggctgatcctccagatatagaatttgccaagaaagtaaccaatcaagtgagcaagcaaaaatacaaagaagactatgaaaataaaatcaaaggcaaatggagtgagacaccttgctttgaagttgcaaatgccagaatgaatgctgataacattagcacaaggaaataccaggaagattttgaaaacatgaaagaccagatctacttcatgcagaccgaaacaccagagtataaaatgaataaaaaagctggtgtggcagctagcaaggtaaaatacaaagaagactatgaaaagaataaaggaaaagcagattataatgtgcttcctgcttcagagaacccacagcttaggcagctgaaggcagcaggagatgccctaagtgacaaactatacaaggaaaactatgaaaagacaaaagcaaagagcataaattactgcgagacccccaaattcaagctcgatactgttctgcagaacttcagtagtgataaaaaatataaagattcctacttaaaagatattttgggacattatgtaggcagcttcgaggatccataccattcacactgcatgaaagtcacagctcaaaacagtgataaaaactacaaagcagaatacgaagaagacagaggcaaaggcttcttccctcagaccataactcaagaatatgaagcaattaagaaactagatcagtgtaaagaccacacctacaaagtccatccagataagacaaaattcacccaagttacagactctcctgttctgctacaagcccaagtcaattccaaacaactgagtgacttaaattacaaagcaaaacatgaaagtgaaaagttcaagtgccatatcccccctgatactcctgcttttatccagcacaaagtcaatgcctataacttgagtgataatctttataagcaagactgggagaagagcaaagccaaaaagtttgacattaaagtggatgccattcccctgctggcagccaaagccaacaccaagaacaccagcgatgtgatgtacaagaaagactatgaaaaaaacaaagggaaaatgattggagtcctcagcattaatgacgatcccaagatgctgcactccttgaaggtggccaaaaaccagagtgatagattatacaaggaaaactatgagaagacaaaggcaaagagtatgaattactgtgagaccccaaaatatcaacttgatactcagctgaagaacttcagtgaggctagatataaagacttatatgtaaaggatgttttgggacattatgtaggcagcatggaggacccatatcacacacactgcatgaaagttgcagctcaaaacagtgataaaagttacaaagcagaatatgaagaagataaaggaaaatgctatttccctcagacaataacacaagaatatgaagcaatcaagaagctggaccagtgtaaagatcatacctacaaagttcatccagataagaccaaattcacggcagtcactgattctcctgtactgttgcaagcccagctcaacacgaaacagcttagtgatctgaattacaaagcaaaacatgaaggtgagaagttcaagtgccatataccagcagatgctccacagtttatccaacacagagtcaatgcctataatctgagtgataatgtttataagcaagactgggagaagagcaaagccaagaagtttgacattaaagtggacgccattcccctgttggcagccaaagccaacaccaagaacaccagcgatgtgatgtacaagaaagactatgaaaagagcaaagggaaaatgattggagccctcagcattaatgacgatccaaagatgctgcactccttgaagacagccaaaaaccagagtgatcgcgaatatcgaaaagattatgaaaagtcaaaaactatctacacggcacctcttgatatgctccaagtcactcaagctaagaaatctcaggcaattgccagcgacgttgattataagcacatcttacacagttacagctacccccctgatagcatcaatgtggaccttgccaagaaggcatatgcgctgcagagcgatgttgaatacaaagctgactacaatagctggatgaaaggttgtggctgggtgccttttgggtccttagaaatggaaaaggcaaagcgagcttcagacatcctcaatgagaaaaaatatcgccaacatccagacaccctcaagtttacctcgattgaagatgctccaattacagtacagtctaaaattaaccaggcccagaggagtgatatcgcttacaaagccaaaggagaggaaattattcacaaatacaacctgccaccagacctgccccagttcatccaggctaaagttaatgcctacaatatcagtgagaatatgtacaaagcagacttgaaagacttgagcaagaagggatatgacctgagaactgatgcgattcccatcagagctgccaaagctgccaggcaggcggcgagtgacgttcagtacaaaaaagactatgaaaaggctaaagggaaaatggttggcttccaaagtcttcaagatgaccctaaactggttcattatatgaacgtggccaagatacaatcagatcgggagtataaaaaagactatgagaagacaaagtccaaatacaacacgccccatgatatgttcaatgtcgtggcggctaagaaagcccaggatgtggtcagcaatgtcaactataagcattctctccatcattacacctacttgcctgacgccatggacctggagctgtctaagaacatgatgcagatacagagtgataacgtctacaaggaagactacaacaactggatgaaaggcattggctggattcctattggcagtctcgacgtcgaaaaagttaaaaaggccggtgatgctctgaatgaaaagaagtacaggcaacatccagacaccctcaaatttaccagcattgtggactccccagttatggtccaggcaaaacagaacacgaagcaagtcagtgatatcttatacaaggctaaaggagaagatgtgaaacataaatacaccatgagtcctgatcttcctcagtttctccaggccaagtgcaatgcttacaatataagtgacgtctgttataaacgggattggtatgacttaatagccaagggcaacaatgtgctgggcgatgctattcccatcactgcagccaaggcatcgagaaacattgccagtgattataaatacaaggaagcttatgagaagtcaaagggaaagcatgtgggtttcagaagcctccaggatgatcccaagctggtccactatatgaatgtggcaaagctgcagtctgatcgtgaatacaagaagaactatgagaacaccaaaaccagctaccatacccctggggacatggttagcatcacagctgcaaagatggcccaggatgtcgctaccaatgtcaactacaaacagccattgcatcattacacatacctacctgacgccatgagtcttgagcatacgaggaatgtcaatcaaattcagagtgataatgtgtataaagacgagtataacagcttcttgaagggcatcggatggatccctattggttccctggaggtggagaaggtcaagaaagcaggcgatgcattaaatgagaggaagtatcgacagcacccagataccgtcaagttcacaagtgtgcctgattccatgggcatggtgttggctcagcataacacaaagcagctaagtgatttgaactacaaggtagagggagagaaactgaagcacaagtatactattgaccctgaattgcctcagtttattcaagccaaagtcaacgccctcaacatgagtgatgctcattataaagcagattggaagaaaaccattgccaagggctatgatttgagaccagatgccatcccaattgttgctgcaaaaagttcaaggaatattgctagtgattgcaaatataaggaggcctacgagaaagccaaaggcaagcaagttggatttctcagtcttcaggatgatcctaaactggttcactacatgaatgtggccaaaatccagtctgatcgtgagtacaaaaagggctatgaagccagcaagaccaagtaccacacacctctggatatggtcagtgtgacagctgcaaagaaatctcaggaggttgccaccaacgccaactacagacagtcataccaccactacactctcctgcccgatgccttgaatgtggagcactccaggaatgccatgcagattcagagtgataatctgtacaaatctgacttcaccaattggatgaaagggatcggctgggtgcccatagagtccctggaggtggagaaggcaaagaaagcaggagagattcttagtgagaagaagtatcgccagcaccccgagaagctgaagttcacttacgccatggacacaatggaacaggcacttaacaagagtaacaaactgaacatggacaagaggctctacactgaaaaatggaacaaggacaagaccaccattcatgtcatgcctgacacaccggatattttactctccagagtaaaccaaatcaccatgagtgataaactgtacaaagctggctgggaagaggaaaagaagaaaggatatgacctgaggcctgatgccattgcaataaaggctgcaagagcctctagagacattgccagtgattacaaatacaagaaagcctatgaacaagccaaagggaaacacattggcttccggagcctggaagatgaccccaagctggtgcacttcatgcaagtggccaagatgcagtcagaccgggaatacaagaagggatatgagaaatccaagacctccttccacaccccggtggacatgctcagtgtggtggcagccaagaagtctcaggaagtggccaccaatgccaactacaggaacgtgatccatacctacaacatgcttcctgatgccatgagctttgaattggccaaaaatatgatgcagattcaaagtgataatcagtacaaggctgactatgctgacttcatgaagggcattggatggctccctctgggctccctggaagcagagaaaaacaagaaagccatggagattattagtgaaaagaagtaccgccagcacccagacactttgaagtattccacactcatggactcgatgaacatggttttggcccagaataatgcaaaaattatgaacgaacatctctacaaacaagcatgggaggctgacaaaaccaaagtccacatcatgcctgatatcccccagattattttggcaaaggcaaatgcaattaatatgagtgataaactctacaaactttccttggaagagtctaaaaagaaaggctatgatctcagacctgatgcaattcctatcaaagctgccaaggcttccagagatattgcaagtgattataaatacaagtacaattatgaaaaagggaaggggaaaatggttggtttccgcagtctcgaggatgatcccaaattagtccattccatgcaagtggctaagatgcaatctgatcgggagtacaagaaaaactatgagaacacaaagaccagctaccacacccctgccgacatgctcagtgtcacggctgcaaaggatgcccaagccaacatcaccaacactaactacaagcacctgattcacaagtacatcctccttccagatgcaatgaacattgagctgaccaggaatatgaatcgcatacagagtgataatgaatataagcaagattacaatgaatggtacaaagggcttggctggagtccagcaggttctctggaagtggagaaggccaagaaagcaactgaatatgccagtgatcagaaataccgccagcacccgagcaacttccagtttaagaagctgactgattccatggacatggtgcttgccaagcagaatgcacataccatgaacaagcatttatacaccattgattggaataaagataagaccaagattcatgtgatgcctgatacaccagatattttacaagccaagcagaatcaaacactgtatagtcagaaactctataaacttggatgggaagaagctttgaagaaaggctatgatctcccagttgatgcaatttctgtacagctagctaaagcttcaagagacattgctagtgattataaatacaaacaaggctaccgaaagcaacttggccaccatgttggattccggagtctgcaagatgacccaaaacttgtgttgtccatgaatgtagccaaaatgcagagtgaaagagaatacaagaaggactttgagaagtggaaaactaagttctccagcccagtggacatgttgggagtggtactggccaagaagtgtcaggagttggttagtgacgtggactacaagaactacctgcatcagtggacatgtctgcctgatcagaacgatgttgtgcaagctaagaaagtttatgaactgcaaagtgagaatctatataaatctgaccttgagtggctgagaggcataggatggagtcccttgggttctttagaggcagaaaagaacaagcgggcttcggaaatcatcagtgagaagaaatatcgtcagcctccagacagaaacaagttcaccagcattcctgatgccatggatatagttctggcaaagacaaatgccaaaaataggagtgatagactttatagagaagcttgggacaaagacaagactcagatccacatcatgcctgatacacctgacattgttctggctaaagcaaacttaatcaacacaagtgataaactctaccgaatgggttatgaggagctgaagagaaaaggttacgatcttcctgttgatgccataccaatcaaagcagcaaaagcctcccgggaaattgccagtgaatacaagtacaaggaaggctttcgcaagcagctcggccaccacattggtgcccggaacattgaagatgaccccaagatgatgtggtccatgcatgtggccaagatccagagtgacagggagtacaagaaggactttgagaagtggaagaccaagttcagcagcccagtggacatgctgggggtggtgttggccaagaagtgccagaccttagtcagcgacgtggactacaagaactacctgcaccagtggacatgcctgcccgaccagagcgatgtcatccatgctcggcaggcctatgacctccagagcgataatttgtacaagtcagaccttcagtggctaaaaggcattggctggatgactagtggttctctcgaggatgagaaaaataaacgagccacccagattttgagtgaccatgtttaccgtcagcacccagatcaatttaagttttccagccttatggattccataccaatggttttggcaaaaaacaatgctattaccatgaatcatcgcctctatacagaagcttgggataaagataaaaccactgtccacattatgccagatacccctgaagttttattagctaaacaaaacaaagtaaattacagtgagaaattgtataagcttggcctagaagaagccaagaggaaaggttatgacatgcgggtagatgccattcctatcaaggcagccaaggcctccagagatattgcaagtgaattcaagtacaaagaaggctatcgtaagcagctcggccaccacattggtgcccgagctatacgtgatgaccccaagatgatgtggtccatgcacgtggccaagatccagagtgacagggagtacaagaaggactttgagaagtggaagaccaagttcagcagcccagtggacatgctgggggtggtgctggccaagaagtgccagaccttagtcagcgatgtggactacaagaactacctgcaccagtggacatgcctgcccgaccagagcgacgtcatccatgctcggcaggcctatgacctccagagcgataatatgtacaagtctgatctccagtggatgagaggcattggctgggtgtccattggctctttggatgtggaaaaatgcaaaagggcaactgaaattttgagtgataaaatctatcgccagcctccagacagattcaaatttaccagtgtgactgactctctggaacaagtgttggccaaaaataatgccatcactatgaacaagcgtttatacacagaagcctgggacaaagacaagactcagatccacataatgccagacacaccagaaattatgttggcaagaatgaacaaaatcaactacagtgagagtctgtacaaacttgctaatgaagaagcaaagaagaaaggctatgacttgcgaagcgacgccatccccatcgtggcggccaaggcctccagggacatcatcagtgactacaaatataaagatggttactgcaagcaacttggccaccatattggagcccggaacattgaagatgaccccaagatgatgtggtccatgcacgtagccaagatccagagtgacagggagtacaaaaaggactttgagaagtggaagaccaagttcagcagcccagtggacatgctgggggtggtgctggccaagaagtgccagaccttagtcagtgacgtggactataagaactacctgcacgagtggacatgcctgcctgaccagagcgatgtcatccatgctcggcaggcctatgacctccagagtgacaatatttacaagtcagatctccagtggctgagaggcattggctgggtccccattgggtctatggatgtggtcaagtgcaagagagctaccgaaatactgagtgataacatctaccgccagcctccggacaagctgaaatttaccagtgtgactgattctctagagcaggtgctggccaagaacaatgctctcaacatgaataagcgtttatacacagaggcctgggacaaagacaagactcaaattcacataatgcctgatacaccagagattatgttggcaaggcagaacaaaatcaactacagtgagactctatacaaacttgccaatgaagaagcaaaaaagaaaggctacgacttgcgaagtgacgccatccccatcgtggctgccaaggcctccagggacgttatcagtgattacaaatacaaagatggttaccgcaagcagctcggccaccacattggagcccggaacattgaagatgaccccaagatgatgtggtccatgcatgtggccaagatccagagtgacagggagtataagaaggactttgagaagtggaagaccaagttcagcagcccagtggacatgctgggagtggtgttagccaagaagtgccagaccttagtcagcgatgtggactacaagaactacctgcacgagtggacgtgcctgcccgaccagaatgatgtcatccatgctcggcaggcctatgacctccagagcgataacatttacaaatctgatctccagtggctgagaggcattggctgggtccccattgggtctatggatgtggtcaagtgcaagagagctgctgaaatactgagtgataacatctaccgccagcctccggacaagctgaaatttaccagtgtgactgactctctagagcaggtgctggccaagaacaatgctctcaatatgaacaagcgcttatacacagaagcctgggacaaagacaagacccaagtccatattatgcctgatacacctgaaatcatgttggcaagacaaaataaaataaattatagtgagagcctctatcgtcaggccatggaagaagccaagaaagaaggctatgacttgagaagtgatgccattcccattgtggctgccaaggcctctcgggatattgccagtgattacaaatacaaagaagcatatcgtaaacagttgggtcaccacattggcgcccgagcagtacacgatgaccccaagataatgtggtccctccacattgccaaagtgcagagtgaccgtgagtacaagaaagattttgagaaatacaagacaaggtacagcagcccagtggacatgcttggtatcgttttggccaagaagtgtcagaccttggtcagcgatgtggactataaacatcctctgcatgaatggatctgcctgcccgaccagaatgacatcattcatgcacggaaagcctatgacctccagagtgacaatttgtataagtcagaccttgaatggatgaaaggcattggctgggttccgattgattccttggaagttgttagggccaagagagctggagaattacttagtgatactatctaccgtcagcgtccagaaacgctgaaatttaccagtataacggacactccggagcaggtgctggcaaaaaacaatgctttaaacatgaataagcgcttatatactgaagcctgggacaatgacaagaaaactattcatgtcatgcctgatacaccagaaatcatgttagccaaactcaaccgaataaactacagtgataaactctataaacttgctttggaagagtccaagaaggaaggctatgacttgcgtctggatgccattccaatccaagcagccaaggcttcaagagatattgctagtgattacaagtacaaggaaggctaccgcaaacagcttggccaccatattggggcccggaacattaaggatgacccgaagatgatgtggtccatccatgtggccaagatccagagtgacagggagtacaagaaggagtttgagaagtggaagaccaagttcagcagcccagtggacatgctgggggtggtgctggccaagaagtgtcagatccttgtaagcgacatagactacaagcatcccctgcatgaatggacctgcctgcctgatcagaatgacgtcattcaggctcggaaggcctatgacctgcagagtgatgctatttacaaatctgatcttgagtggctgagaggcataggatgggttcccattggctctgtagaggtcgagaaagtgaagagagctggagaaatcctgagtgacaggaagtatcgccagcctgcagaccagctcaaattcacatgcattaccgacactccggaaattgtcctagcaaagaataatgccctgacaatgagcaagcatttatacacagaagcttgggatgctgacaaaacctccatccacgtgatgccagacaccccagatatcctgctggccaagagtaattctgccaatatcagccaaaaactttacaccaagggatgggatgaatcaaagatgaaggactatgatctgagagcagatgctatttccatcaaaagtgccaaggcctccagggacatcgccagtgactacaaatacaaggaagcctatgagaaacagaaaggccaccacattggagcccagagcattgaagatgatcccaagattatgtgtgccatacatgcaggaaaaattcaaagtgaaagggagtacaagaaggaattccaaaagtggaaaaccaagttctctagcccagtggacatgttaagcatcttgctggccaagaaatgtcagactttggtcactgacattgattatcgcaattacctgcatgaatggacatgcatgccggatcaaaacgacattatccaagcaaaaaaggcctatgacctgcagagtgatagtgtgtataaggcagacctggagtggctgcgtggcatcggctggatgccagaaggctcagtggaaatgaacagagtgaaggttgctcaagacctcgtgaatgaaagactctataggacacgtccagaagctttgtcattcaccagcattgtcgacactccagaagttgtcttggcaaaagccaattctctgcaaataagtgagaaactgtatcaggaagcctggaataaagataaaagcaacatcaccattccttctgatactccggagatgctgcaggcccacatcaatgccttgcaaatcagcaataaactctaccaaaaagactggaatgacgccaagcagaaaggctatgacataagggcagatgccattgaaatcaagcacgccaaggcctccagagaaattgccagtgagtacaaatacaaagaaggttaccgtaagcaactgggccaccacatgggtttccgcaccctacaagatgaccccaagtcagtatgggctatacatgctgccaagatccagagtgacagagaatataagaaagcttatgagaagtctaaaggaattcacaacacaccgttggacatgatgtcaattgttcaagccaagaaatgccaggtcctggttagcgacattgattatcgcaattatctgcaccagtggacgtgtctgccagatcagaacgatgtgatccaggccaagaaagcctacgacctgcagagcgataacttgtacaagtcagacctggaatggctgaagggtattggatggctgccagagggttctgtggaagtgatgagagtgaagaatgcccagaatctcttgaatgaaaggctgtatcgtataaagcctgaggccctcaaattcaccagcattgttgacaccccggaagtaatccaggcaaagatcaatgctgtacagatcagtgagccattgtatcgcgatgcctgggagaaagagaaggctaatgtgaacgtgccagctgacactcccctgatgctgcaatccaaaatcaatgccctgcagatcagcaataaacgctatcagcaagcttgggaagatgtcaagatgactggttatgacctgcgagcagatgccattgggatccagcatgccaaggcttccagggatattgccagtgactatctgtacaaaactgcttatgagaaacagaaaggccattacattggctgtcgcagcgccaaggaagaccctaaactggtttgggcagcaaatgtgttgaagatgcagaatgacaggctgtacaaaaaggcctacaacgaccacaaagccaagatctccatccctgtggacatggtgtccatcagcgctgccaaagaaggtcaggcactggcaagtgatgtggactatcgccattacctgcaccactggtcttgctttcccgaccagaatgatgtgatccaagccaggaaagcctacgacctacagagcgacagtgtgtataaggcagacctggagtggctgcgtggcatcggctggatgccagaaggctcagtggaaatgaacagagtgaaggttgctcaagacctcgtgaatgaaagactctataggacacgtccagaagctttgtcattcaccagcattgtcgacactccagaagttgtcttggcaaaagccaattctctgcaaataagtgagaaactgtatcaggaagcctggaataaagataaaagcaacatcaccattccttctgatactccggagatgctgcaggcccacatcaatgccttgcaaatcagcaataaactctaccaaaaagactggaatgacaccaagcagaaaggctatgacataagggcagatgccattgaaatcaagcacgccaaggcctccagagaaattgccagtgagtacaaatacaaagaaggttaccgtaagcaactgggccaccacatgggtttccgcaccctacaagatgaccccaagtcagtatgggctatacatgctgccaagatccagagtgacagagaatataagaaagcttatgagaagtctaaaggaattcacaacacaccgttggacatgatgtcaattgttcaagccaagaaatgccaggtcctggttagcgacattgattatcgcaattatctgcaccagtggacgtgtctgccagatcagaacgatgtgatccaggccaagaaagcctacgacctgcagagcgataacttgtacaagtcagacctggaatggctgaagggtattggatggttgccagagggttctgtggaagtgatgagagtgaagaatgcccagaatctcttgaatgaaaggctgtatcgtataaagcctgaggccctcaaattcaccagcattgttgacaccccggaagtaatccaggcaaagatcaatgctgtacagatcagtgagccattgtatcgcaatgcctgggagaaagagaaggctaatgtgaacgtgccagctgacactcccctgatgctgcaatccaaaatcaatgctctgcagatcagcaataaacgctatcagcaagcttgggaagatgtcaagatgactggttatgacctgcgagcagatgccattgggatccagcatgccaaggcttccagggatattgccagtgattatctgtacaaaactgcttatgagaaacagaaaggccattacattggctgtcgcagcgccaaggaagaccctaaactggtttgggcagcaaatgtgttgaagatgcagaatgacaggctgtacaaaaaggcctacaacgaccacaaagccaagatctccatccctgtggacatggtgtccatcagcgctgccaaagaaggtcaggcactggcaagtgatgtggactatcgccattacctgcaccactggtcttgctttcccgaccagaatgatgtgatccaagccaggaaagcctacgacctacagagcgacagtgtgtataaggcagacctggagtggctgcgtggcatcggctggatgccagaaggctcagtggaaatgaacagagtgaaggttgctcaagacctcgtgaatgaaagactctataggacacgtccagaagctttgtcattcaccagcattgtcgacactccagaagttgtcttggcaaaagccaattctctgcaaataagtgagaaactgtatcaggaagcctggaataaagataaaagcaacatcaccattccttctgatactccggagatgctgcaggcccacatcaatgccttgcaaatcagcaataaactctaccaaaaagactggaatgacaccaagcagaaaggctatgacataagggcagatgccattgaaatcaagcacgccaaggcctccagagaaattgccagtgagtacaaatacaaagaaggttaccgtaagcaactgggccaccacatgggtttccgcaccctacaagatgaccccaagtcagtatgggctatacatgctgccaagatccagagtgacagagaatataagaaagcttatgagaagtctaaaggaattcacaacacaccgttggacatgatgtcaattgttcaagccaagaaatgccaggtcctggttagcgacattgattatcgcaattatctgcaccagtggacgtgtctgccagatcagaacgatgtgatccaggccaagaaagcctacgacctgcagagcgataacttgtacaagtcagacctggaatggctgaagggtattggatggttgccagagggttctgtggaagtgatgagagtgaagaatgcccagaatctcttgaatgaaaggctgtatcgtataaagcctgaggccctcaaattcaccagcattgttgacaccccggaagtaatccaggcaaagatcaatgctgtacagatcagtgagccattgtatcgcgatgcctgggagaaagagaaggctaatgtgaacgtgccagctgacactcccctgatgctgcaatccaaaatcaatgccctgcagatcagcaataaacgctatcagcaagcttgggaagatgtcaagatgactggttatgacctgcgagcagatgccattgggatccagcatgccaaggcttccagggatattgccagtgactatctgtacaaaactgcttatgagaaacagaaaggccattacattggctgtcgcagcgccaaggaagaccctaaactggtttgggcagcaaatgtgttgaagatgcagaatgacaggctgtacaaaaaggcctacaacgaccacaaagccaagatctccatccctgtggacatggtgtccatcagcgctgccaaagaaggtcaggcactggcaagtgatgtggactatcgccattacctgcaccgctggtcttgctttcccgaccagaatgatgtgatccaagccaggaaagcctacgacctacagagcgacgccctctacaaggctgacttggagtggttgcgtggcattggctggatgccccaagggtctcctgaagtgttgagagtcaaaaacgcccagaatatcttttgtgacagtgtctatcggacgcctgtggtgaaccttaagtacacaagcattgttgacacacctgaagtggtccttgctaaatcaaatgctgaaaatattagtattccaaagtacagagaggtttgggacaaggataaaacttcaatacacataatgccagatactccagaaattaatctcgctagagcaaatgctcttaatgtgagcaataaactttaccgtgagggctgggatgaaatgaaggcgggctgtgatgtccggctggatgccatccccatccaggctgccaaggcctccagggagattgccagtgactataaatataagcttgaccatgagaagcagaagggacactacgtgggcaccctcacagccagggatgacaacaagatccgctgggccctcatagctgacaagctccagaatgaacgagagtaccggctggactgggccaaatggaaggccaagatccagagccctgtggacatgctttccatcctgcactctaaaaattcccaggctctggtcagtgacatggattaccgcaattacctgcaccagtggacctgcatgcccgaccagaacgatgtgattcaggccaagaaggcctacgaactgcagagcgataatgtttacaaggctgacttggaatggttgcgtggaattgggtggatgccaaatgactccgtgtccgtcaatcatgccaaacatgccgcggacatcttcagtgagaaaaaatatcgcacaaaaatagaaactctcaactttacgcctgtggatgacagagttgattatgtgacagcgaaacaaagtggcgagatcctcgatgatattaaataccggaaagactggaatgccaccaaatcaaagtacaccctcacagaaacccccctgctgcacactgcccaggaggctgctaggatactggaccagtatctctacaaggaaggctgggagagacaaaaagccacaggttacattttgcctccagatgctgtgccatttgttcatgcccatcactgcaatgacgttcagagtgagctgaaatacaaagctgaacatgtgaagcaaaaaggtcattatgttggtgtcccgacgatgagagatgatcctaagctggtttggtttgagcatgcaggccagattcagaatgagagactatacaaagaggactatcacaaaacaaaggccaaaatcaatatacctgctgatatggtgtcagtcttggccgccaagcaggggcagacccttgtcagtgatattgattatcgtaattacttgcaccaatggatgtgtcatcctgaccagaacgatgttattcaggcaagaaaggcctatgacctacagagtgataatgtctacagagctgacctggagtggctccgaggcattggctggatcccactggattctgtggaccatgtaagggttactaagaaccaggaaatgatgagtcagatcaaatataagaaaaatgcccttgaaaactatcctaactttagaagtgtggtggatcctccagagattgttttagccaagattaattctgtcaatcaaagtgatgtaaaatataaagaaacatttaataaagcaaagggcaaatatacgttttcaccagatacaccacatatctcccactccaaagacatgggaaaactctacagtactatactgtataaaggggcgtgggagggcaccaaggcctatggctacaccctggatgagcgctacattcccattgttggagccaagcatgctgatctggtgaacagtgagcttaaatacaaagagacatatgagaagcagaaaggtcactacctggctggaaaagtgatcggtgaattccctggtgtggttcactgtctggatttccaaaagatgaggagtgcgttgaactacagaaaacattatgaggataccaaagcaaatgttcatatccccaatgacatgatgaatcacgtgctggctaaaaggtgccagtacatcctcagtgacctggagtatcgacactatttccaccagtggacgtctcttctggaagaacccaatgttatacgcgtccgaaacgcccaggagatcttgagtgataatgtgtataaagatgacctgaattggttgaaaggcattggttgctacgtttgggatacaccccaaatcctccatgccaagaaatcatacgaccttcagagtcagctacaatatacagcagcaggtaaagaaaatctacaaaactataatctggtcacagacacgcccctctatgtgactgctgttcagagtggcattaatgccagtgaggtaaaatataaagaaaattatcatcagattaaggacaaatacacaacagttctagaaacagtggattatgacagaaccagaaacctgaagaatctttacagcagtaacctgtacaaggaggcctgggatagagtgaaagccaccagctacatcctgccttccagcaccttgtccctgacacacgccaagaaccagaagcatctggccagccatatcaaatatcgggaagaatatgaaaagttcaaagctctttatacgttaccaagaagtgttgacgatgatccgaacacagcacggtgcctccgagttggcaagcttaacatcgatcgcctgtacagatcagtttatgaaaagaacaagatgaaaatccacatcgtgcccgacatggtagagatggttactgccaaggattcccagaagaaagtcagtgagattgattaccgcctgcgcctccacgaatggatttgccaccccgacttgcaagtcaatgatcacgtcaggaaagtcacagatcagatcagcgatattgtatacaaggatgacctcaactggctgaaaggcattggttgctacgtctgggacactcctgaaatcctccatgccaagcatgcttatgatctacgtgatgatatcaagtataaagctcacatgttgaaaacaaggaatgactacaagcttgtcacagatacaccagtctacgtgcaggctgtcaaaagtgggaaacagctaagtgacgctgtctaccactatgactatgtgcacagtgtcagaggcaaagtggctccaactaccaaaaccgtggatctggaccgggcccttcatgcatacaagctccagagttcgaatctatacaaaaccagcctgcgcaccctgcccactggatatagacttccaggtgacactcctcacttcaaacacatcaaggacacccgttacatgagcagttatttcaagtacaaagaagcctatgaacacaccaaggcatatgggtatacacttggccccaaagatgttccatttgtccacgtccggagagtcaacaatgttaccagcgagagactgtatcgggaattgtaccacaaactgaaagacaagatccatacaactcccgatacccctgagatccgccaagtcaagaagacacaagaggctgtcagtgagttgatctacaaatcagacttcttcaagatgcagggccacatgatctctctgccatacacaccccaagtgatccattgccgctatgtgggagacatcaccagtgatattaaatacaaagaggacttgcaggtcctgaagggatttggctgcttcctgtatgacactcctgacatggtccgctcccggcacctgcggaagctctggtctaattacctatacactgataaggcaaggaagatgcgagacaaatacaaagtggtgcttgacactccagaatacagaaaagtgcaagaactgaagacacatctgagtgagctggtctacagagctgcaggcaagaagcagaagtcaatctttacttcagttcctgatactcctgatcttttaagagccaagcgagggcagaagcttcagagtcagtatctgtatgttgaacttgccaccaaagagagaccccatcatcacgctggaaaccagaccacagccttgaagcatgctaaagacgtgaaggacatggtcagtgagaaaaagtacaagattcaatatgaaaagatgaaagacaagtacactccggttccagatacgccaatcctcatcagagccaagagggcttactggaatgccagtgatctacgctacaaagaaacatttcaaaagaccaaagggaaataccacacggtgaaagatgccctagacattgtctatcatcgcaaagtcacagatgacatcagtaaaataaaatacaaggagaactacatgagccagttgggtatctggaggtccattcctgatcgtccagagcatttccaccaccgagcagtcactgacacagtcagtgatgtaaaatataaagaagacttgacttggcttaaaggcattggttgctatgcctatgatacccctgatttcactctggctgaaaagaacaagactctctacagcaagtataagtataaagaagtatttgaaaggacaaagtcagatttcaagtatgttgccgactctccgatcaataggcatttcaagtatgcaactcaattgatgaatgagagaaaatataaatctagtgccaagatgtttctgcaacatggatgtaatgaaattctgcgtccagatatgttgactgctctctacaattcgcatatgtggagccagatcaaatacaggaaaaactatgaaaaatcaaaggacaaatttacctcaattgtggatactccagaacacctgcgtactacaaaagtcaacaaacaaatcagcgatatcctttataaattggaatacaacaaggccaaacccagaggctacaccacaatccacgacacacccatgttgctgcatgtccgcaaggttaaagatgaagtcagtgatctgaaatacaaagaagtataccaaagaaataaatccaactgcaccattgagccagatgctgttcatatcaaagcagccaaggacgcctacaaagtcaacaccaatctggactataagaaacagtacgaagccaacaaagcccactggaagtggactcctgaccgaccggacttcctccaggctgccaagtcatccctgcagcaaagcgattttgaatataagctggaccgggagttcctcaagggttgcaagctttctgtcactgatgacaaaaacacggtgctcgccctcaggaatactttaatagaaagtgatctgaaatacaaagagaaacatgtcaaggaaagaggaacctgccatgccgtacctgacacgcctcagatcctgctggcgaagactgtcagcaacctggtgtctgagaacaagtacaaggaccatgtcaagaagcacttggcacagggctcatacacaacactaccagagacccgggacactgttcacgtcaaggaagtgaccaagcatgtcagtgatacaaattacaaaaagaagtttgtcaaggagaaaggaaaatccaactactccatcatgctggagccaccagaggtgaaacatgctatggaagtggccaagaagcaaagtgatgtcgcttacagaaaagatgccaaagagaacctgcattacaccacagtggctgatcgaccagacatcaagaaggccacacaggcagccaaacaggccagtgaggtggagtacagagccaagcaccgcaaggaaggcagccatggcttaagcatgctcggtcgcccagacatagaaatggccaagaaggcagccaagctgagcagccaggttaaataccgagaaaatttcgataaagaaaagggcaagacaccaaaatacaatccaaaagacagccagctctacaaagtcatgaaagatgctaataatcttgcaagtgaggttaaatacaaggctgacctgaagaaacttcacaaacccgtgactgacatgaaggagtctctgatcatgaatcatgtcctgaatacaagccaacttgccagttcttaccagtacaagaagaagtatgagaagagtaaaggccactaccacaccatacccgataatctggagcagcttcacctaaaagaggccacagaattacagagtatagtgaaatacaaagaaaagtatgaaaaggaacgaggaaaacccatgctggactttgaaacaccaacgtacatcactgccaaagagtctcagcagatgcagagtgggaaagaatataggaaagattatgaagagtccattaaaggcagaaacctgactggcctggaggtcacgccagctttgttacatgtcaaatatgcaactaaaatagcaagcgagaaagagtacaggaaagatctagaggaaagcatccgtgggaagggcctcactgaaatggaagatacacctgacatgctaagagcaaagaatgccactcaaatcctcaatgagaaagaatataagcgagacctggaactggaagtcaaaggaagaggcctgaatgccatggccaatgaaactccggattttatgagggccaggaatgctactgatattgccagtcagattaagtataagcaatcagcagaaatggagaaagccaatttcacttctgtggttgatactccagagatcattcatgcccaacaagtcaagaatctttcaagccagaaaaagtacaaggaagatgctgagaagtccatgtcgtattatgagactgttttggacaccccagagatacagagagtccgggagaaccaaaagaacttcagccttctccaataccagtgtgaccttaaaaacagtaaaggaaaaattacagttgttcaagacacgccagaaatactgcgtgtaaaagaaaatcagaagaatttcagctcggttttatataaagaggatgtctcaccaggaacggctatcggaaagacacctgagatgatgagagtgaaacaaacacaggaccacattagctcggtgaagtataaggaagcaataggacaaggaactccaatccctgacctgcctgaagtgaaacgtgtgaaggagacgcagaagcacattagctcggttatgtacaaagaaaacttgggaacaggcattccaaccactgtgactccagagattgagagagtcaaacgcaatcaagagaactttagctcggttttgtacaaagaaaatttggggaaaggaatcccaacacctatcactccagagatggagagagtcaaacgcaatcaagagaactttagctcgatattgtacaaagagaacttgagcaaggggactcccctacctgtcactcctgagatggagcgagtcaaactcaatcaagaaaactttagctcggtgttgtataaagaaaacgttggaaaagggattccaatccccatcactccagagatggagagagtcaaacacaatcaagaaaactttagttcggtgctatacaaagaaaacctggggacaggaattccaatccccatcactcctgagatgcagagagtcaaacacaatcaagaaaaccttagctcggtgttatacaaagaaaacatgggcaagggaacccctttacctgtcactcccgagatggaaagagtcaaacacaatcaagaaaatattagctcggtgttatacaaagaaaacatgggcaagggaacccctctacctgtcactcctgagatggagagagtcaaacacaatcaagaaaatattagctcggtgttatacaaagaaaacatgggcaagggaactcctttagctgtcactcccgagatggagcgagtcaaacacaatcaagaaaatattagctcggttttgtacaaagaaaatgtggggaaagccaccgcaacccctgtcactcctgagatgcagagagtcaaacgcaatcaagaaaacattagctcggtgttatacaaagagaacctggggaaagcaacccccacaccctttactcctgagatggaaagagtgaaacgcaatcaagaaaactttagctcggtattgtacaaagagaacatgagaaaagcaactccgacacctgttactccagagatggagagagctaagcgcaaccaagaaaacattagctcggttctttattctgatagtttccggaaacaaatacaaggcaaagctgcctatgtattggatacccccgagatgagacgggtgagggagacccaacggcacatctcaacggtgaaatatcatgaagactttgagaaacacaagggttgcttcacaccagtggtgacagatcctatcactgaacgagtaaagaagaacatgcaggacttcagtgacattaactaccgaggtattcagaggaaagtggtagaaatggaacaaaaacggaatgaccaagatcaggagactattacaggtttacgtgtctggcgtactaatcctggttcggtttttgactatgatccagcagaagacaacatccagtcccgaagcttacacatgattaatgtccaagctcagcgccggagccgggagcagtcacgatctgccagtgcactaagcatcagtgggggtgaggagaagtctgagcattcagaagcaccagaccaccacctttcgacttacagcgacgggggtgtctttgcagtctcaacagcttacaaacatgcaaaaaccacagagctcccacaacaacgatcatcttcagttgctacccaacagacaacggtatcttccatcccatctcatccatctactgctggaaaaatcttccgtgccatgtatgactatatggctgctgatgcagatgaggtgtccttcaaggatggagatgccatcataaatgttcaagcaattgatgaaggctggatgtatggcactgtgcagaggactggcaggaccggaatgctcccagccaactacgttgaagctatttaggcatttcaaagcatcacacttgtctgcaggacttacagatcctgcagtcaatgtttcggtttagactctccactgttacctaagttctcaagctgcctatggtttttctgtgtcaatgtgatttatggtagtaccatcctttctcctttgggttttaaaataagttgcagaacagacactttaaaagcttctgcaatattatttctgtgcctagagtctttctccattataaacatgttttaacattatttcttttctaaaacagggattttgaatatgccaaacacattaaaggaaaaatagcagagatgttcaccttttccttgctgattgctaatgcttattatttctaattcagttctgaagttataaacttataatcaatacaaaccagcaactaataaaacctctaattctgcaa

SEQ ID NO: 158131 - DNA, 20637 bp, Homo sapiens
  Payload ID: 10961
  Gene Symbol: NEB
  Gene Name: nebulin
  Uniprot ID: P20929
  ENST ID: ENST00000409198
  CDS Start-End: 204-20213
aggcatcacgctggcttttgcctggggttctcaggaggggagagttgggagaggctttgctgctgaggaaatttatttggtagattgaaggtttgaacgagagctacagaaacgaaagaaaaagtctgtataagccaatggtgttcgggaagaaaataaccccattgccttgagtttgtaggtgccactactactctggaaaaatggcagatgacgaagactatgaggaggtggtggagtactacacagaagaagtggtttacgaagaggtgccgggagagacaataacaaaaatttatgagactacgacaacaaggacatctgactatgagcaatcagaaacttccaaaccagctctggcacagccagcactggcacagccagcatcagcaaagccggtggagaggaggaaggtcatccggaagaaagtggatccttcaaagttcatgaccccctacattgcacacagtcagaaaatgcaggatctttttagcccaaataaatacaaggagaagtttgagaaaacaaaaggacagccatacgccagcacaacagatactccagaacttcgcagaatcaaaaaagtacaagatcaactcagtgaggttaagtatcgaatggatggtgatgttgctaagactatatgtcacgtagatgaaaaagcaaaggatattgaacatgcaaagaaagtgtcgcagcaagtcagtaaggttttatacaagcagaactgggaagacaccaaggataagtacctgcttcctcctgatgcccctgaacttgtccaggccgttaagaacaccgccatgttcagcaagaaactgtacactgaagactgggaagcagacaaaagtttgttttacccctataatgatagcccggaactgaggagagttgcccaggcccagaaagctctcagtgatgttgcctacaaaaaaggtctcgctgaacagcaagctcaattcacgcctctggctgatcctccagatatagaatttgccaagaaagtaaccaatcaagtgagcaagcaaaaatacaaagaagactatgaaaataaaatcaaaggcaaatggagtgagacaccttgctttgaagttgcaaatgccagaatgaatgctgataacattagcacaaggaaataccaggaagattttgaaaacatgaaagaccagatctacttcatgcagaccgaaacaccagagtataaaatgaataaaaaagctggtgtggcagctagcaaggtaaaatacaaagaagactatgaaaagaataaaggaaaagcagattataatgtgcttcctgcttcagagaacccacagcttaggcagctgaaggcagcaggagatgccctaagtgacaaactatacaaggaaaactatgaaaagacaaaagcaaagagcataaattactgcgagacccccaaattcaagctcgatactgttctgcagaacttcagtagtgataaaaaatataaagattcctacttaaaagatattttgggacattatgtaggcagcttcgaggatccataccattcacactgcatgaaagtcacagctcaaaacagtgataaaaactacaaagcagaatacgaagaagacagaggcaaaggcttcttccctcagaccataactcaagaatatgaagcaattaagaaactagatcagtgtaaagaccacacctacaaagtccatccagataagacaaaattcacccaagttacagactctcctgttctgctacaagcccaagtcaattccaaacaactgagtgacttaaattacaaagcaaaacatgaaagtgaaaagttcaagtgccatatcccccctgatactcctgcttttatccagcacaaagtcaatgcctataacttgagtgataatctttataagcaagactgggagaagagcaaagccaaaaagtttgacattaaagtggatgccattcccctgctggcagccaaagccaacaccaagaacaccagcgatgtgatgtacaagaaagactatgaaaaaaacaaagggaaaatgattggagtcctcagcattaatgacgatcccaagatgctgcactccttgaaggtggccaaaaaccagagtgatagattatacaaggaaaactatgagaagacaaaggcaaagagtatgaattactgtgagaccccaaaatatcaacttgatactcagctgaagaacttcagtgaggctagatataaagacttatatgtaaaggatgttttgggacattatgtaggcagcatggaggacccatatcacacacactgcatgaaagttgcagctcaaaacagtgataaaagttacaaagcagaatatgaagaagataaaggaaaatgctatttccctcagacaataacacaagaatatgaagcaatcaagaagctggaccagtgtaaagatcatacctacaaagttcatccagataagaccaaattcacggcagtcactgattctcctgtactgttgcaagcccagctcaacacgaaacagcttagtgatctgaattacaaagcaaaacatgaaggtgagaagttcaagtgccatataccagcagatgctccacagtttatccaacacagagtcaatgcctataatctgagtgataatgtttataagcaagactgggagaagagcaaagccaagaagtttgacattaaagtggacgccattcccctgttggcagccaaagccaacaccaagaacaccagcgatgtgatgtacaagaaagactatgaaaagagcaaagggaaaatgattggagccctcagcattaatgacgatccaaagatgctgcactccttgaagacagccaaaaaccagagtgatcgcgaatatcgaaaagattatgaaaagtcaaaaactatctacacggcacctcttgatatgctccaagtcactcaagctaagaaatctcaggcaattgccagcgacgttgattataagcacatcttacacagttacagctacccccctgatagcatcaatgtggaccttgccaagaaggcatatgcgctgcagagcgatgttgaatacaaagctgactacaatagctggatgaaaggttgtggctgggtgccttttgggtccttagaaatggaaaaggcaaagcgagcttcagacatcctcaatgagaaaaaatatcgccaacatccagacaccctcaagtttacctcgattgaagatgctccaattacagtacagtctaaaattaaccaggcccagaggagtgatatcgcttacaaagccaaaggagaggaaattattcacaaatacaacctgccaccagacctgccccagttcatccaggctaaagttaatgcctacaatatcagtgagaatatgtacaaagcagacttgaaagacttgagcaagaagggatatgacctgagaactgatgcgattcccatcagagctgccaaagctgccaggcaggcggcgagtgacgttcagtacaaaaaagactatgaaaaggctaaagggaaaatggttggcttccaaagtcttcaagatgaccctaaactggttcattatatgaacgtggccaagatacaatcagatcgggagtataaaaaagactatgagaagacaaagtccaaatacaacacgccccatgatatgttcaatgtcgtggcggctaagaaagcccaggatgtggtcagcaatgtcaactataagcattctctccatcattacacctacttgcctgacgccatggacctggagctgtctaagaacatgatgcagatacagagtgataacgtctacaaggaagactacaacaactggatgaaaggcattggctggattcctattggcagtctcgacgtcgaaaaagttaaaaaggccggtgatgctctgaatgaaaagaagtacaggcaacatccagacaccctcaaatttaccagcattgtggactccccagttatggtccaggcaaaacagaacacgaagcaagtcagtgatatcttatacaaggctaaaggagaagatgtgaaacataaatacaccatgagtcctgatcttcctcagtttctccaggccaagtgcaatgcttacaatataagtgacgtctgttataaacgggattggtatgacttaatagccaagggcaacaatgtgctgggcgatgctattcccatcactgcagccaaggcatcgagaaacattgccagtgattataaatacaaggaagcttatgagaagtcaaagggaaagcatgtgggtttcagaagcctccaggatgatcccaagctggtccactatatgaatgtggcaaagctgcagtctgatcgtgaatacaagaagaactatgagaacaccaaaaccagctaccatacccctggggacatggttagcatcacagctgcaaagatggcccaggatgtcgctaccaatgtcaactacaaacagccattgcatcattacacatacctacctgacgccatgagtcttgagcatacgaggaatgtcaatcaaattcagagtgataatgtgtataaagacgagtataacagcttcttgaagggcatcggatggatccctattggttccctggaggtggagaaggtcaagaaagcaggcgatgcattaaatgagaggaagtatcgacagcacccagataccgtcaagttcacaagtgtgcctgattccatgggcatggtgttggctcagcataacacaaagcagctaagtgatttgaactacaaggtagagggagagaaactgaagcacaagtatactattgaccctgaattgcctcagtttattcaagccaaagtcaacgccctcaacatgagtgatgctcattataaagcagattggaagaaaaccattgccaagggctatgatttgagaccagatgccatcccaattgttgctgcaaaaagttcaaggaatattgctagtgattgcaaatataaggaggcctacgagaaagccaaaggcaagcaagttggatttctcagtcttcaggatgatcctaaactggttcactacatgaatgtggccaaaatccagtctgatcgtgagtacaaaaagggctatgaagccagcaagaccaagtaccacacacctctggatatggtcagtgtgacagctgcaaagaaatctcaggaggttgccaccaacgccaactacagacagtcataccaccactacactctcctgcccgatgccttgaatgtggagcactccaggaatgccatgcagattcagagtgataatctgtacaaatctgacttcaccaattggatgaaagggatcggctgggtgcccatagagtccctggaggtggagaaggcaaagaaagcaggagagattcttagtgagaagaagtatcgccagcaccccgagaagctgaagttcacttacgccatggacacaatggaacaggcacttaacaagagtaacaaactgaacatggacaagaggctctacactgaaaaatggaacaaggacaagaccaccattcatgtcatgcctgacacaccggatattttactctccagagtaaaccaaatcaccatgagtgataaactgtacaaagctggctgggaagaggaaaagaagaaaggatatgacctgaggcctgatgccattgcaataaaggctgcaagagcctctagagacattgccagtgattacaaatacaagaaagcctatgaacaagccaaagggaaacacattggcttccggagcctggaagatgaccccaagctggtgcacttcatgcaagtggccaagatgcagtcagaccgggaatacaagaagggatatgagaaatccaagacctccttccacaccccggtggacatgctcagtgtggtggcagccaagaagtctcaggaagtggccaccaatgccaactacaggaacgtgatccatacctacaacatgcttcctgatgccatgagctttgaattggccaaaaatatgatgcagattcaaagtgataatcagtacaaggctgactatgctgacttcatgaagggcattggatggctccctctgggctccctggaagcagagaaaaacaagaaagccatggagattattagtgaaaagaagtaccgccagcacccagacactttgaagtattccacactcatggactcgatgaacatggttttggcccagaataatgcaaaaattatgaacgaacatctctacaaacaagcatgggaggctgacaaaaccaaagtccacatcatgcctgatatcccccagattattttggcaaaggcaaatgcaattaatatgagtgataaactctacaaactttccttggaagagtctaaaaagaaaggctatgatctcagacctgatgcaattcctatcaaagctgccaaggcttccagagatattgcaagtgattataaatacaagtacaattatgaaaaagggaaggggaaaatggttggtttccgcagtctcgaggatgatcccaaattagtccattccatgcaagtggctaagatgcaatctgatcgggagtacaagaaaaactatgagaacacaaagaccagctaccacacccctgccgacatgctcagtgtcacggctgcaaaggatgcccaagccaacatcaccaacactaactacaagcacctgattcacaagtacatcctccttccagatgcaatgaacattgagctgaccaggaatatgaatcgcatacagagtgataatgaatataagcaagattacaatgaatggtacaaagggcttggctggagtccagcaggttctctggaagtggagaaggccaagaaagcaactgaatatgccagtgatcagaaataccgccagcacccgagcaacttccagtttaagaagctgactgattccatggacatggtgcttgccaagcagaatgcacataccatgaacaagcatttatacaccattgattggaataaagataagaccaagattcatgtgatgcctgatacaccagatattttacaagccaagcagaatcaaacactgtatagtcagaaactctataaacttggatgggaagaagctttgaagaaaggctatgatctcccagttgatgcaatttctgtacagctagctaaagcttcaagagacattgctagtgattataaatacaaacaaggctaccgaaagcaacttggccaccatgttggattccggagtctgcaagatgacccaaaacttgtgttgtccatgaatgtagccaaaatgcagagtgaaagagaatacaagaaggactttgagaagtggaaaactaagttctccagcccagtggacatgttgggagtggtactggccaagaagtgtcaggagttggttagtgacgtggactacaagaactacctgcatcagtggacatgtctgcctgatcagaacgatgttgtgcaagctaagaaagtttatgaactgcaaagtgagaatctatataaatctgaccttgagtggctgagaggcataggatggagtcccttgggttctttagaggcagaaaagaacaagcgggcttcggaaatcatcagtgagaagaaatatcgtcagcctccagacagaaacaagttcaccagcattcctgatgccatggatatagttctggcaaagacaaatgccaaaaataggagtgatagactttatagagaagcttgggacaaagacaagactcagatccacatcatgcctgatacacctgacattgttctggctaaagcaaacttaatcaacacaagtgataaactctaccgaatgggttatgaggagctgaagagaaaaggttacgatcttcctgttgatgccataccaatcaaagcagcaaaagcctcccgggaaattgccagtgaatacaagtacaaggaaggctttcgcaagcagctcggccaccacattggtgcccggaacattgaagatgaccccaagatgatgtggtccatgcatgtggccaagatccagagtgacagggagtacaagaaggactttgagaagtggaagaccaagttcagcagcccagtggacatgctgggggtggtgttggccaagaagtgccagaccttagtcagcgacgtggactacaagaactacctgcaccagtggacatgcctgcccgaccagagcgatgtcatccatgctcggcaggcctatgacctccagagcgataatttgtacaagtcagaccttcagtggctaaaaggcattggctggatgactagtggttctctcgaggatgagaaaaataaacgagccacccagattttgagtgaccatgtttaccgtcagcacccagatcaatttaagttttccagccttatggattccataccaatggttttggcaaaaaacaatgctattaccatgaatcatcgcctctatacagaagcttgggataaagataaaaccactgtccacattatgccagatacccctgaagttttattagctaaacaaaacaaagtaaattacagtgagaaattgtataagcttggcctagaagaagccaagaggaaaggttatgacatgcgggtagatgccattcctatcaaggcagccaaggcctccagagatattgcaagtgaattcaagtacaaagaaggctatcgtaagcagctcggccaccacattggtgcccgagctatacgtgatgaccccaagatgatgtggtccatgcacgtggccaagatccagagtgacagggagtacaagaaggactttgagaagtggaagaccaagttcagcagcccagtggacatgctgggggtggtgctggccaagaagtgccagaccttagtcagcgatgtggactacaagaactacctgcaccagtggacatgcctgcccgaccagagcgacgtcatccatgctcggcaggcctatgacctccagagcgataatatgtacaagtctgatctccagtggatgagaggcattggctgggtgtccattggctctttggatgtggaaaaatgcaaaagggcaactgaaattttgagtgataaaatctatcgccagcctccagacagattcaaatttaccagtgtgactgactctctggaacaagtgctggccaagaacaatgctctcaacatgaataagcgtttatacacagaggcctgggacaaagacaagactcaaattcacataatgcctgatacaccagagattatgttggcaaggcagaacaaaatcaactacagtgagactctatacaaacttgccaatgaagaagcaaaaaagaaaggctacgacttgcgaagtgacgccatccccatcgtggctgccaaggcctccagggacgttatcagtgattacaaatacaaagatggttaccgcaagcagctcggccaccacattggagcccggaacattgaagatgaccccaagatgatgtggtccatgcatgtggccaagatccagagtgacagggagtataagaaggactttgagaagtggaagaccaagttcagcagcccagtggacatgctgggagtggtgttagccaagaagtgccagaccttagtcagcgatgtggactacaagaactacctgcacgagtggacgtgcctgcccgaccagaatgatgtcatccatgctcggcaggcctatgacctccagagcgataacatttacaaatctgatctccagtggctgagaggcattggctgggtccccattgggtctatggatgtggtcaagtgcaagagagctgctgaaatactgagtgataacatctaccgccagcctccggacaagctgaaatttaccagtgtgactgactctctagagcaggtgctggccaagaacaatgctctcaatatgaacaagcgcttatacacagaagcctgggacaaagacaagacccaagtccatattatgcctgatacacctgaaatcatgttggcaagacaaaataaaataaattatagtgagagcctctatcgtcaggccatggaagaagccaagaaagaaggctatgacttgagaagtgatgccattcccattgtggctgccaaggcctctcgggatattgccagtgattacaaatacaaagaagcatatcgtaaacagttgggtcaccacattggcgcccgagcagtacacgatgaccccaagataatgtggtccctccacattgccaaagtgcagagtgaccgtgagtacaagaaagattttgagaaatacaagacaaggtacagcagcccagtggacatgcttggtatcgttttggccaagaagtgtcagaccttggtcagcgatgtggactataaacatcctctgcatgaatggatctgcctgcccgaccagaatgacatcattcatgcacggaaagcctatgacctccagagtgacaatttgtataagtcagaccttgaatggatgaaaggcattggctgggttccgattgattccttggaagttgttagggccaagagagctggagaattacttagtgatactatctaccgtcagcgtccagaaacgctgaaatttaccagtataacggacactccggagcaggtgctggcaaaaaacaatgctttaaacatgaataagcgcttatatactgaagcctgggacaatgacaagaaaactattcatgtcatgcctgatacaccagaaatcatgttagccaaactcaaccgaataaactacagtgataaactctataaacttgctttggaagagtccaagaaggaaggctatgacttgcgtctggatgccattccaatccaagcagccaaggcttcaagagatattgctagtgattacaagtacaaggaaggctaccgcaaacagcttggccaccatattggggcccggaacattaaggatgacccgaagatgatgtggtccatccatgtggccaagatccagagtgacagggagtacaagaaggagtttgagaagtggaagaccaagttcagcagcccagtggacatgctgggggtggtgctggccaagaagtgtcagatccttgtaagcgacatagactacaagcatcccctgcatgaatggacctgcctgcctgatcagaatgacgtcattcaggctcggaaggcctatgacctgcagagtgatgctatttacaaatctgatcttgagtggctgagaggcataggatgggttcccattggctctgtagaggtcgagaaagtgaagagagctggagaaatcctgagtgacaggaagtatcgccagcctgcagaccagctcaaattcacatgcattaccgacactccggaaattgtcctagcaaagaataatgccctgacaatgagcaagcatttatacacagaagcttgggatgctgacaaaacctccatccacgtgatgccagacaccccagatatcctgctggccaagagtaattctgccaatatcagccaaaaactttacaccaagggatgggatgaatcaaagatgaaggactatgatctgagagcagatgctatttccatcaaaagtgccaaggcctccagggacatcgccagtgactacaaatacaaggaagcctatgagaaacagaaaggccaccacattggagcccagagcattgaagatgatcccaagattatgtgtgccatacatgcaggaaaaattcaaagtgaaagggagtacaagaaggaattccaaaagtggaaaaccaagttctctagcccagtggacatgttaagcatcttgctggccaagaaatgtcagactttggtcactgacattgattatcgcaattacctgcatgaatggacatgcatgccggatcaaaacgacattatccaagcaaaaaaggcctatgacctgcagagtgatgccctctacaaggctgacttggagtggttgcgtggcattggctggatgccccaagggtctcctgaagtgttgagagtcaaaaacgcccagaatatcttttgtgacagtgtctatcggacgcctgtggtgaaccttaagtacacaagcattgttgacacacctgaagtggtccttgctaaatcaaatgctgaaaatattagtattccaaagtacagagaggtttgggacaaggataaaacttcaatacacataatgccagatactccagaaattaatctcgctagagcaaatgctcttaatgtgagcaataaactttaccgtgagggctgggatgaaatgaaggcgggctgtgatgtccggctggatgccatccccatccaggctgccaaggcctccagggagattgccagtgactataaatataagcttgaccatgagaagcagaagggacactacgtgggcaccctcacagccagggatgacaacaagatccgctgggccctcatagctgacaagctccagaatgaacgagagtaccggctggactgggccaaatggaaggccaagatccagagccctgtggacatgctttccatcctgcactctaaaaattcccaggctctggtcagtgacatggattaccgcaattacctgcaccagtggacctgcatgcccgaccagaacgatgtgattcaggccaagaaggcctacgaactgcagagcgataatgtttacaaggctgacttggaatggttgcgtggaattgggtggatgccaaatgactccgtgtccgtcaatcatgccaaacatgccgcggacatcttcagtgagaaaaaatatcgcacaaaaatagaaactctcaactttacgcctgtggatgacagagttgattatgtgacagcgaaacaaagtggcgagatcctcgatgatattaaataccggaaagactggaatgccaccaaatcaaagtacaccctcacagaaacccccctgctgcacactgcccaggaggctgctaggatactggaccagtatctctacaaggaaggctgggagagacaaaaagccacaggttacattttgcctccagatgctgtgccatttgttcatgcccatcactgcaatgacgttcagagtgagctgaaatacaaagctgaacatgtgaagcaaaaaggtcattatgttggtgtcccgacgatgagagatgatcctaagctggtttggtttgagcatgcaggccagattcagaatgagagactatacaaagaggactatcacaaaacaaaggccaaaatcaatatacctgctgatatggtgtcagtcttggccgccaagcaggggcagacccttgtcagtgatattgattatcgtaattacttgcaccaatggatgtgtcatcctgaccagaacgatgttattcaggcaagaaaggcctatgacctacagagtgataatgtctacagagctgacctggagtggctccgaggcattggctggatcccactggattctgtggaccatgtaagggttactaagaaccaggaaatgatgagtcagatcaaatataagaaaaatgcccttgaaaactatcctaactttagaagtgtggtggatcctccagagattgttttagccaagattaattctgtcaatcaaagtgatgtaaaatataaagaaacatttaataaagcaaagggcaaatatacgttttcaccagatacaccacatatctcccactccaaagacatgggaaaactctacagtactatactgtataaaggggcgtgggagggcaccaaggcctatggctacaccctggatgagcgctacattcccattgttggagccaagcatgctgatctggtgaacagtgagcttaaatacaaagagacatatgagaagcagaaaggtcactacctggctggaaaagtgatcggtgaattccctggtgtggttcactgtctggatttccaaaagatgaggagtgcgttgaactacagaaaacattatgaggataccaaagcaaatgttcatatccccaatgacatgatgaatcacgtgctggctaaaaggtgccagtacatcctcagtgacctggagtatcgacactatttccaccagtggacgtctcttctggaagaacccaatgttatacgcgtccgaaacgcccaggagatcttgagtgataatgtgtataaagatgacctgaattggttgaaaggcattggttgctacgtttgggatacaccccaaatcctccatgccaagaaatcatacgaccttcagagtcagctacaatatacagcagcaggtaaagaaaatctacaaaactataatctggtcacagacacgcccctctatgtgactgctgttcagagtggcattaatgccagtgaggtaaaatataaagaaaattatcatcagattaaggacaaatacacaacagttctagaaacagtggattatgacagaaccagaaacctgaagaatctttacagcagtaacctgtacaaggaggcctgggatagagtgaaagccaccagctacatcctgccttccagcaccttgtccctgacacacgccaagaaccagaagcatctggccagccatatcaaatatcgggaagaatatgaaaagttcaaagctctttatacgttaccaagaagtgttgacgatgatccgaacacagcacggtgcctccgagttggcaagcttaacatcgatcgcctgtacagatcagtttatgaaaagaacaagatgaaaatccacatcgtgcccgacatggtagagatggttactgccaaggattcccagaagaaagtcagtgagattgattaccgcctgcgcctccacgaatggatttgccaccccgacttgcaagtcaatgatcacgtcaggaaagtcacagatcagatcagcgatattgtatacaaggatgacctcaactggctgaaaggcattggttgctacgtctgggacactcctgaaatcctccatgccaagcatgcttatgatctacgtgatgatatcaagtataaagctcacatgttgaaaacaaggaatgactacaagcttgtcacagatacaccagtctacgtgcaggctgtcaaaagtgggaaacagctaagtgacgctgtctaccactatgactatgtgcacagtgtcagaggcaaagtggctccaactaccaaaaccgtggatctggaccgggcccttcatgcatacaagctccagagttcgaatctatacaaaaccagcctgcgcaccctgcccactggatatagacttccaggtgacactcctcacttcaaacacatcaaggacacccgttacatgagcagttatttcaagtacaaagaagcctatgaacacaccaaggcatatgggtatacacttggccccaaagatgttccatttgtccacgtccggagagtcaacaatgttaccagcgagagactgtatcgggaattgtaccacaaactgaaagacaagatccatacaactcccgatacccctgagatccgccaagtcaagaagacacaagaggctgtcagtgagttgatctacaaatcagacttcttcaagatgcagggccacatgatctctctgccatacacaccccaagtgatccattgccgctatgtgggagacatcaccagtgatattaaatacaaagaggacttgcaggtcctgaagggatttggctgcttcctgtatgacactcctgacatggtccgctcccggcacctgcggaagctctggtctaattacctatacactgataaggcaaggaagatgcgagacaaatacaaagtggtgcttgacactccagaatacagaaaagtgcaagaactgaagacacatctgagtgagctggtctacagagctgcaggcaagaagcagaagtcaatctttacttcagttcctgatactcctgatcttttaagagccaagcgagggcagaagcttcagagtcagtatctgtatgttgaacttgccaccaaagagagaccccatcatcacgctggaaaccagaccacagccttgaagcatgctaaagacgtgaaggacatggtcagtgagaaaaagtacaagattcaatatgaaaagatgaaagacaagtacactccggttccagatacgccaatcctcatcagagccaagagggcttactggaatgccagtgatctacgctacaaagaaacatttcaaaagaccaaagggaaataccacacggtgaaagatgccctagacattgtctatcatcgcaaagtcacagatgacatcagtaaaataaaatacaaggagaactacatgagccagttgggtatctggaggtccattcctgatcgtccagagcatttccaccaccgagcagtcactgacacagtcagtgatgtaaaatataaagaagacttgacttggcttaaaggcattggttgctatgcctatgatacccctgatttcactctggctgaaaagaacaagactctctacagcaagtataagtataaagaagtatttgaaaggacaaagtcagatttcaagtatgttgccgactctccgatcaataggcatttcaagtatgcaactcaattgatgaatgagaaaaaatacagagctgattatgagcagcggaaagataaataccacctggtagtcgatgagcctagacatctgctggctaagaccgcaggcgaccagatcagtcagatcaaatacaggaaaaactatgaaaaatcaaaggacaaatttacctcaattgtggatactccagaacacctgcgtactacaaaagtcaacaaacaaatcagcgatatcctttataaattggaatacaacaaggccaaacccagaggctacaccacaatccacgacacacccatgttgctgcatgtccgcaaggttaaagatgaagtcagtgatctgaaatacaaagaagtataccaaagaaataaatccaactgcaccattgagccagatgctgttcatatcaaagcagccaaggacgcctacaaagtcaacaccaatctggactataagaaacagtacgaagccaacaaagcccactggaagtggactcctgaccgaccggacttcctccaggctgccaagtcatccctgcagcaaagcgattttgaatataagctggaccgggagttcctcaagggttgcaagctttctgtcactgatgacaaaaacacggtgctcgccctcaggaatactttaatagaaagtgatctgaaatacaaagagaaacatgtcaaggaaagaggaacctgccatgccgtacctgacacgcctcagatcctgctggcgaagactgtcagcaacctggtgtctgagaacaagtacaaggaccatgtcaagaagcacttggcacagggctcatacacaacactaccagagacccgggacactgttcacgtcaaggaagtgaccaagcatgtcagtgatacaaattacaaaaagaagtttgtcaaggagaaaggaaaatccaactactccatcatgctggagccaccagaggtgaaacatgctatggaagtggccaagaagcaaagtgatgtcgcttacagaaaagatgccaaagagaacctgcattacaccacagtggctgatcgaccagacatcaagaaggccacacaggcagccaaacaggccagtgaggtggagtacagagccaagcaccgcaaggaaggcagccatggcttaagcatgctcggtcgcccagacatagaaatggccaagaaggcagccaagctgagcagccaggttaaataccgagaaaatttcgataaagaaaagggcaagacaccaaaatacaatccaaaagacagccagctctacaaagtcatgaaagatgctaataatcttgcaagtgaggttaaatacaaggctgacctgaagaaacttcacaaacccgtgactgacatgaaggagtctctgatcatgaatcatgtcctgaatacaagccaacttgccagttcttaccagtacaagaagaagtatgagaagagtaaaggccactaccacaccatacccgataatctggagcagcttcacctaaaagaggccacagaattacagagtatagtgaaatacaaagaaaagtatgaaaaggaacgaggaaaacccatgctggactttgaaacaccaacgtacatcactgccaaagagtctcagcagatgcagagtgggaaagaatataggaaagattatgaagagtccattaaaggcagaaacctgactggcctggaggtcacgccagctttgttacatgtcaaatatgcaactaaaatagcaagcgagaaagagtacaggaaagatctagaggaaagcatccgtgggaagggcctcactgaaatggaagatacacctgacatgctaagagcaaagaatgccactcaaatcctcaatgagaaagaatataagcgagacctggaactggaagtcaaaggaagaggcctgaatgccatggccaatgaaactccggattttatgagggccaggaatgctactgatattgccagtcagattaagtataagcaatcagcagaaatggagaaagccaatttcacttctgtggttgatactccagagatcattcatgcccaacaagtcaagaatctttcaagccagaaaaagtacaaggaagatgctgagaagtccatgtcgtattatgagactgttttggacaccccagagatacagagagtccgggagaaccaaaagaacttcagccttctccaataccagtgtgaccttaaaaacagtaaaggaaaaattacagttgttcaagacacgccagaaatactgcgtgtaaaagaaaatcagaagaatttcagctcggttttatataaagaggatgtctcaccaggaacggctatcggaaagacacctgagatgatgagagtgaaacaaacacaggaccacattagctcggtgaagtataaggaagcaataggacaaggaactccaatccctgacctgcctgaagtgaaacgtgtgaaggagacgcagaagcacattagctcggttatgtacaaagaaaacttgggaacaggcattccaaccactgtgactccagagattgagagagtcaaacgcaatcaagagaactttagctcggttttgtacaaagaaaatttggggaaaggaatcccaacacctatcactccagagatggagagagtcaaacgcaatcaagagaactttagctcggtgttatacaaagaaaacatgggcaagggaactcctttagctgtcactcccgagatggagcgagtcaaacacaatcaagaaaatattagctcggttttgtacaaagaaaatgtggggaaagccaccgcaacccctgtcactcctgagatgcagagagtcaaacgcaatcaagaaaacattagctcggtgttatacaaagagaacctggggaaagcaacccccacaccctttactcctgagatggaaagagtgaaacgcaatcaagaaaactttagctcggtattgtacaaagagaacatgagaaaagcaactccgacacctgttactccagagatggagagagctaagcgcaaccaagaaaacattagctcggttctttattctgatagtttccggaaacaaatacaaggcaaagctgcctatgtattggatacccccgagatgagacgggtgagggagacccaacggcacatctcaacggtgaaatatcatgaagactttgagaaacacaagggttgcttcacaccagtggtgacagatcctatcactgaacgagtaaagaagaacatgcaggacttcagtgacattaactaccgaggtattcagaggaaagtggtagaaatggaacaaaaacggaatgaccaagatcaggagactattacaggtttacgtgtctggcgtactaatcctggttcggtttttgactatgatccagcagaagacaacatccagtcccgaagcttacacatgattaatgtccaagctcagcgccggagccgggagcagtcacgatctgccagtgcactaagcatcagtgggggtgaggagaagtctgagcattcagaagcaccagaccaccacctttcgacttacagcgacgggggtgtctttgcagtctcaacagcttacaaacatgcaaaaaccacagagctcccacaacaacgatcatcttcagttgctacccaacagacaacggtatcttccatcccatctcatccatctactgctggaaaaatcttccgtgccatgtatgactatatggctgctgatgcagatgaggtgtccttcaaggatggagatgccatcataaatgttcaagcaattgatgaaggctggatgtatggcactgtgcagaggactggcaggaccggaatgctcccagccaactacgttgaagctatttaggcatttcaaagcatcacacttgtctgcaggacttacagatcctgcagtcaatgtttcggtttagactctccactgttacctaagttctcaagctgcctatggtttttctgtgtcaatgtgatttatggtagtaccatcctttctcctttgggttttaaaataagttgcagaacagacactttaaaagcttctgcaatattatttctgtgcctagagtctttctccattataaacatgttttaacattatttcttttctaaaacagggattttgaatatgccaaacacattaaaggaaaaatagcagagatgttcaccttttccttgctgattgctaatgcttattatttctaattcagttctgaagttataaacttataatcaatacaaaccagcaactaataaaacctctaattctgcaactc

SEQ ID NO: 158132 - DNA, 2300 bp, Homo sapiens
  Payload ID: 10961
  Gene Symbol: NEB
  Gene Name: nebulin
  ENST ID: ENST00000434685
  CDS Start-End: 1-2300
tcaaggaagtgaccaagcatgtcagtgatacaaattacaaaaagaagtttgtcaaggagaaaggaaaatccaactactccatcatgctggagccaccagaggtgaaacatgctatggaagtggccaagaagcaaagtgatgtcgcttacagaaaagatgccaaagagaacctgcattacaccacagtggctgatcgaccagacatcaagaaggccacacaggcagccaaacaggccagtgaggtggagtacagagccaagcaccgcaaggaaggcagccatggcttaagcatgctcggtcgcccagacatagaaatggccaagaaggcagccaagctgagcagccaggttaaataccgagaaaatttcgataaagaaaagggcaagacaccaaaatacaatccaaaagacagccagctctacaaagtcatgaaagatgctaataatcttgcaagtgaggttaaatacaaggctgacctgaagaaacttcacaaacccgtgactgacatgaaggagtctctgatcatgaatcatgtcctgaatacaagccaacttgccagttcttaccagtacaagaagaagtatgagaagagtaaaggccactaccacaccatacccgataatctggagcagcttcacctaaaagaggccacagaattacagagtatagtgaaatacaaagaaaagtatgaaaaggaacgaggaaaacccatgctggactttgaaacaccaacgtacatcactgccaaagagtctcagcagatgcagagtgggaaagagtacaggaaagatctagaggaaagcatccgtgggaagggcctcactgaaatggaagatacacctgacatgctaagagcaaagaatgccactcaaatcctcaatgagaaagaatataagcgagacctggaactggaagtcaaaggaagaggcctgaatgccatggccaatgaaactccggattttatgagggccaggaatgctactgatattgccagtcagattaagtataagcaatcagcagaaatggagaaagccaatttcacttctgtggttgatactccagagatcattcatgcccaacaagtcaagaatctttcaagccagaaaaagtacaaggaagatgctgagaagtccatgtcgtattatgagactgttttggacaccccagagatacagagagtccgggagaaccaaaagaacttcagccttgttttatataaagaggatgtctcaccaggaacggctatcggaaagacacctgagatgatgagagtgaaacaaacacaggaccacattagctcggtgaagtataaggaagcaataggacaaggaactccaatccctgacctgcctgaagtgaaacgtgtgaaggagacgcagaagcacattagctcggttttgtacaaagaaaatgtggggaaagccaccgcaacccctgtcactcctgagatgcagagagtcaaacgcaatcaagaaaacattagctcggttctttattctgatagtttccggaaacaaatacaaggcaaagctgcctatgtattggatacccccgagatgagacgggtgagggagacccaacggcacatctcaacggtgaaatatcatgaagactttgagaaacacaagggttgcttcacaccagtggtgacagatcctatcactgaacgagtaaagaagaacatgcaggacttcagtgacattaactaccgaggtattcagaggaaagtggtagaaatggaacaaaaacggaatgaccaagatcaggagactattacaggtttacgtgtctggcgtactaatcctggttcggtttttgactatgatccagcagaagacaacatccagtcccgaagcttacacatgattaatgtccaagctcagcgccggagccgggagcagtcacgatctgccagtgcactaagcatcagtgggggtgaggagaagtctgagcattcagaagcaccagaccaccacctttcgacttacagcgacgggggtgtctttgcagtctcaacagcttacaaacatgcaaaaaccacagagctcccacaacaacgatcatcttcagttgctacccaacagacaacggtatcttccatcccatctcatccatctactgctggaaaaatcttccgtgccatgtatgactatatggctgctgatgcagatgaggtgtccttcaaggatggagatgccatcataaatgttcaagcaattgatgaaggctggatgtatggcactgtgcagaggactggcaggaccggaatgctcccagccaactacgttgaagctatttag

SEQ ID NO: 158133 - DNA, 766 bp, Homo sapiens
  Payload ID: 10961
  Gene Symbol: NEB
  Gene Name: nebulin
  ENST ID: ENST00000424585
  CDS Start-End: 1-766
aggaatgctactgatattgccagtcagattaagtataagcaatcagcagaaatggagaaagccaatttcacttctgtggttgatactccagagatcattcatgcccaacaagtcaagaatctttcaagccagctccaataccagtgtgaccttaaaaacagtaaaggaaaaattacagttgttcaagacacgccagaaatactgcgtgtaaaagaaaatcagaagaatttcagctcggttttatataaagaggatgtctcaccaggaacggctatcggaaagacacctgagatgatgagagtgaaacaaacacaggaccacattagctcggtgaagtataaggaagcaataggacaaggaactccaatccctgacctgcctgaagtgaaacgtgtgaaggagacgcagaagcacattagctcggttatgtacaaagaaaacttgggaacaggcattccaaccactgtgactccagagattgagagagtcaaacgcaatcaagagaactttagctcggttttgtacaaagaaaatttggggaaaggaatcccaacacctatcactccagagatggagagagtcaaacgcaatcaagagaactttagctcggtgttatacaaagaaaacatgggcaagggaacccctctacctgtcactcctgagatggagagagtcaaacacaatcaagaaaatattagctcggtgttatacaaagaaaacatgggcaagggaactcctttagctgtcactcccgagatggagcgag

SEQ ID NO: 158134 - DNA, 751 bp, Homo sapiens
  Payload ID: 10961
  Gene Symbol: NEB
  Gene Name: nebulin
  ENST ID: ENST00000420924
  CDS Start-End: 1-751
cagaccacagccttgaagcatgctaaagacgtgaaggacatggtcagtgagaaaaagtacaagattcaatatgaaaagatgaaagacaagtacactccggttccagatacgccaatcctcatcagagccaagagggcttactggaatgccagtgatctacgctacaaagaaacatttcaaaagaccaaagggaaataccacacggtgaaagatgccctagacattgtctatcatcgcaaagtcacagatgacatcagtaaaataaaatacaaggagaactacatgagccagttgggtatctggaggtccattcctgatcgtccagagcatttccaccaccgagcagtcactgacacagtcagtgatgtaaaatataaagaagacttgacttggcttaaaggcattggttgctatgcctatgatacccctgatttcactctggctgaaaagaacaagactctctacagcaagtataagtataaagaagtatttgaaaggacaaagtcagatttcaagtatgttgccgactctccgatcaataggcatttcaagtatgcaactcaattgatgaatgagagaaaatataaatctagtgccaagatgtttctgcaacatggatgtaatgaaattctgcgtccagatatgttgactgctctctacaattcgcatatgtggagccagatcaaatacaggaaaaactatgaaaaatcaaaggacaaatttacctcaattgtggatactccagaacacc

SEQ ID NO: 158135 - DNA, 1201 bp, Homo sapiens
  Payload ID: 10961
  Gene Symbol: NEB
  Gene Name: nebulin
  ENST ID: ENST00000421461
  CDS Start-End: 1-1201
taaaaacagtaaaggaaaaattacagttgttcaagacacgccagaaatactgcgtgtaaaagaaaatcagaagaatttcagctcggttttatataaagaggatgtctcaccaggaacggctatcggaaagacacctgagatgatgagagtgaaacaaacacaggaccacattagctcggtgaagtataaggaagcaataggacaaggaactccaatccctgacctgcctgaagtgaaacgtgtgaaggagacgcagaagcacattagctcggttatgtacaaagaaaacttgggaacaggcattccaaccactgtgactccagagattgagagagtcaaacgcaatcaagagaactttagctcggttttgtacaaagaaaatttggggaaaggaatcccaacacctatcactccagagatggagagagtcaaacgcaatcaagagaactttagctcgatattgtacaaagagaacttgagcaaggggactcccctacctgtcactcctgagatggagcgagtcaaactcaatcaagaaaactttagctcggtgctatacaaagaaaacctggggacaggaattccaatccccatcactcctgagatgcagagagtcaaacacaatcaagaaaaccttagctcggtgttatacaaagaaaacatgggcaagggaacccctttacctgtcactcccgagatggaaagagtcaaacacaatcaagaaaatattagctcggtgttatacaaagaaaacatgggcaagggaacccctctacctgtcactcctgagatggagagagtcaaacacaatcaagaaaatattagctcggtgttatacaaagaaaacatgggcaagggaactcctttagctgtcactcccgagatggagcgagtcaaacacaatcaagaaaatattagctcggttttgtacaaagaaaatgtggggaaagccaccgcaacccctgtcactcctgagatgcagagagtcaaacgcaatcaagaaaacattagctcggtgttatacaaagagaacctggggaaagcaacccccacaccctttactcctgagatggaaagagtgaaacgcaatcaagaaaactttagctcggtattgtacaaagagaacatgagaaaagcaactccgacacctgttactccagagatggagagagctaagcgcaaccaagaaaacattagctcg

SEQ ID NO: 158136 - DNA, 9443 bp, Homo sapiens
  Payload ID: 10961
  Gene Symbol: NEB
  Gene Name: nebulin
  ENST ID: ENST00000413693
  CDS Start-End: 1-9024
ggaattcacaacacaccgttggacatgatgtcaattgttcaagccaagaaatgccaggtcctggttagcgacattgattatcgcaattatctgcaccagtggacgtgtctgccagatcagaacgatgtgatccaggccaagaaagcctacgacctgcagagcgataacttgtacaagtcagacctggaatggctgaagggtattggatggttgccagagggttctgtggaagtgatgagagtgaagaatgcccagaatctcttgaatgaaaggctgtatcgtataaagcctgaggccctcaaattcaccagcattgttgacaccccggaagtaatccaggcaaagatcaatgctgtacagatcagtgagccattgtatcgcgatgcctgggagaaagagaaggctaatgtgaacgtgccagctgacactcccctgatgctgcaatccaaaatcaatgccctgcagatcagcaataaacgctatcagcaagcttgggaagatgtcaagatgactggttatgacctgcgagcagatgccattgggatccagcatgccaaggcttccagggatattgccagtgactatctgtacaaaactgcttatgagaaacagaaaggccattacattggctgtcgcagcgccaaggaagaccctaaactggtttgggcagcaaatgtgttgaagatgcagaatgacaggctgtacaaaaaggcctacaacgaccacaaagccaagatctccatccctgtggacatggtgtccatcagcgctgccaaagaaggtcaggcactggcaagtgatgtggactatcgccattacctgcaccgctggtcttgctttcccgaccagaatgatgtgatccaagccaggaaagcctacgacctacagagcgacgccctctacaaggctgacttggagtggttgcgtggcattggctggatgccccaagggtctcctgaagtgttgagagtcaaaaacgcccagaatatcttttgtgacagtgtctatcggacgcctgtggtgaaccttaagtacacaagcattgttgacacacctgaagtggtccttgctaaatcaaatgctgaaaatattagtattccaaagtacagagaggtttgggacaaggataaaacttcaatacacataatgccagatactccagaaattaatctcgctagagcaaatgctcttaatgtgagcaataaactttaccgtgagggctgggatgaaatgaaggcgggctgtgatgtccggctggatgccatccccatccaggctgccaaggcctccagggagattgccagtgactataaatataagcttgaccatgagaagcagaagggacactacgtgggcaccctcacagccagggatgacaacaagatccgctgggccctcatagctgacaagctccagaatgaacgagagtaccggctggactgggccaaatggaaggccaagatccagagccctgtggacatgctttccatcctgcactctaaaaattcccaggctctggtcagtgacatggattaccgcaattacctgcaccagtggacctgcatgcccgaccagaacgatgtgattcaggccaagaaggcctacgaactgcagagcgataatgtttacaaggctgacttggaatggttgcgtggaattgggtggatgccaaatgactccgtgtccgtcaatcatgccaaacatgccgcggacatcttcagtgagaaaaaatatcgcacaaaaatagaaactctcaactttacgcctgtggatgacagagttgattatgtgacagcgaaacaaagtggcgagatcctcgatgatattaaataccggaaagactggaatgccaccaaatcaaagtacaccctcacagaaacccccctgctgcacactgcccaggaggctgctaggatactggaccagtatctctacaaggaaggctgggagagacaaaaagccacaggttacattttgcctccagatgctgtgccatttgttcatgcccatcactgcaatgacgttcagagtgagctgaaatacaaagctgaacatgtgaagcaaaaaggtcattatgttggtgtcccgacgatgagagatgatcctaagctggtttggtttgagcatgcaggccagattcagaatgagagactatacaaagaggactatcacaaaacaaaggccaaaatcaatatacctgctgatatggtgtcagtcttggccgccaagcaggggcagacccttgtcagtgatattgattatcgtaattacttgcaccaatggatgtgtcatcctgaccagaacgatgttattcaggcaagaaaggcctatgacctacagagtgataatgtctacagagctgacctggagtggctccgaggcattggctggatcccactggattctgtggaccatgtaagggttactaagaaccaggaaatgatgagtcagatcaaatataagaaaaatgcccttgaaaactatcctaactttagaagtgtggtggatcctccagagattgttttagccaagattaattctgtcaatcaaagtgatgtaaaatataaagaaacatttaataaagcaaagggcaaatatacgttttcaccagatacaccacatatctcccactccaaagacatgggaaaactctacagtactatactgtataaaggggcgtgggagggcaccaaggcctatggctacaccctggatgagcgctacattcccattgttggagccaagcatgctgatctggtgaacagtgagcttaaatacaaagagacatatgagaagcagaaaggtcactacctggctggaaaagtgatcggtgaattccctggtgtggttcactgtctggatttccaaaagatgaggagtgcgttgaactacagaaaacattatgaggataccaaagcaaatgttcatatccccaatgacatgatgaatcacgtgctggctaaaaggtgccagtacatcctcagtgacctggagtatcgacactatttccaccagtggacgtctcttctggaagaacccaatgttatacgcgtccgaaacgcccaggagatcttgagtgataatgtgtataaagatgacctgaattggttgaaaggcattggttgctacgtttgggatacaccccaaatcctccatgccaagaaatcatacgaccttcagagtcagctacaatatacagcagcaggtaaagaaaatctacaaaactataatctggtcacagacacgcccctctatgtgactgctgttcagagtggcattaatgccagtgaggtaaaatataaagaaaattatcatcagattaaggacaaatacacaacagttctagaaacagtggattatgacagaaccagaaacctgaagaatctttacagcagtaacctgtacaaggaggcctgggatagagtgaaagccaccagctacatcctgccttccagcaccttgtccctgacacacgccaagaaccagaagcatctggccagccatatcaaatatcgggaagaatatgaaaagttcaaagctctttatacgttaccaagaagtgttgacgatgatccgaacacagcacggtgcctccgagttggcaagcttaacatcgatcgcctgtacagatcagtttatgaaaagaacaagatgaaaatccacatcgtgcccgacatggtagagatggttactgccaaggattcccagaagaaagtcagtgagattgattaccgcctgcgcctccacgaatggatttgccaccccgacttgcaagtcaatgatcacgtcaggaaagtcacagatcagatcagcgatattgtatacaaggatgacctcaactggctgaaaggcattggttgctacgtctgggacactcctgaaatcctccatgccaagcatgcttatgatctacgtgatgatatcaagtataaagctcacatgttgaaaacaaggaatgactacaagcttgtcacagatacaccagtctacgtgcaggctgtcaaaagtgggaaacagctaagtgacgctgtctaccactatgactatgtgcacagtgtcagaggcaaagtggctccaactaccaaaaccgtggatctggaccgggcccttcatgcatacaagctccagagttcgaatctatacaaaaccagcctgcgcaccctgcccactggatatagacttccaggtgacactcctcacttcaaacacatcaaggacacccgttacatgagcagttatttcaagtacaaagaagcctatgaacacaccaaggcatatgggtatacacttggccccaaagatgttccatttgtccacgtccggagagtcaacaatgttaccagcgagagactgtatcgggaattgtaccacaaactgaaagacaagatccatacaactcccgatacccctgagatccgccaagtcaagaagacacaagaggctgtcagtgagttgatctacaaatcagacttcttcaagatgcagggccacatgatctctctgccatacacaccccaagtgatccattgccgctatgtgggagacatcaccagtgatattaaatacaaagaggacttgcaggtcctgaagggatttggctgcttcctgtatgacactcctgacatggtccgctcccggcacctgcggaagctctggtctaattacctatacactgataaggcaaggaagatgcgagacaaatacaaagtggtgcttgacactccagaatacagaaaagtgcaagaactgaagacacatctgagtgagctggtctacagagctgcaggcaagaagcagaagtcaatctttacttcagttcctgatactcctgatcttttaagagccaagcgagggcagaagcttcagagtcagtatctgtatgttgaacttgccaccaaagagagaccccatcatcacgctggaaaccagaccacagccttgaagcatgctaaagacgtgaaggacatggtcagtgagaaaaagtacaagattcaatatgaaaagatgaaagacaagtacactccggttccagatacgccaatcctcatcagagccaagagggcttactggaatgccagtgatctacgctacaaagaaacatttcaaaagaccaaagggaaataccacacggtgaaagatgccctagacattgtctatcatcgcaaagtcacagatgacatcagtaaaataaaatacaaggagaactacatgagccagttgggtatctggaggtccattcctgatcgtccagagcatttccaccaccgagcagtcactgacacagtcagtgatgtaaaatataaagaagacttgacttggcttaaaggcattggttgctatgcctatgatacccctgatttcactctggctgaaaagaacaagactctctacagcaagtataagtataaagaagtatttgaaaggacaaagtcagatttcaagtatgttgccgactctccgatcaataggcatttcaagtatgcaactcaattgatgaatgagaaaaaatacagagctgattatgagcagcggaaagataaataccacctggtagtcgatgagcctagacatctgctggctaagaccgcaggcgaccagatcagtcagatcaaatacaggaaaaactatgaaaaatcaaaggacaaatttacctcaattgtggatactccagaacacctgcgtactacaaaagtcaacaaacaaatcagcgatatcctttataaattggaatacaacaaggccaaacccagaggctacaccacaatccacgacacacccatgttgctgcatgtccgcaaggttaaagatgaagtcagtgatctgaaatacaaagaagtataccaaagaaataaatccaactgcaccattgagccagatgctgttcatatcaaagcagccaaggacgcctacaaagtcaacaccaatctggactataagaaacagtacgaagccaacaaagcccactggaagtggactcctgaccgaccggacttcctccaggctgccaagtcatccctgcagcaaagcgattttgaatataagctggaccgggagttcctcaagggttgcaagctttctgtcactgatgacaaaaacacggtgctcgccctcaggaatactttaatagaaagtgatctgaaatacaaagagaaacatgtcaaggaaagaggaacctgccatgccgtacctgacacgcctcagatcctgctggcgaagactgtcagcaacctggtgtctgagaacaagtacaaggaccatgtcaagaagcacttggcacagggctcatacacaacactaccagagacccgggacactgttcacgtcaaggaagtgaccaagcatgtcagtgatacaaattacaaaaagaagtttgtcaaggagaaaggaaaatccaactactccatcatgctggagccaccagaggtgaaacatgctatggaagtggccaagaagcaaagtgatgtcgcttacagaaaagatgccaaagagaacctgcattacaccacagtggctgatcgaccagacatcaagaaggccacacaggcagccaaacaggccagtgaggtggagtacagagccaagcaccgcaaggaaggcagccatggcttaagcatgctcggtcgcccagacatagaaatggccaagaaggcagccaagctgagcagccaggttaaataccgagaaaatttcgataaagaaaagggcaagacaccaaaatacaatccaaaagacagccagctctacaaagtcatgaaagatgctaataatcttgcaagtgaggttaaatacaaggctgacctgaagaaacttcacaaacccgtgactgacatgaaggagtctctgatcatgaatcatgtcctgaatacaagccaacttgccagttcttaccagtacaagaagaagtatgagaagagtaaaggccactaccacaccatacccgataatctggagcagcttcacctaaaagaggccacagaattacagagtatagtgaaatacaaagaaaagtatgaaaaggaacgaggaaaacccatgctggactttgaaacaccaacgtacatcactgccaaagagtctcagcagatgcagagtgggaaagaatataggaaagattatgaagagtccattaaaggcagaaacctgactggcctggaggtcacgccagctttgttacatgtcaaatatgcaactaaaatagcaagcgagaaagagtacaggaaagatctagaggaaagcatccgtgggaagggcctcactgaaatggaagatacacctgacatgctaagagcaaagaatgccactcaaatcctcaatgagaaagaatataagcgagacctggaactggaagtcaaaggaagaggcctgaatgccatggccaatgaaactccggattttatgagggccaggaatgctactgatattgccagtcagattaagtataagcaatcagcagaaatggagaaagccaatttcacttctgtggttgatactccagagatcattcatgcccaacaagtcaagaatctttcaagccagaaaaagtacaaggaagatgctgagaagtccatgtcgtattatgagactgttttggacaccccagagatacagagagtccgggagaaccaaaagaacttcagccttctccaataccagtgtgaccttaaaaacagtaaaggaaaaattacagttgttcaagacacgccagaaatactgcgtgtaaaagaaaatcagaagaatttcagctcggttttatataaagaggatgtctcaccaggaacggctatcggaaagacacctgagatgatgagagtgaaacaaacacaggaccacattagctcggtgaagtataaggaagcaataggacaaggaactccaatccctgacctgcctgaagtgaaacgtgtgaaggagacgcagaagcacattagctcggttatgtacaaagaaaacttgggaacaggcattccaaccactgtgactccagagattgagagagtcaaacgcaatcaagagaactttagctcggtgttatacaaagaaaacatgggcaagggaactcctttagctgtcactcccgagatggagcgagtcaaacacaatcaagaaaatattagctcggttttgtacaaagaaaatgtggggaaagccaccgcaacccctgtcactcctgagatgcagagagtcaaacgcaatcaagaaaacattagctcggttctttattctgatagtttccggaaacaaatacaaggcaaagctgcctatgtattggatacccccgagatgagacgggtgagggagacccaacggcacatctcaacggtgaaatatcatgaagactttgagaaacacaagggttgcttcacaccagtggtgacagatcctatcactgaacgagtaaagaagaacatgcaggacttcagtgacattaactaccgaggtattcagaggaaagtggtagaaatggaacaaaaacggaatgaccaagatcaggagactattacaggtttacgtgtctggcgtactaatcctggttcggtttttgactatgatccagcagaagacaacatccagtcccgaagcttacacatgattaatgtccaagctcagcgccggagccgggagcagtcacgatctgccagtgcactaagcatcagtgggggtgaggagaagtctgagcattcagaagcaccagaccaccacctttcgacttacagcgacgggggtgtctttgcagtctcaacagcttacaaacatgcaaaaaccacagagctcccacaacaacgatcatcttcagttgctacccaacagacaacggtatcttccatcccatctcatccatctactgctggaaaaatcttccgtgccatgtatgactatatggctgctgatgcagatgaggtgtccttcaaggatggagatgccatcataaatgttcaagcaattgatgaaggctggatgtatggcactgtgcagaggactggcaggaccggaatgctcccagccaactacgttgaagctatttaggcatttcaaagcatcacacttgtctgcaggacttacagatcctgcagtcaatgtttcggtttagactctccactgttacctaagttctcaagctgcctatggtttttctgtgtcaatgtgatttatggtagtaccatcctttctcctttgggttttaaaataagttgcagaacagacactttaaaagcttctgcaatattatttctgtgcctagagtctttctccattataaacatgttttaacattatttcttttctaaaacagggattttgaatatgccaaacacattaaaggaaaaatagcagagatgttcaccttttccttgctgattgctaatgcttattatttctaattcagttctgaagttataaacttataatcaatacaaaccagcaactaataaaacctctaattctgc

SEQ ID NO: 158137 - DNA, 26202 bp, Homo sapiens
  Payload ID: 10961
  Gene Symbol: NEB
  Gene Name: nebulin
  Uniprot ID: P20929
  ENST ID: ENST00000427231
  CDS Start-End: 204-25781
aggcatcacgctggcttttgcctggggttctcaggaggggagagttgggagaggctttgctgctgaggaaatttatttggtagattgaaggtttgaacgagagctacagaaacgaaagaaaaagtctgtataagccaatggtgttcgggaagaaaataaccccattgccttgagtttgtaggtgccactactactctggaaaaatggcagatgacgaagactatgaggaggtggtggagtactacacagaagaagtggtttacgaagaggtgccgggagagacaataacaaaaatttatgagactacgacaacaaggacatctgactatgagcaatcagaaacttccaaaccagctctggcacagccagcactggcacagccagcatcagcaaagccggtggagaggaggaaggtcatccggaagaaagtggatccttcaaagttcatgaccccctacattgcacacagtcagaaaatgcaggatctttttagcccaaataaatacaaggagaagtttgagaaaacaaaaggacagccatacgccagcacaacagatactccagaacttcgcagaatcaaaaaagtacaagatcaactcagtgaggttaagtatcgaatggatggtgatgttgctaagactatatgtcacgtagatgaaaaagcaaaggatattgaacatgcaaagaaagtgtcgcagcaagtcagtaaggttttatacaagcagaactgggaagacaccaaggataagtacctgcttcctcctgatgcccctgaacttgtccaggccgttaagaacaccgccatgttcagcaagaaactgtacactgaagactgggaagcagacaaaagtttgttttacccctataatgatagcccggaactgaggagagttgcccaggcccagaaagctctcagtgatgttgcctacaaaaaaggtctcgctgaacagcaagctcaattcacgcctctggctgatcctccagatatagaatttgccaagaaagtaaccaatcaagtgagcaagcaaaaatacaaagaagactatgaaaataaaatcaaaggcaaatggagtgagacaccttgctttgaagttgcaaatgccagaatgaatgctgataacattagcacaaggaaataccaggaagattttgaaaacatgaaagaccagatctacttcatgcagaccgaaacaccagagtataaaatgaataaaaaagctggtgtggcagctagcaaggtaaaatacaaagaagactatgaaaagaataaaggaaaagcagattataatgtgcttcctgcttcagagaacccacagcttaggcagctgaaggcagcaggagatgccctaagtgacaaactatacaaggaaaactatgaaaagacaaaagcaaagagcataaattactgcgagacccccaaattcaagctcgatactgttctgcagaacttcagtagtgataaaaaatataaagattcctacttaaaagatattttgggacattatgtaggcagcttcgaggatccataccattcacactgcatgaaagtcacagctcaaaacagtgataaaaactacaaagcagaatacgaagaagacagaggcaaaggcttcttccctcagaccataactcaagaatatgaagcaattaagaaactagatcagtgtaaagaccacacctacaaagtccatccagataagacaaaattcacccaagttacagactctcctgttctgctacaagcccaagtcaattccaaacaactgagtgacttaaattacaaagcaaaacatgaaagtgaaaagttcaagtgccatatcccccctgatactcctgcttttatccagcacaaagtcaatgcctataacttgagtgataatctttataagcaagactgggagaagagcaaagccaaaaagtttgacattaaagtggatgccattcccctgctggcagccaaagccaacaccaagaacaccagcgatgtgatgtacaagaaagactatgaaaaaaacaaagggaaaatgattggagtcctcagcattaatgacgatcccaagatgctgcactccttgaaggtggccaaaaaccagagtgatagattatacaaggaaaactatgagaagacaaaggcaaagagtatgaattactgtgagaccccaaaatatcaacttgatactcagctgaagaacttcagtgaggctagatataaagacttatatgtaaaggatgttttgggacattatgtaggcagcatggaggacccatatcacacacactgcatgaaagttgcagctcaaaacagtgataaaagttacaaagcagaatatgaagaagataaaggaaaatgctatttccctcagacaataacacaagaatatgaagcaatcaagaagctggaccagtgtaaagatcatacctacaaagttcatccagataagaccaaattcacggcagtcactgattctcctgtactgttgcaagcccagctcaacacgaaacagcttagtgatctgaattacaaagcaaaacatgaaggtgagaagttcaagtgccatataccagcagatgctccacagtttatccaacacagagtcaatgcctataatctgagtgataatgtttataagcaagactgggagaagagcaaagccaagaagtttgacattaaagtggacgccattcccctgttggcagccaaagccaacaccaagaacaccagcgatgtgatgtacaagaaagactatgaaaagagcaaagggaaaatgattggagccctcagcattaatgacgatccaaagatgctgcactccttgaagacagccaaaaaccagagtgatcgcgaatatcgaaaagattatgaaaagtcaaaaactatctacacggcacctcttgatatgctccaagtcactcaagctaagaaatctcaggcaattgccagcgacgttgattataagcacatcttacacagttacagctacccccctgatagcatcaatgtggaccttgccaagaaggcatatgcgctgcagagcgatgttgaatacaaagctgactacaatagctggatgaaaggttgtggctgggtgccttttgggtccttagaaatggaaaaggcaaagcgagcttcagacatcctcaatgagaaaaaatatcgccaacatccagacaccctcaagtttacctcgattgaagatgctccaattacagtacagtctaaaattaaccaggcccagaggagtgatatcgcttacaaagccaaaggagaggaaattattcacaaatacaacctgccaccagacctgccccagttcatccaggctaaagttaatgcctacaatatcagtgagaatatgtacaaagcagacttgaaagacttgagcaagaagggatatgacctgagaactgatgcgattcccatcagagctgccaaagctgccaggcaggcggcgagtgacgttcagtacaaaaaagactatgaaaaggctaaagggaaaatggttggcttccaaagtcttcaagatgaccctaaactggttcattatatgaacgtggccaagatacaatcagatcgggagtataaaaaagactatgagaagacaaagtccaaatacaacacgccccatgatatgttcaatgtcgtggcggctaagaaagcccaggatgtggtcagcaatgtcaactataagcattctctccatcattacacctacttgcctgacgccatggacctggagctgtctaagaacatgatgcagatacagagtgataacgtctacaaggaagactacaacaactggatgaaaggcattggctggattcctattggcagtctcgacgtcgaaaaagttaaaaaggccggtgatgctctgaatgaaaagaagtacaggcaacatccagacaccctcaaatttaccagcattgtggactccccagttatggtccaggcaaaacagaacacgaagcaagtcagtgatatcttatacaaggctaaaggagaagatgtgaaacataaatacaccatgagtcctgatcttcctcagtttctccaggccaagtgcaatgcttacaatataagtgacgtctgttataaacgggattggtatgacttaatagccaagggcaacaatgtgctgggcgatgctattcccatcactgcagccaaggcatcgagaaacattgccagtgattataaatacaaggaagcttatgagaagtcaaagggaaagcatgtgggtttcagaagcctccaggatgatcccaagctggtccactatatgaatgtggcaaagctgcagtctgatcgtgaatacaagaagaactatgagaacaccaaaaccagctaccatacccctggggacatggttagcatcacagctgcaaagatggcccaggatgtcgctaccaatgtcaactacaaacagccattgcatcattacacatacctacctgacgccatgagtcttgagcatacgaggaatgtcaatcaaattcagagtgataatgtgtataaagacgagtataacagcttcttgaagggcatcggatggatccctattggttccctggaggtggagaaggtcaagaaagcaggcgatgcattaaatgagaggaagtatcgacagcacccagataccgtcaagttcacaagtgtgcctgattccatgggcatggtgttggctcagcataacacaaagcagctaagtgatttgaactacaaggtagagggagagaaactgaagcacaagtatactattgaccctgaattgcctcagtttattcaagccaaagtcaacgccctcaacatgagtgatgctcattataaagcagattggaagaaaaccattgccaagggctatgatttgagaccagatgccatcccaattgttgctgcaaaaagttcaaggaatattgctagtgattgcaaatataaggaggcctacgagaaagccaaaggcaagcaagttggatttctcagtcttcaggatgatcctaaactggttcactacatgaatgtggccaaaatccagtctgatcgtgagtacaaaaagggctatgaagccagcaagaccaagtaccacacacctctggatatggtcagtgtgacagctgcaaagaaatctcaggaggttgccaccaacgccaactacagacagtcataccaccactacactctcctgcccgatgccttgaatgtggagcactccaggaatgccatgcagattcagagtgataatctgtacaaatctgacttcaccaattggatgaaagggatcggctgggtgcccatagagtccctggaggtggagaaggcaaagaaagcaggagagattcttagtgagaagaagtatcgccagcaccccgagaagctgaagttcacttacgccatggacacaatggaacaggcacttaacaagagtaacaaactgaacatggacaagaggctctacactgaaaaatggaacaaggacaagaccaccattcatgtcatgcctgacacaccggatattttactctccagagtaaaccaaatcaccatgagtgataaactgtacaaagctggctgggaagaggaaaagaagaaaggatatgacctgaggcctgatgccattgcaataaaggctgcaagagcctctagagacattgccagtgattacaaatacaagaaagcctatgaacaagccaaagggaaacacattggcttccggagcctggaagatgaccccaagctggtgcacttcatgcaagtggccaagatgcagtcagaccgggaatacaagaagggatatgagaaatccaagacctccttccacaccccggtggacatgctcagtgtggtggcagccaagaagtctcaggaagtggccaccaatgccaactacaggaacgtgatccatacctacaacatgcttcctgatgccatgagctttgaattggccaaaaatatgatgcagattcaaagtgataatcagtacaaggctgactatgctgacttcatgaagggcattggatggctccctctgggctccctggaagcagagaaaaacaagaaagccatggagattattagtgaaaagaagtaccgccagcacccagacactttgaagtattccacactcatggactcgatgaacatggttttggcccagaataatgcaaaaattatgaacgaacatctctacaaacaagcatgggaggctgacaaaaccaaagtccacatcatgcctgatatcccccagattattttggcaaaggcaaatgcaattaatatgagtgataaactctacaaactttccttggaagagtctaaaaagaaaggctatgatctcagacctgatgcaattcctatcaaagctgccaaggcttccagagatattgcaagtgattataaatacaagtacaattatgaaaaagggaaggggaaaatggttggtttccgcagtctcgaggatgatcccaaattagtccattccatgcaagtggctaagatgcaatctgatcgggagtacaagaaaaactatgagaacacaaagaccagctaccacacccctgccgacatgctcagtgtcacggctgcaaaggatgcccaagccaacatcaccaacactaactacaagcacctgattcacaagtacatcctccttccagatgcaatgaacattgagctgaccaggaatatgaatcgcatacagagtgataatgaatataagcaagattacaatgaatggtacaaagggcttggctggagtccagcaggttctctggaagtggagaaggccaagaaagcaactgaatatgccagtgatcagaaataccgccagcacccgagcaacttccagtttaagaagctgactgattccatggacatggtgcttgccaagcagaatgcacataccatgaacaagcatttatacaccattgattggaataaagataagaccaagattcatgtgatgcctgatacaccagatattttacaagccaagcagaatcaaacactgtatagtcagaaactctataaacttggatgggaagaagctttgaagaaaggctatgatctcccagttgatgcaatttctgtacagctagctaaagcttcaagagacattgctagtgattataaatacaaacaaggctaccgaaagcaacttggccaccatgttggattccggagtctgcaagatgacccaaaacttgtgttgtccatgaatgtagccaaaatgcagagtgaaagagaatacaagaaggactttgagaagtggaaaactaagttctccagcccagtggacatgttgggagtggtactggccaagaagtgtcaggagttggttagtgacgtggactacaagaactacctgcatcagtggacatgtctgcctgatcagaacgatgttgtgcaagctaagaaagtttatgaactgcaaagtgagaatctatataaatctgaccttgagtggctgagaggcataggatggagtcccttgggttctttagaggcagaaaagaacaagcgggcttcggaaatcatcagtgagaagaaatatcgtcagcctccagacagaaacaagttcaccagcattcctgatgccatggatatagttctggcaaagacaaatgccaaaaataggagtgatagactttatagagaagcttgggacaaagacaagactcagatccacatcatgcctgatacacctgacattgttctggctaaagcaaacttaatcaacacaagtgataaactctaccgaatgggttatgaggagctgaagagaaaaggttacgatcttcctgttgatgccataccaatcaaagcagcaaaagcctcccgggaaattgccagtgaatacaagtacaaggaaggctttcgcaagcagctcggccaccacattggtgcccggaacattgaagatgaccccaagatgatgtggtccatgcatgtggccaagatccagagtgacagggagtacaagaaggactttgagaagtggaagaccaagttcagcagcccagtggacatgctgggggtggtgttggccaagaagtgccagaccttagtcagcgacgtggactacaagaactacctgcaccagtggacatgcctgcccgaccagagcgatgtcatccatgctcggcaggcctatgacctccagagcgataatttgtacaagtcagaccttcagtggctaaaaggcattggctggatgactagtggttctctcgaggatgagaaaaataaacgagccacccagattttgagtgaccatgtttaccgtcagcacccagatcaatttaagttttccagccttatggattccataccaatggttttggcaaaaaacaatgctattaccatgaatcatcgcctctatacagaagcttgggataaagataaaaccactgtccacattatgccagatacccctgaagttttattagctaaacaaaacaaagtaaattacagtgagaaattgtataagcttggcctagaagaagccaagaggaaaggttatgacatgcgggtagatgccattcctatcaaggcagccaaggcctccagagatattgcaagtgaattcaagtacaaagaaggctatcgtaagcagctcggccaccacattggtgcccgagctatacgtgatgaccccaagatgatgtggtccatgcacgtggccaagatccagagtgacagggagtacaagaaggactttgagaagtggaagaccaagttcagcagcccagtggacatgctgggggtggtgctggccaagaagtgccagaccttagtcagcgatgtggactacaagaactacctgcaccagtggacatgcctgcccgaccagagcgacgtcatccatgctcggcaggcctatgacctccagagcgataatatgtacaagtctgatctccagtggatgagaggcattggctgggtgtccattggctctttggatgtggaaaaatgcaaaagggcaactgaaattttgagtgataaaatctatcgccagcctccagacagattcaaatttaccagtgtgactgactctctggaacaagtgttggccaaaaataatgccatcactatgaacaagcgtttatacacagaagcctgggacaaagacaagactcagatccacataatgccagacacaccagaaattatgttggcaagaatgaacaaaatcaactacagtgagagtctgtacaaacttgctaatgaagaagcaaagaagaaaggctatgacttgcgaagcgacgccatccccatcgtggcggccaaggcctccagggacatcatcagtgactacaaatataaagatggttactgcaagcaacttggccaccatattggagcccggaacattgaagatgaccccaagatgatgtggtccatgcacgtagccaagatccagagtgacagggagtacaaaaaggactttgagaagtggaagaccaagttcagcagcccagtggacatgctgggggtggtgctggccaagaagtgccagaccttagtcagtgacgtggactataagaactacctgcacgagtggacatgcctgcctgaccagagcgatgtcatccatgctcggcaggcctatgacctccagagtgacaatatttacaagtcagatctccagtggctgagaggcattggctgggtccccattgggtctatggatgtggtcaagtgcaagagagctaccgaaatactgagtgataacatctaccgccagcctccggacaagctgaaatttaccagtgtgactgattctctagagcaggtgctggccaagaacaatgctctcaacatgaataagcgtttatacacagaggcctgggacaaagacaagactcaaattcacataatgcctgatacaccagagattatgttggcaaggcagaacaaaatcaactacagtgagactctatacaaacttgccaatgaagaagcaaaaaagaaaggctacgacttgcgaagtgacgccatccccatcgtggctgccaaggcctccagggacgttatcagtgattacaaatacaaagatggttaccgcaagcagctcggccaccacattggagcccggaacattgaagatgaccccaagatgatgtggtccatgcatgtggccaagatccagagtgacagggagtataagaaggactttgagaagtggaagaccaagttcagcagcccagtggacatgctgggagtggtgttagccaagaagtgccagaccttagtcagcgatgtggactacaagaactacctgcacgagtggacgtgcctgcccgaccagaatgatgtcatccatgctcggcaggcctatgacctccagagcgataacatttacaaatctgatctccagtggctgagaggcattggctgggtccccattgggtctatggatgtggtcaagtgcaagagagctgctgaaatactgagtgataacatctaccgccagcctccggacaagctgaaatttaccagtgtgactgactctctagagcaggtgctggccaagaacaatgctctcaatatgaacaagcgcttatacacagaagcctgggacaaagacaagacccaagtccatattatgcctgatacacctgaaatcatgttggcaagacaaaataaaataaattatagtgagagcctctatcgtcaggccatggaagaagccaagaaagaaggctatgacttgagaagtgatgccattcccattgtggctgccaaggcctctcgggatattgccagtgattacaaatacaaagaagcatatcgtaaacagttgggtcaccacattggcgcccgagcagtacacgatgaccccaagataatgtggtccctccacattgccaaagtgcagagtgaccgtgagtacaagaaagattttgagaaatacaagacaaggtacagcagcccagtggacatgcttggtatcgttttggccaagaagtgtcagaccttggtcagcgatgtggactataaacatcctctgcatgaatggatctgcctgcccgaccagaatgacatcattcatgcacggaaagcctatgacctccagagtgacaatttgtataagtcagaccttgaatggatgaaaggcattggctgggttccgattgattccttggaagttgttagggccaagagagctggagaattacttagtgatactatctaccgtcagcgtccagaaacgctgaaatttaccagtataacggacactccggagcaggtgctggcaaaaaacaatgctttaaacatgaataagcgcttatatactgaagcctgggacaatgacaagaaaactattcatgtcatgcctgatacaccagaaatcatgttagccaaactcaaccgaataaactacagtgataaactctataaacttgctttggaagagtccaagaaggaaggctatgacttgcgtctggatgccattccaatccaagcagccaaggcttcaagagatattgctagtgattacaagtacaaggaaggctaccgcaaacagcttggccaccatattggggcccggaacattaaggatgacccgaagatgatgtggtccatccatgtggccaagatccagagtgacagggagtacaagaaggagtttgagaagtggaagaccaagttcagcagcccagtggacatgctgggggtggtgctggccaagaagtgtcagatccttgtaagcgacatagactacaagcatcccctgcatgaatggacctgcctgcctgatcagaatgacgtcattcaggctcggaaggcctatgacctgcagagtgatgctatttacaaatctgatcttgagtggctgagaggcataggatgggttcccattggctctgtagaggtcgagaaagtgaagagagctggagaaatcctgagtgacaggaagtatcgccagcctgcagaccagctcaaattcacatgcattaccgacactccggaaattgtcctagcaaagaataatgccctgacaatgagcaagcatttatacacagaagcttgggatgctgacaaaacctccatccacgtgatgccagacaccccagatatcctgctggccaagagtaattctgccaatatcagccaaaaactttacaccaagggatgggatgaatcaaagatgaaggactatgatctgagagcagatgctatttccatcaaaagtgccaaggcctccagggacatcgccagtgactacaaatacaaggaagcctatgagaaacagaaaggccaccacattggagcccagagcattgaagatgatcccaagattatgtgtgccatacatgcaggaaaaattcaaagtgaaagggagtacaagaaggaattccaaaagtggaaaaccaagttctctagcccagtggacatgttaagcatcttgctggccaagaaatgtcagactttggtcactgacattgattatcgcaattacctgcatgaatggacatgcatgccggatcaaaacgacattatccaagcaaaaaaggcctatgacctgcagagtgatagtgtgtataaggcagacctggagtggctgcgtggcatcggctggatgccagaaggctcagtggaaatgaacagagtgaaggttgctcaagacctcgtgaatgaaagactctataggacacgtccagaagctttgtcattcaccagcattgtcgacactccagaagttgtcttggcaaaagccaattctctgcaaataagtgagaaactgtatcaggaagcctggaataaagataaaagcaacatcaccattccttctgatactccggagatgctgcaggcccacatcaatgccttgcaaatcagcaataaactctaccaaaaagactggaatgacgccaagcagaaaggctatgacataagggcagatgccattgaaatcaagcacgccaaggcctccagagaaattgccagtgagtacaaatacaaagaaggttaccgtaagcaactgggccaccacatgggtttccgcaccctacaagatgaccccaagtcagtatgggctatacatgctgccaagatccagagtgacagagaatataagaaagcttatgagaagtctaaaggaattcacaacacaccgttggacatgatgtcaattgttcaagccaagaaatgccaggtcctggttagcgacattgattatcgcaattatctgcaccagtggacgtgtctgccagatcagaacgatgtgatccaggccaagaaagcctacgacctgcagagcgataacttgtacaagtcagacctggaatggctgaagggtattggatggctgccagagggttctgtggaagtgatgagagtgaagaatgcccagaatctcttgaatgaaaggctgtatcgtataaagcctgaggccctcaaattcaccagcattgttgacaccccggaagtaatccaggcaaagatcaatgctgtacagatcagtgagccattgtatcgcgatgcctgggagaaagagaaggctaatgtgaacgtgccagctgacactcccctgatgctgcaatccaaaatcaatgccctgcagatcagcaataaacgctatcagcaagcttgggaagatgtcaagatgactggttatgacctgcgagcagatgccattgggatccagcatgccaaggcttccagggatattgccagtgactatctgtacaaaactgcttatgagaaacagaaaggccattacattggctgtcgcagcgccaaggaagaccctaaactggtttgggcagcaaatgtgttgaagatgcagaatgacaggctgtacaaaaaggcctacaacgaccacaaagccaagatctccatccctgtggacatggtgtccatcagcgctgccaaagaaggtcaggcactggcaagtgatgtggactatcgccattacctgcaccactggtcttgctttcccgaccagaatgatgtgatccaagccaggaaagcctacgacctacagagcgacagtgtgtataaggcagacctggagtggctgcgtggcatcggctggatgccagaaggctcagtggaaatgaacagagtgaaggttgctcaagacctcgtgaatgaaagactctataggacacgtccagaagctttgtcattcaccagcattgtcgacactccagaagttgtcttggcaaaagccaattctctgcaaataagtgagaaactgtatcaggaagcctggaataaagataaaagcaacatcaccattccttctgatactccggagatgctgcaggcccacatcaatgccttgcaaatcagcaataaactctaccaaaaagactggaatgacaccaagcagaaaggctatgacataagggcagatgccattgaaatcaagcacgccaaggcctccagagaaattgccagtgagtacaaatacaaagaaggttaccgtaagcaactgggccaccacatgggtttccgcaccctacaagatgaccccaagtcagtatgggctatacatgctgccaagatccagagtgacagagaatataagaaagcttatgagaagtctaaaggaattcacaacacaccgttggacatgatgtcaattgttcaagccaagaaatgccaggtcctggttagcgacattgattatcgcaattatctgcaccagtggacgtgtctgccagatcagaacgatgtgatccaggccaagaaagcctacgacctgcagagcgataacttgtacaagtcagacctggaatggctgaagggtattggatggttgccagagggttctgtggaagtgatgagagtgaagaatgcccagaatctcttgaatgaaaggctgtatcgtataaagcctgaggccctcaaattcaccagcattgttgacaccccggaagtaatccaggcaaagatcaatgctgtacagatcagtgagccattgtatcgcaatgcctgggagaaagagaaggctaatgtgaacgtgccagctgacactcccctgatgctgcaatccaaaatcaatgctctgcagatcagcaataaacgctatcagcaagcttgggaagatgtcaagatgactggttatgacctgcgagcagatgccattgggatccagcatgccaaggcttccagggatattgccagtgattatctgtacaaaactgcttatgagaaacagaaaggccattacattggctgtcgcagcgccaaggaagaccctaaactggtttgggcagcaaatgtgttgaagatgcagaatgacaggctgtacaaaaaggcctacaacgaccacaaagccaagatctccatccctgtggacatggtgtccatcagcgctgccaaagaaggtcaggcactggcaagtgatgtggactatcgccattacctgcaccactggtcttgctttcccgaccagaatgatgtgatccaagccaggaaagcctacgacctacagagcgacagtgtgtataaggcagacctggagtggctgcgtggcatcggctggatgccagaaggctcagtggaaatgaacagagtgaaggttgctcaagacctcgtgaatgaaagactctataggacacgtccagaagctttgtcattcaccagcattgtcgacactccagaagttgtcttggcaaaagccaattctctgcaaataagtgagaaactgtatcaggaagcctggaataaagataaaagcaacatcaccattccttctgatactccggagatgctgcaggcccacatcaatgccttgcaaatcagcaataaactctaccaaaaagactggaatgacaccaagcagaaaggctatgacataagggcagatgccattgaaatcaagcacgccaaggcctccagagaaattgccagtgagtacaaatacaaagaaggttaccgtaagcaactgggccaccacatgggtttccgcaccctacaagatgaccccaagtcagtatgggctatacatgctgccaagatccagagtgacagagaatataagaaagcttatgagaagtctaaaggaattcacaacacaccgttggacatgatgtcaattgttcaagccaagaaatgccaggtcctggttagcgacattgattatcgcaattatctgcaccagtggacgtgtctgccagatcagaacgatgtgatccaggccaagaaagcctacgacctgcagagcgataacttgtacaagtcagacctggaatggctgaagggtattggatggttgccagagggttctgtggaagtgatgagagtgaagaatgcccagaatctcttgaatgaaaggctgtatcgtataaagcctgaggccctcaaattcaccagcattgttgacaccccggaagtaatccaggcaaagatcaatgctgtacagatcagtgagccattgtatcgcgatgcctgggagaaagagaaggctaatgtgaacgtgccagctgacactcccctgatgctgcaatccaaaatcaatgccctgcagatcagcaataaacgctatcagcaagcttgggaagatgtcaagatgactggttatgacctgcgagcagatgccattgggatccagcatgccaaggcttccagggatattgccagtgactatctgtacaaaactgcttatgagaaacagaaaggccattacattggctgtcgcagcgccaaggaagaccctaaactggtttgggcagcaaatgtgttgaagatgcagaatgacaggctgtacaaaaaggcctacaacgaccacaaagccaagatctccatccctgtggacatggtgtccatcagcgctgccaaagaaggtcaggcactggcaagtgatgtggactatcgccattacctgcaccgctggtcttgctttcccgaccagaatgatgtgatccaagccaggaaagcctacgacctacagagcgacgccctctacaaggctgacttggagtggttgcgtggcattggctggatgccccaagggtctcctgaagtgttgagagtcaaaaacgcccagaatatcttttgtgacagtgtctatcggacgcctgtggtgaaccttaagtacacaagcattgttgacacacctgaagtggtccttgctaaatcaaatgctgaaaatattagtattccaaagtacagagaggtttgggacaaggataaaacttcaatacacataatgccagatactccagaaattaatctcgctagagcaaatgctcttaatgtgagcaataaactttaccgtgagggctgggatgaaatgaaggcgggctgtgatgtccggctggatgccatccccatccaggctgccaaggcctccagggagattgccagtgactataaatataagcttgaccatgagaagcagaagggacactacgtgggcaccctcacagccagggatgacaacaagatccgctgggccctcatagctgacaagctccagaatgaacgagagtaccggctggactgggccaaatggaaggccaagatccagagccctgtggacatgctttccatcctgcactctaaaaattcccaggctctggtcagtgacatggattaccgcaattacctgcaccagtggacctgcatgcccgaccagaacgatgtgattcaggccaagaaggcctacgaactgcagagcgataatgtttacaaggctgacttggaatggttgcgtggaattgggtggatgccaaatgactccgtgtccgtcaatcatgccaaacatgccgcggacatcttcagtgagaaaaaatatcgcacaaaaatagaaactctcaactttacgcctgtggatgacagagttgattatgtgacagcgaaacaaagtggcgagatcctcgatgatattaaataccggaaagactggaatgccaccaaatcaaagtacaccctcacagaaacccccctgctgcacactgcccaggaggctgctaggatactggaccagtatctctacaaggaaggctgggagagacaaaaagccacaggttacattttgcctccagatgctgtgccatttgttcatgcccatcactgcaatgacgttcagagtgagctgaaatacaaagctgaacatgtgaagcaaaaaggtcattatgttggtgtcccgacgatgagagatgatcctaagctggtttggtttgagcatgcaggccagattcagaatgagagactatacaaagaggactatcacaaaacaaaggccaaaatcaatatacctgctgatatggtgtcagtcttggccgccaagcaggggcagacccttgtcagtgatattgattatcgtaattacttgcaccaatggatgtgtcatcctgaccagaacgatgttattcaggcaagaaaggcctatgacctacagagtgataatgtctacagagctgacctggagtggctccgaggcattggctggatcccactggattctgtggaccatgtaagggttactaagaaccaggaaatgatgagtcagatcaaatataagaaaaatgcccttgaaaactatcctaactttagaagtgtggtggatcctccagagattgttttagccaagattaattctgtcaatcaaagtgatgtaaaatataaagaaacatttaataaagcaaagggcaaatatacgttttcaccagatacaccacatatctcccactccaaagacatgggaaaactctacagtactatactgtataaaggggcgtgggagggcaccaaggcctatggctacaccctggatgagcgctacattcccattgttggagccaagcatgctgatctggtgaacagtgagcttaaatacaaagagacatatgagaagcagaaaggtcactacctggctggaaaagtgatcggtgaattccctggtgtggttcactgtctggatttccaaaagatgaggagtgcgttgaactacagaaaacattatgaggataccaaagcaaatgttcatatccccaatgacatgatgaatcacgtgctggctaaaaggtgccagtacatcctcagtgacctggagtatcgacactatttccaccagtggacgtctcttctggaagaacccaatgttatacgcgtccgaaacgcccaggagatcttgagtgataatgtgtataaagatgacctgaattggttgaaaggcattggttgctacgtttgggatacaccccaaatcctccatgccaagaaatcatacgaccttcagagtcagctacaatatacagcagcaggtaaagaaaatctacaaaactataatctggtcacagacacgcccctctatgtgactgctgttcagagtggcattaatgccagtgaggtaaaatataaagaaaattatcatcagattaaggacaaatacacaacagttctagaaacagtggattatgacagaaccagaaacctgaagaatctttacagcagtaacctgtacaaggaggcctgggatagagtgaaagccaccagctacatcctgccttccagcaccttgtccctgacacacgccaagaaccagaagcatctggccagccatatcaaatatcgggaagaatatgaaaagttcaaagctctttatacgttaccaagaagtgttgacgatgatccgaacacagcacggtgcctccgagttggcaagcttaacatcgatcgcctgtacagatcagtttatgaaaagaacaagatgaaaatccacatcgtgcccgacatggtagagatggttactgccaaggattcccagaagaaagtcagtgagattgattaccgcctgcgcctccacgaatggatttgccaccccgacttgcaagtcaatgatcacgtcaggaaagtcacagatcagatcagcgatattgtatacaaggatgacctcaactggctgaaaggcattggttgctacgtctgggacactcctgaaatcctccatgccaagcatgcttatgatctacgtgatgatatcaagtataaagctcacatgttgaaaacaaggaatgactacaagcttgtcacagatacaccagtctacgtgcaggctgtcaaaagtgggaaacagctaagtgacgctgtctaccactatgactatgtgcacagtgtcagaggcaaagtggctccaactaccaaaaccgtggatctggaccgggcccttcatgcatacaagctccagagttcgaatctatacaaaaccagcctgcgcaccctgcccactggatatagacttccaggtgacactcctcacttcaaacacatcaaggacacccgttacatgagcagttatttcaagtacaaagaagcctatgaacacaccaaggcatatgggtatacacttggccccaaagatgttccatttgtccacgtccggagagtcaacaatgttaccagcgagagactgtatcgggaattgtaccacaaactgaaagacaagatccatacaactcccgatacccctgagatccgccaagtcaagaagacacaagaggctgtcagtgagttgatctacaaatcagacttcttcaagatgcagggccacatgatctctctgccatacacaccccaagtgatccattgccgctatgtgggagacatcaccagtgatattaaatacaaagaggacttgcaggtcctgaagggatttggctgcttcctgtatgacactcctgacatggtccgctcccggcacctgcggaagctctggtctaattacctatacactgataaggcaaggaagatgcgagacaaatacaaagtggtgcttgacactccagaatacagaaaagtgcaagaactgaagacacatctgagtgagctggtctacagagctgcaggcaagaagcagaagtcaatctttacttcagttcctgatactcctgatcttttaagagccaagcgagggcagaagcttcagagtcagtatctgtatgttgaacttgccaccaaagagagaccccatcatcacgctggaaaccagaccacagccttgaagcatgctaaagacgtgaaggacatggtcagtgagaaaaagtacaagattcaatatgaaaagatgaaagacaagtacactccggttccagatacgccaatcctcatcagagccaagagggcttactggaatgccagtgatctacgctacaaagaaacatttcaaaagaccaaagggaaataccacacggtgaaagatgccctagacattgtctatcatcgcaaagtcacagatgacatcagtaaaataaaatacaaggagaactacatgagccagttgggtatctggaggtccattcctgatcgtccagagcatttccaccaccgagcagtcactgacacagtcagtgatgtaaaatataaagaagacttgacttggcttaaaggcattggttgctatgcctatgatacccctgatttcactctggctgaaaagaacaagactctctacagcaagtataagtataaagaagtatttgaaaggacaaagtcagatttcaagtatgttgccgactctccgatcaataggcatttcaagtatgcaactcaattgatgaatgagaaaaaatacagagctgattatgagcagcggaaagataaataccacctggtagtcgatgagcctagacatctgctggctaagaccgcaggcgaccagatcagtcagatcaaatacaggaaaaactatgaaaaatcaaaggacaaatttacctcaattgtggatactccagaacacctgcgtactacaaaagtcaacaaacaaatcagcgatatcctttataaattggaatacaacaaggccaaacccagaggctacaccacaatccacgacacacccatgttgctgcatgtccgcaaggttaaagatgaagtcagtgatctgaaatacaaagaagtataccaaagaaataaatccaactgcaccattgagccagatgctgttcatatcaaagcagccaaggacgcctacaaagtcaacaccaatctggactataagaaacagtacgaagccaacaaagcccactggaagtggactcctgaccgaccggacttcctccaggctgccaagtcatccctgcagcaaagcgattttgaatataagctggaccgggagttcctcaagggttgcaagctttctgtcactgatgacaaaaacacggtgctcgccctcaggaatactttaatagaaagtgatctgaaatacaaagagaaacatgtcaaggaaagaggaacctgccatgccgtacctgacacgcctcagatcctgctggcgaagactgtcagcaacctggtgtctgagaacaagtacaaggaccatgtcaagaagcacttggcacagggctcatacacaacactaccagagacccgggacactgttcacgtcaaggaagtgaccaagcatgtcagtgatacaaattacaaaaagaagtttgtcaaggagaaaggaaaatccaactactccatcatgctggagccaccagaggtgaaacatgctatggaagtggccaagaagcaaagtgatgtcgcttacagaaaagatgccaaagagaacctgcattacaccacagtggctgatcgaccagacatcaagaaggccacacaggcagccaaacaggccagtgaggtggagtacagagccaagcaccgcaaggaaggcagccatggcttaagcatgctcggtcgcccagacatagaaatggccaagaaggcagccaagctgagcagccaggttaaataccgagaaaatttcgataaagaaaagggcaagacaccaaaatacaatccaaaagacagccagctctacaaagtcatgaaagatgctaataatcttgcaagtgaggttaaatacaaggctgacctgaagaaacttcacaaacccgtgactgacatgaaggagtctctgatcatgaatcatgtcctgaatacaagccaacttgccagttcttaccagtacaagaagaagtatgagaagagtaaaggccactaccacaccatacccgataatctggagcagcttcacctaaaagaggccacagaattacagagtatagtgaaatacaaagaaaagtatgaaaaggaacgaggaaaacccatgctggactttgaaacaccaacgtacatcactgccaaagagtctcagcagatgcagagtgggaaagaatataggaaagattatgaagagtccattaaaggcagaaacctgactggcctggaggtcacgccagctttgttacatgtcaaatatgcaactaaaatagcaagcgagaaagagtacaggaaagatctagaggaaagcatccgtgggaagggcctcactgaaatggaagatacacctgacatgctaagagcaaagaatgccactcaaatcctcaatgagaaagaatataagcgagacctggaactggaagtcaaaggaagaggcctgaatgccatggccaatgaaactccggattttatgagggccaggaatgctactgatattgccagtcagattaagtataagcaatcagcagaaatggagaaagccaatttcacttctgtggttgatactccagagatcattcatgcccaacaagtcaagaatctttcaagccagaaaaagtacaaggaagatgctgagaagtccatgtcgtattatgagactgttttggacaccccagagatacagagagtccgggagaaccaaaagaacttcagccttctccaataccagtgtgaccttaaaaacagtaaaggaaaaattacagttgttcaagacacgccagaaatactgcgtgtaaaagaaaatcagaagaatttcagctcggttttatataaagaggatgtctcaccaggaacggctatcggaaagacacctgagatgatgagagtgaaacaaacacaggaccacattagctcggtgaagtataaggaagcaataggacaaggaactccaatccctgacctgcctgaagtgaaacgtgtgaaggagacgcagaagcacattagctcggttatgtacaaagaaaacttgggaacaggcattccaaccactgtgactccagagattgagagagtcaaacgcaatcaagagaactttagctcggttttgtacaaagaaaatttggggaaaggaatcccaacacctatcactccagagatggagagagtcaaacgcaatcaagagaactttagctcgatattgtacaaagagaacttgagcaaggggactcccctacctgtcactcctgagatggagcgagtcaaactcaatcaagaaaactttagctcggtgttgtataaagaaaacgttggaaaagggattccaatccccatcactccagagatggagagagtcaaacacaatcaagaaaactttagttcggtgctatacaaagaaaacctggggacaggaattccaatccccatcactcctgagatgcagagagtcaaacacaatcaagaaaaccttagctcggtgttatacaaagaaaacatgggcaagggaacccctttacctgtcactcccgagatggaaagagtcaaacacaatcaagaaaatattagctcggtgttatacaaagaaaacatgggcaagggaacccctctacctgtcactcctgagatggagagagtcaaacacaatcaagaaaatattagctcggtgttatacaaagaaaacatgggcaagggaactcctttagctgtcactcccgagatggagcgagtcaaacacaatcaagaaaatattagctcggttttgtacaaagaaaatgtggggaaagccaccgcaacccctgtcactcctgagatgcagagagtcaaacgcaatcaagaaaacattagctcggtgttatacaaagagaacctggggaaagcaacccccacaccctttactcctgagatggaaagagtgaaacgcaatcaagaaaactttagctcggtattgtacaaagagaacatgagaaaagcaactccgacacctgttactccagagatggagagagctaagcgcaaccaagaaaacattagctcggttctttattctgatagtttccggaaacaaatacaaggcaaagctgcctatgtattggatacccccgagatgagacgggtgagggagacccaacggcacatctcaacggtgaaatatcatgaagactttgagaaacacaagggttgcttcacaccagtggtgacagatcctatcactgaacgagtaaagaagaacatgcaggacttcagtgacattaactaccgaggtattcagaggaaagtggtagaaatggaacaaaaacggaatgaccaagatcaggagactattacaggtttacgtgtctggcgtactaatcctggttcggtttttgactatgatccagcagaagacaacatccagtcccgaagcttacacatgattaatgtccaagctcagcgccggagccgggagcagtcacgatctgccagtgcactaagcatcagtgggggtgaggagaagtctgagcattcagaagcaccagaccaccacctttcgacttacagcgacgggggtgtctttgcagtctcaacagcttacaaacatgcaaaaaccacagagctcccacaacaacgatcatcttcagttgctacccaacagacaacggtatcttccatcccatctcatccatctactgctggaaaaatcttccgtgccatgtatgactatatggctgctgatgcagatgaggtgtccttcaaggatggagatgccatcataaatgttcaagcaattgatgaaggctggatgtatggcactgtgcagaggactggcaggaccggaatgctcccagccaactacgttgaagctatttaggcatttcaaagcatcacacttgtctgcaggacttacagatcctgcagtcaatgtttcggtttagactctccactgttacctaagttctcaagctgcctatggtttttctgtgtcaatgtgatttatggtagtaccatcctttctcctttgggttttaaaataagttgcagaacagacactttaaaagcttctgcaatattatttctgtgcctagagtctttctccattataaacatgttttaacattatttcttttctaaaacagggattttgaatatgccaaacacattaaaggaaaaatagcagagatgttcaccttttccttgctgattgctaatgcttattatttctaattcagttctgaagttataaacttataatcaatacaaaccagcaactaataaaacctctaattctgcaa

SEQ ID NO: 158138 - DNA, 25578 bp, Homo sapiens
  Payload ID: 10961
  Gene Symbol: NEB
  Gene Name: nebulin
  Uniprot ID: P20929
  ENST ID: ENST00000603639
  CDS Start-End: 1-25578
atggcagatgacgaagactatgaggaggtggtggagtactacacagaagaagtggtttacgaagaggtgccgggagagacaataacaaaaatttatgagactacgacaacaaggacatctgactatgagcaatcagaaacttccaaaccagctctggcacagccagcactggcacagccagcatcagcaaagccggtggagaggaggaaggtcatccggaagaaagtggatccttcaaagttcatgaccccctacattgcacacagtcagaaaatgcaggatctttttagcccaaataaatacaaggagaagtttgagaaaacaaaaggacagccatacgccagcacaacagatactccagaacttcgcagaatcaaaaaagtacaagatcaactcagtgaggttaagtatcgaatggatggtgatgttgctaagactatatgtcacgtagatgaaaaagcaaaggatattgaacatgcaaagaaagtgtcgcagcaagtcagtaaggttttatacaagcagaactgggaagacaccaaggataagtacctgcttcctcctgatgcccctgaacttgtccaggccgttaagaacaccgccatgttcagcaagaaactgtacactgaagactgggaagcagacaaaagtttgttttacccctataatgatagcccggaactgaggagagttgcccaggcccagaaagctctcagtgatgttgcctacaaaaaaggtctcgctgaacagcaagctcaattcacgcctctggctgatcctccagatatagaatttgccaagaaagtaaccaatcaagtgagcaagcaaaaatacaaagaagactatgaaaataaaatcaaaggcaaatggagtgagacaccttgctttgaagttgcaaatgccagaatgaatgctgataacattagcacaaggaaataccaggaagattttgaaaacatgaaagaccagatctacttcatgcagaccgaaacaccagagtataaaatgaataaaaaagctggtgtggcagctagcaaggtaaaatacaaagaagactatgaaaagaataaaggaaaagcagattataatgtgcttcctgcttcagagaacccacagcttaggcagctgaaggcagcaggagatgccctaagtgacaaactatacaaggaaaactatgaaaagacaaaagcaaagagcataaattactgcgagacccccaaattcaagctcgatactgttctgcagaacttcagtagtgataaaaaatataaagattcctacttaaaagatattttgggacattatgtaggcagcttcgaggatccataccattcacactgcatgaaagtcacagctcaaaacagtgataaaaactacaaagcagaatacgaagaagacagaggcaaaggcttcttccctcagaccataactcaagaatatgaagcaattaagaaactagatcagtgtaaagaccacacctacaaagtccatccagataagacaaaattcacccaagttacagactctcctgttctgctacaagcccaagtcaattccaaacaactgagtgacttaaattacaaagcaaaacatgaaagtgaaaagttcaagtgccatatcccccctgatactcctgcttttatccagcacaaagtcaatgcctataacttgagtgataatctttataagcaagactgggagaagagcaaagccaaaaagtttgacattaaagtggatgccattcccctgctggcagccaaagccaacaccaagaacaccagcgatgtgatgtacaagaaagactatgaaaaaaacaaagggaaaatgattggagtcctcagcattaatgacgatcccaagatgctgcactccttgaaggtggccaaaaaccagagtgatagattatacaaggaaaactatgagaagacaaaggcaaagagtatgaattactgtgagaccccaaaatatcaacttgatactcagctgaagaacttcagtgaggctagatataaagacttatatgtaaaggatgttttgggacattatgtaggcagcatggaggacccatatcacacacactgcatgaaagttgcagctcaaaacagtgataaaagttacaaagcagaatatgaagaagataaaggaaaatgctatttccctcagacaataacacaagaatatgaagcaatcaagaagctggaccagtgtaaagatcatacctacaaagttcatccagataagaccaaattcacggcagtcactgattctcctgtactgttgcaagcccagctcaacacgaaacagcttagtgatctgaattacaaagcaaaacatgaaggtgagaagttcaagtgccatataccagcagatgctccacagtttatccaacacagagtcaatgcctataatctgagtgataatgtttataagcaagactgggagaagagcaaagccaagaagtttgacattaaagtggacgccattcccctgttggcagccaaagccaacaccaagaacaccagcgatgtgatgtacaagaaagactatgaaaagagcaaagggaaaatgattggagccctcagcattaatgacgatccaaagatgctgcactccttgaagacagccaaaaaccagagtgatcgcgaatatcgaaaagattatgaaaagtcaaaaactatctacacggcacctcttgatatgctccaagtcactcaagctaagaaatctcaggcaattgccagcgacgttgattataagcacatcttacacagttacagctacccccctgatagcatcaatgtggaccttgccaagaaggcatatgcgctgcagagcgatgttgaatacaaagctgactacaatagctggatgaaaggttgtggctgggtgccttttgggtccttagaaatggaaaaggcaaagcgagcttcagacatcctcaatgagaaaaaatatcgccaacatccagacaccctcaagtttacctcgattgaagatgctccaattacagtacagtctaaaattaaccaggcccagaggagtgatatcgcttacaaagccaaaggagaggaaattattcacaaatacaacctgccaccagacctgccccagttcatccaggctaaagttaatgcctacaatatcagtgagaatatgtacaaagcagacttgaaagacttgagcaagaagggatatgacctgagaactgatgcgattcccatcagagctgccaaagctgccaggcaggcggcgagtgacgttcagtacaaaaaagactatgaaaaggctaaagggaaaatggttggcttccaaagtcttcaagatgaccctaaactggttcattatatgaacgtggccaagatacaatcagatcgggagtataaaaaagactatgagaagacaaagtccaaatacaacacgccccatgatatgttcaatgtcgtggcggctaagaaagcccaggatgtggtcagcaatgtcaactataagcattctctccatcattacacctacttgcctgacgccatggacctggagctgtctaagaacatgatgcagatacagagtgataacgtctacaaggaagactacaacaactggatgaaaggcattggctggattcctattggcagtctcgacgtcgaaaaagttaaaaaggccggtgatgctctgaatgaaaagaagtacaggcaacatccagacaccctcaaatttaccagcattgtggactccccagttatggtccaggcaaaacagaacacgaagcaagtcagtgatatcttatacaaggctaaaggagaagatgtgaaacataaatacaccatgagtcctgatcttcctcagtttctccaggccaagtgcaatgcttacaatataagtgacgtctgttataaacgggattggtatgacttaatagccaagggcaacaatgtgctgggcgatgctattcccatcactgcagccaaggcatcgagaaacattgccagtgattataaatacaaggaagcttatgagaagtcaaagggaaagcatgtgggtttcagaagcctccaggatgatcccaagctggtccactatatgaatgtggcaaagctgcagtctgatcgtgaatacaagaagaactatgagaacaccaaaaccagctaccatacccctggggacatggttagcatcacagctgcaaagatggcccaggatgtcgctaccaatgtcaactacaaacagccattgcatcattacacatacctacctgacgccatgagtcttgagcatacgaggaatgtcaatcaaattcagagtgataatgtgtataaagacgagtataacagcttcttgaagggcatcggatggatccctattggttccctggaggtggagaaggtcaagaaagcaggcgatgcattaaatgagaggaagtatcgacagcacccagataccgtcaagttcacaagtgtgcctgattccatgggcatggtgttggctcagcataacacaaagcagctaagtgatttgaactacaaggtagagggagagaaactgaagcacaagtatactattgaccctgaattgcctcagtttattcaagccaaagtcaacgccctcaacatgagtgatgctcattataaagcagattggaagaaaaccattgccaagggctatgatttgagaccagatgccatcccaattgttgctgcaaaaagttcaaggaatattgctagtgattgcaaatataaggaggcctacgagaaagccaaaggcaagcaagttggatttctcagtcttcaggatgatcctaaactggttcactacatgaatgtggccaaaatccagtctgatcgtgagtacaaaaagggctatgaagccagcaagaccaagtaccacacacctctggatatggtcagtgtgacagctgcaaagaaatctcaggaggttgccaccaacgccaactacagacagtcataccaccactacactctcctgcccgatgccttgaatgtggagcactccaggaatgccatgcagattcagagtgataatctgtacaaatctgacttcaccaattggatgaaagggatcggctgggtgcccatagagtccctggaggtggagaaggcaaagaaagcaggagagattcttagtgagaagaagtatcgccagcaccccgagaagctgaagttcacttacgccatggacacaatggaacaggcacttaacaagagtaacaaactgaacatggacaagaggctctacactgaaaaatggaacaaggacaagaccaccattcatgtcatgcctgacacaccggatattttactctccagagtaaaccaaatcaccatgagtgataaactgtacaaagctggctgggaagaggaaaagaagaaaggatatgacctgaggcctgatgccattgcaataaaggctgcaagagcctctagagacattgccagtgattacaaatacaagaaagcctatgaacaagccaaagggaaacacattggcttccggagcctggaagatgaccccaagctggtgcacttcatgcaagtggccaagatgcagtcagaccgggaatacaagaagggatatgagaaatccaagacctccttccacaccccggtggacatgctcagtgtggtggcagccaagaagtctcaggaagtggccaccaatgccaactacaggaacgtgatccatacctacaacatgcttcctgatgccatgagctttgaattggccaaaaatatgatgcagattcaaagtgataatcagtacaaggctgactatgctgacttcatgaagggcattggatggctccctctgggctccctggaagcagagaaaaacaagaaagccatggagattattagtgaaaagaagtaccgccagcacccagacactttgaagtattccacactcatggactcgatgaacatggttttggcccagaataatgcaaaaattatgaacgaacatctctacaaacaagcatgggaggctgacaaaaccaaagtccacatcatgcctgatatcccccagattattttggcaaaggcaaatgcaattaatatgagtgataaactctacaaactttccttggaagagtctaaaaagaaaggctatgatctcagacctgatgcaattcctatcaaagctgccaaggcttccagagatattgcaagtgattataaatacaagtacaattatgaaaaagggaaggggaaaatggttggtttccgcagtctcgaggatgatcccaaattagtccattccatgcaagtggctaagatgcaatctgatcgggagtacaagaaaaactatgagaacacaaagaccagctaccacacccctgccgacatgctcagtgtcacggctgcaaaggatgcccaagccaacatcaccaacactaactacaagcacctgattcacaagtacatcctccttccagatgcaatgaacattgagctgaccaggaatatgaatcgcatacagagtgataatgaatataagcaagattacaatgaatggtacaaagggcttggctggagtccagcaggttctctggaagtggagaaggccaagaaagcaactgaatatgccagtgatcagaaataccgccagcacccgagcaacttccagtttaagaagctgactgattccatggacatggtgcttgccaagcagaatgcacataccatgaacaagcatttatacaccattgattggaataaagataagaccaagattcatgtgatgcctgatacaccagatattttacaagccaagcagaatcaaacactgtatagtcagaaactctataaacttggatgggaagaagctttgaagaaaggctatgatctcccagttgatgcaatttctgtacagctagctaaagcttcaagagacattgctagtgattataaatacaaacaaggctaccgaaagcaacttggccaccatgttggattccggagtctgcaagatgacccaaaacttgtgttgtccatgaatgtagccaaaatgcagagtgaaagagaatacaagaaggactttgagaagtggaaaactaagttctccagcccagtggacatgttgggagtggtactggccaagaagtgtcaggagttggttagtgacgtggactacaagaactacctgcatcagtggacatgtctgcctgatcagaacgatgttgtgcaagctaagaaagtttatgaactgcaaagtgagaatctatataaatctgaccttgagtggctgagaggcataggatggagtcccttgggttctttagaggcagaaaagaacaagcgggcttcggaaatcatcagtgagaagaaatatcgtcagcctccagacagaaacaagttcaccagcattcctgatgccatggatatagttctggcaaagacaaatgccaaaaataggagtgatagactttatagagaagcttgggacaaagacaagactcagatccacatcatgcctgatacacctgacattgttctggctaaagcaaacttaatcaacacaagtgataaactctaccgaatgggttatgaggagctgaagagaaaaggttacgatcttcctgttgatgccataccaatcaaagcagcaaaagcctcccgggaaattgccagtgaatacaagtacaaggaaggctttcgcaagcagctcggccaccacattggtgcccggaacattgaagatgaccccaagatgatgtggtccatgcatgtggccaagatccagagtgacagggagtacaagaaggactttgagaagtggaagaccaagttcagcagcccagtggacatgctgggggtggtgttggccaagaagtgccagaccttagtcagcgacgtggactacaagaactacctgcaccagtggacatgcctgcccgaccagagcgatgtcatccatgctcggcaggcctatgacctccagagcgataatttgtacaagtcagaccttcagtggctaaaaggcattggctggatgactagtggttctctcgaggatgagaaaaataaacgagccacccagattttgagtgaccatgtttaccgtcagcacccagatcaatttaagttttccagccttatggattccataccaatggttttggcaaaaaacaatgctattaccatgaatcatcgcctctatacagaagcttgggataaagataaaaccactgtccacattatgccagatacccctgaagttttattagctaaacaaaacaaagtaaattacagtgagaaattgtataagcttggcctagaagaagccaagaggaaaggttatgacatgcgggtagatgccattcctatcaaggcagccaaggcctccagagatattgcaagtgaattcaagtacaaagaaggctatcgtaagcagctcggccaccacattggtgcccgagctatacgtgatgaccccaagatgatgtggtccatgcacgtggccaagatccagagtgacagggagtacaagaaggactttgagaagtggaagaccaagttcagcagcccagtggacatgctgggggtggtgctggccaagaagtgccagaccttagtcagcgatgtggactacaagaactacctgcaccagtggacatgcctgcccgaccagagcgacgtcatccatgctcggcaggcctatgacctccagagcgataatatgtacaagtctgatctccagtggatgagaggcattggctgggtgtccattggctctttggatgtggaaaaatgcaaaagggcaactgaaattttgagtgataaaatctatcgccagcctccagacagattcaaatttaccagtgtgactgactctctggaacaagtgttggccaaaaataatgccatcactatgaacaagcgtttatacacagaagcctgggacaaagacaagactcagatccacataatgccagacacaccagaaattatgttggcaagaatgaacaaaatcaactacagtgagagtctgtacaaacttgctaatgaagaagcaaagaagaaaggctatgacttgcgaagcgacgccatccccatcgtggcggccaaggcctccagggacatcatcagtgactacaaatataaagatggttactgcaagcaacttggccaccatattggagcccggaacattgaagatgaccccaagatgatgtggtccatgcacgtagccaagatccagagtgacagggagtacaaaaaggactttgagaagtggaagaccaagttcagcagcccagtggacatgctgggggtggtgctggccaagaagtgccagaccttagtcagtgacgtggactataagaactacctgcacgagtggacatgcctgcctgaccagagcgatgtcatccatgctcggcaggcctatgacctccagagtgacaatatttacaagtcagatctccagtggctgagaggcattggctgggtccccattgggtctatggatgtggtcaagtgcaagagagctaccgaaatactgagtgataacatctaccgccagcctccggacaagctgaaatttaccagtgtgactgattctctagagcaggtgctggccaagaacaatgctctcaacatgaataagcgtttatacacagaggcctgggacaaagacaagactcaaattcacataatgcctgatacaccagagattatgttggcaaggcagaacaaaatcaactacagtgagactctatacaaacttgccaatgaagaagcaaaaaagaaaggctacgacttgcgaagtgacgccatccccatcgtggctgccaaggcctccagggacgttatcagtgattacaaatacaaagatggttaccgcaagcagctcggccaccacattggagcccggaacattgaagatgaccccaagatgatgtggtccatgcatgtggccaagatccagagtgacagggagtataagaaggactttgagaagtggaagaccaagttcagcagcccagtggacatgctgggagtggtgttagccaagaagtgccagaccttagtcagcgatgtggactacaagaactacctgcacgagtggacgtgcctgcccgaccagaatgatgtcatccatgctcggcaggcctatgacctccagagcgataacatttacaaatctgatctccagtggctgagaggcattggctgggtccccattgggtctatggatgtggtcaagtgcaagagagctgctgaaatactgagtgataacatctaccgccagcctccggacaagctgaaatttaccagtgtgactgactctctagagcaggtgctggccaagaacaatgctctcaatatgaacaagcgcttatacacagaagcctgggacaaagacaagacccaagtccatattatgcctgatacacctgaaatcatgttggcaagacaaaataaaataaattatagtgagagcctctatcgtcaggccatggaagaagccaagaaagaaggctatgacttgagaagtgatgccattcccattgtggctgccaaggcctctcgggatattgccagtgattacaaatacaaagaagcatatcgtaaacagttgggtcaccacattggcgcccgagcagtacacgatgaccccaagataatgtggtccctccacattgccaaagtgcagagtgaccgtgagtacaagaaagattttgagaaatacaagacaaggtacagcagcccagtggacatgcttggtatcgttttggccaagaagtgtcagaccttggtcagcgatgtggactataaacatcctctgcatgaatggatctgcctgcccgaccagaatgacatcattcatgcacggaaagcctatgacctccagagtgacaatttgtataagtcagaccttgaatggatgaaaggcattggctgggttccgattgattccttggaagttgttagggccaagagagctggagaattacttagtgatactatctaccgtcagcgtccagaaacgctgaaatttaccagtataacggacactccggagcaggtgctggcaaaaaacaatgctttaaacatgaataagcgcttatatactgaagcctgggacaatgacaagaaaactattcatgtcatgcctgatacaccagaaatcatgttagccaaactcaaccgaataaactacagtgataaactctataaacttgctttggaagagtccaagaaggaaggctatgacttgcgtctggatgccattccaatccaagcagccaaggcttcaagagatattgctagtgattacaagtacaaggaaggctaccgcaaacagcttggccaccatattggggcccggaacattaaggatgacccgaagatgatgtggtccatccatgtggccaagatccagagtgacagggagtacaagaaggagtttgagaagtggaagaccaagttcagcagcccagtggacatgctgggggtggtgctggccaagaagtgtcagatccttgtaagcgacatagactacaagcatcccctgcatgaatggacctgcctgcctgatcagaatgacgtcattcaggctcggaaggcctatgacctgcagagtgatgctatttacaaatctgatcttgagtggctgagaggcataggatgggttcccattggctctgtagaggtcgagaaagtgaagagagctggagaaatcctgagtgacaggaagtatcgccagcctgcagaccagctcaaattcacatgcattaccgacactccggaaattgtcctagcaaagaataatgccctgacaatgagcaagcatttatacacagaagcttgggatgctgacaaaacctccatccacgtgatgccagacaccccagatatcctgctggccaagagtaattctgccaatatcagccaaaaactttacaccaagggatgggatgaatcaaagatgaaggactatgatctgagagcagatgctatttccatcaaaagtgccaaggcctccagggacatcgccagtgactacaaatacaaggaagcctatgagaaacagaaaggccaccacattggagcccagagcattgaagatgatcccaagattatgtgtgccatacatgcaggaaaaattcaaagtgaaagggagtacaagaaggaattccaaaagtggaaaaccaagttctctagcccagtggacatgttaagcatcttgctggccaagaaatgtcagactttggtcactgacattgattatcgcaattacctgcatgaatggacatgcatgccggatcaaaacgacattatccaagcaaaaaaggcctatgacctgcagagtgatagtgtgtataaggcagacctggagtggctgcgtggcatcggctggatgccagaaggctcagtggaaatgaacagagtgaaggttgctcaagacctcgtgaatgaaagactctataggacacgtccagaagctttgtcattcaccagcattgtcgacactccagaagttgtcttggcaaaagccaattctctgcaaataagtgagaaactgtatcaggaagcctggaataaagataaaagcaacatcaccattccttctgatactccggagatgctgcaggcccacatcaatgccttgcaaatcagcaataaactctaccaaaaagactggaatgacgccaagcagaaaggctatgacataagggcagatgccattgaaatcaagcacgccaaggcctccagagaaattgccagtgagtacaaatacaaagaaggttaccgtaagcaactgggccaccacatgggtttccgcaccctacaagatgaccccaagtcagtatgggctatacatgctgccaagatccagagtgacagagaatataagaaagcttatgagaagtctaaaggaattcacaacacaccgttggacatgatgtcaattgttcaagccaagaaatgccaggtcctggttagcgacattgattatcgcaattatctgcaccagtggacgtgtctgccagatcagaacgatgtgatccaggccaagaaagcctacgacctgcagagcgataacttgtacaagtcagacctggaatggctgaagggtattggatggctgccagagggttctgtggaagtgatgagagtgaagaatgcccagaatctcttgaatgaaaggctgtatcgtataaagcctgaggccctcaaattcaccagcattgttgacaccccggaagtaatccaggcaaagatcaatgctgtacagatcagtgagccattgtatcgcgatgcctgggagaaagagaaggctaatgtgaacgtgccagctgacactcccctgatgctgcaatccaaaatcaatgccctgcagatcagcaataaacgctatcagcaagcttgggaagatgtcaagatgactggttatgacctgcgagcagatgccattgggatccagcatgccaaggcttccagggatattgccagtgactatctgtacaaaactgcttatgagaaacagaaaggccattacattggctgtcgcagcgccaaggaagaccctaaactggtttgggcagcaaatgtgttgaagatgcagaatgacaggctgtacaaaaaggcctacaacgaccacaaagccaagatctccatccctgtggacatggtgtccatcagcgctgccaaagaaggtcaggcactggcaagtgatgtggactatcgccattacctgcaccactggtcttgctttcccgaccagaatgatgtgatccaagccaggaaagcctacgacctacagagcgacagtgtgtataaggcagacctggagtggctgcgtggcatcggctggatgccagaaggctcagtggaaatgaacagagtgaaggttgctcaagacctcgtgaatgaaagactctataggacacgtccagaagctttgtcattcaccagcattgtcgacactccagaagttgtcttggcaaaagccaattctctgcaaataagtgagaaactgtatcaggaagcctggaataaagataaaagcaacatcaccattccttctgatactccggagatgctgcaggcccacatcaatgccttgcaaatcagcaataaactctaccaaaaagactggaatgacaccaagcagaaaggctatgacataagggcagatgccattgaaatcaagcacgccaaggcctccagagaaattgccagtgagtacaaatacaaagaaggttaccgtaagcaactgggccaccacatgggtttccgcaccctacaagatgaccccaagtcagtatgggctatacatgctgccaagatccagagtgacagagaatataagaaagcttatgagaagtctaaaggaattcacaacacaccgttggacatgatgtcaattgttcaagccaagaaatgccaggtcctggttagcgacattgattatcgcaattatctgcaccagtggacgtgtctgccagatcagaacgatgtgatccaggccaagaaagcctacgacctgcagagcgataacttgtacaagtcagacctggaatggctgaagggtattggatggttgccagagggttctgtggaagtgatgagagtgaagaatgcccagaatctcttgaatgaaaggctgtatcgtataaagcctgaggccctcaaattcaccagcattgttgacaccccggaagtaatccaggcaaagatcaatgctgtacagatcagtgagccattgtatcgcaatgcctgggagaaagagaaggctaatgtgaacgtgccagctgacactcccctgatgctgcaatccaaaatcaatgctctgcagatcagcaataaacgctatcagcaagcttgggaagatgtcaagatgactggttatgacctgcgagcagatgccattgggatccagcatgccaaggcttccagggatattgccagtgattatctgtacaaaactgcttatgagaaacagaaaggccattacattggctgtcgcagcgccaaggaagaccctaaactggtttgggcagcaaatgtgttgaagatgcagaatgacaggctgtacaaaaaggcctacaacgaccacaaagccaagatctccatccctgtggacatggtgtccatcagcgctgccaaagaaggtcaggcactggcaagtgatgtggactatcgccattacctgcaccactggtcttgctttcccgaccagaatgatgtgatccaagccaggaaagcctacgacctacagagcgacagtgtgtataaggcagacctggagtggctgcgtggcatcggctggatgccagaaggctcagtggaaatgaacagagtgaaggttgctcaagacctcgtgaatgaaagactctataggacacgtccagaagctttgtcattcaccagcattgtcgacactccagaagttgtcttggcaaaagccaattctctgcaaataagtgagaaactgtatcaggaagcctggaataaagataaaagcaacatcaccattccttctgatactccggagatgctgcaggcccacatcaatgccttgcaaatcagcaataaactctaccaaaaagactggaatgacaccaagcagaaaggctatgacataagggcagatgccattgaaatcaagcacgccaaggcctccagagaaattgccagtgagtacaaatacaaagaaggttaccgtaagcaactgggccaccacatgggtttccgcaccctacaagatgaccccaagtcagtatgggctatacatgctgccaagatccagagtgacagagaatataagaaagcttatgagaagtctaaaggaattcacaacacaccgttggacatgatgtcaattgttcaagccaagaaatgccaggtcctggttagcgacattgattatcgcaattatctgcaccagtggacgtgtctgccagatcagaacgatgtgatccaggccaagaaagcctacgacctgcagagcgataacttgtacaagtcagacctggaatggctgaagggtattggatggttgccagagggttctgtggaagtgatgagagtgaagaatgcccagaatctcttgaatgaaaggctgtatcgtataaagcctgaggccctcaaattcaccagcattgttgacaccccggaagtaatccaggcaaagatcaatgctgtacagatcagtgagccattgtatcgcgatgcctgggagaaagagaaggctaatgtgaacgtgccagctgacactcccctgatgctgcaatccaaaatcaatgccctgcagatcagcaataaacgctatcagcaagcttgggaagatgtcaagatgactggttatgacctgcgagcagatgccattgggatccagcatgccaaggcttccagggatattgccagtgactatctgtacaaaactgcttatgagaaacagaaaggccattacattggctgtcgcagcgccaaggaagaccctaaactggtttgggcagcaaatgtgttgaagatgcagaatgacaggctgtacaaaaaggcctacaacgaccacaaagccaagatctccatccctgtggacatggtgtccatcagcgctgccaaagaaggtcaggcactggcaagtgatgtggactatcgccattacctgcaccgctggtcttgctttcccgaccagaatgatgtgatccaagccaggaaagcctacgacctacagagcgacgccctctacaaggctgacttggagtggttgcgtggcattggctggatgccccaagggtctcctgaagtgttgagagtcaaaaacgcccagaatatcttttgtgacagtgtctatcggacgcctgtggtgaaccttaagtacacaagcattgttgacacacctgaagtggtccttgctaaatcaaatgctgaaaatattagtattccaaagtacagagaggtttgggacaaggataaaacttcaatacacataatgccagatactccagaaattaatctcgctagagcaaatgctcttaatgtgagcaataaactttaccgtgagggctgggatgaaatgaaggcgggctgtgatgtccggctggatgccatccccatccaggctgccaaggcctccagggagattgccagtgactataaatataagcttgaccatgagaagcagaagggacactacgtgggcaccctcacagccagggatgacaacaagatccgctgggccctcatagctgacaagctccagaatgaacgagagtaccggctggactgggccaaatggaaggccaagatccagagccctgtggacatgctttccatcctgcactctaaaaattcccaggctctggtcagtgacatggattaccgcaattacctgcaccagtggacctgcatgcccgaccagaacgatgtgattcaggccaagaaggcctacgaactgcagagcgataatgtttacaaggctgacttggaatggttgcgtggaattgggtggatgccaaatgactccgtgtccgtcaatcatgccaaacatgccgcggacatcttcagtgagaaaaaatatcgcacaaaaatagaaactctcaactttacgcctgtggatgacagagttgattatgtgacagcgaaacaaagtggcgagatcctcgatgatattaaataccggaaagactggaatgccaccaaatcaaagtacaccctcacagaaacccccctgctgcacactgcccaggaggctgctaggatactggaccagtatctctacaaggaaggctgggagagacaaaaagccacaggttacattttgcctccagatgctgtgccatttgttcatgcccatcactgcaatgacgttcagagtgagctgaaatacaaagctgaacatgtgaagcaaaaaggtcattatgttggtgtcccgacgatgagagatgatcctaagctggtttggtttgagcatgcaggccagattcagaatgagagactatacaaagaggactatcacaaaacaaaggccaaaatcaatatacctgctgatatggtgtcagtcttggccgccaagcaggggcagacccttgtcagtgatattgattatcgtaattacttgcaccaatggatgtgtcatcctgaccagaacgatgttattcaggcaagaaaggcctatgacctacagagtgataatgtctacagagctgacctggagtggctccgaggcattggctggatcccactggattctgtggaccatgtaagggttactaagaaccaggaaatgatgagtcagatcaaatataagaaaaatgcccttgaaaactatcctaactttagaagtgtggtggatcctccagagattgttttagccaagattaattctgtcaatcaaagtgatgtaaaatataaagaaacatttaataaagcaaagggcaaatatacgttttcaccagatacaccacatatctcccactccaaagacatgggaaaactctacagtactatactgtataaaggggcgtgggagggcaccaaggcctatggctacaccctggatgagcgctacattcccattgttggagccaagcatgctgatctggtgaacagtgagcttaaatacaaagagacatatgagaagcagaaaggtcactacctggctggaaaagtgatcggtgaattccctggtgtggttcactgtctggatttccaaaagatgaggagtgcgttgaactacagaaaacattatgaggataccaaagcaaatgttcatatccccaatgacatgatgaatcacgtgctggctaaaaggtgccagtacatcctcagtgacctggagtatcgacactatttccaccagtggacgtctcttctggaagaacccaatgttatacgcgtccgaaacgcccaggagatcttgagtgataatgtgtataaagatgacctgaattggttgaaaggcattggttgctacgtttgggatacaccccaaatcctccatgccaagaaatcatacgaccttcagagtcagctacaatatacagcagcaggtaaagaaaatctacaaaactataatctggtcacagacacgcccctctatgtgactgctgttcagagtggcattaatgccagtgaggtaaaatataaagaaaattatcatcagattaaggacaaatacacaacagttctagaaacagtggattatgacagaaccagaaacctgaagaatctttacagcagtaacctgtacaaggaggcctgggatagagtgaaagccaccagctacatcctgccttccagcaccttgtccctgacacacgccaagaaccagaagcatctggccagccatatcaaatatcgggaagaatatgaaaagttcaaagctctttatacgttaccaagaagtgttgacgatgatccgaacacagcacggtgcctccgagttggcaagcttaacatcgatcgcctgtacagatcagtttatgaaaagaacaagatgaaaatccacatcgtgcccgacatggtagagatggttactgccaaggattcccagaagaaagtcagtgagattgattaccgcctgcgcctccacgaatggatttgccaccccgacttgcaagtcaatgatcacgtcaggaaagtcacagatcagatcagcgatattgtatacaaggatgacctcaactggctgaaaggcattggttgctacgtctgggacactcctgaaatcctccatgccaagcatgcttatgatctacgtgatgatatcaagtataaagctcacatgttgaaaacaaggaatgactacaagcttgtcacagatacaccagtctacgtgcaggctgtcaaaagtgggaaacagctaagtgacgctgtctaccactatgactatgtgcacagtgtcagaggcaaagtggctccaactaccaaaaccgtggatctggaccgggcccttcatgcatacaagctccagagttcgaatctatacaaaaccagcctgcgcaccctgcccactggatatagacttccaggtgacactcctcacttcaaacacatcaaggacacccgttacatgagcagttatttcaagtacaaagaagcctatgaacacaccaaggcatatgggtatacacttggccccaaagatgttccatttgtccacgtccggagagtcaacaatgttaccagcgagagactgtatcgggaattgtaccacaaactgaaagacaagatccatacaactcccgatacccctgagatccgccaagtcaagaagacacaagaggctgtcagtgagttgatctacaaatcagacttcttcaagatgcagggccacatgatctctctgccatacacaccccaagtgatccattgccgctatgtgggagacatcaccagtgatattaaatacaaagaggacttgcaggtcctgaagggatttggctgcttcctgtatgacactcctgacatggtccgctcccggcacctgcggaagctctggtctaattacctatacactgataaggcaaggaagatgcgagacaaatacaaagtggtgcttgacactccagaatacagaaaagtgcaagaactgaagacacatctgagtgagctggtctacagagctgcaggcaagaagcagaagtcaatctttacttcagttcctgatactcctgatcttttaagagccaagcgagggcagaagcttcagagtcagtatctgtatgttgaacttgccaccaaagagagaccccatcatcacgctggaaaccagaccacagccttgaagcatgctaaagacgtgaaggacatggtcagtgagaaaaagtacaagattcaatatgaaaagatgaaagacaagtacactccggttccagatacgccaatcctcatcagagccaagagggcttactggaatgccagtgatctacgctacaaagaaacatttcaaaagaccaaagggaaataccacacggtgaaagatgccctagacattgtctatcatcgcaaagtcacagatgacatcagtaaaataaaatacaaggagaactacatgagccagttgggtatctggaggtccattcctgatcgtccagagcatttccaccaccgagcagtcactgacacagtcagtgatgtaaaatataaagaagacttgacttggcttaaaggcattggttgctatgcctatgatacccctgatttcactctggctgaaaagaacaagactctctacagcaagtataagtataaagaagtatttgaaaggacaaagtcagatttcaagtatgttgccgactctccgatcaataggcatttcaagtatgcaactcaattgatgaatgagagaaaatataaatctagtgccaagatgtttctgcaacatggatgtaatgaaattctgcgtccagatatgttgactgctctctacaattcgcatatgtggagccagatcaaatacaggaaaaactatgaaaaatcaaaggacaaatttacctcaattgtggatactccagaacacctgcgtactacaaaagtcaacaaacaaatcagcgatatcctttataaattggaatacaacaaggccaaacccagaggctacaccacaatccacgacacacccatgttgctgcatgtccgcaaggttaaagatgaagtcagtgatctgaaatacaaagaagtataccaaagaaataaatccaactgcaccattgagccagatgctgttcatatcaaagcagccaaggacgcctacaaagtcaacaccaatctggactataagaaacagtacgaagccaacaaagcccactggaagtggactcctgaccgaccggacttcctccaggctgccaagtcatccctgcagcaaagcgattttgaatataagctggaccgggagttcctcaagggttgcaagctttctgtcactgatgacaaaaacacggtgctcgccctcaggaatactttaatagaaagtgatctgaaatacaaagagaaacatgtcaaggaaagaggaacctgccatgccgtacctgacacgcctcagatcctgctggcgaagactgtcagcaacctggtgtctgagaacaagtacaaggaccatgtcaagaagcacttggcacagggctcatacacaacactaccagagacccgggacactgttcacgtcaaggaagtgaccaagcatgtcagtgatacaaattacaaaaagaagtttgtcaaggagaaaggaaaatccaactactccatcatgctggagccaccagaggtgaaacatgctatggaagtggccaagaagcaaagtgatgtcgcttacagaaaagatgccaaagagaacctgcattacaccacagtggctgatcgaccagacatcaagaaggccacacaggcagccaaacaggccagtgaggtggagtacagagccaagcaccgcaaggaaggcagccatggcttaagcatgctcggtcgcccagacatagaaatggccaagaaggcagccaagctgagcagccaggttaaataccgagaaaatttcgataaagaaaagggcaagacaccaaaatacaatccaaaagacagccagctctacaaagtcatgaaagatgctaataatcttgcaagtgaggttaaatacaaggctgacctgaagaaacttcacaaacccgtgactgacatgaaggagtctctgatcatgaatcatgtcctgaatacaagccaacttgccagttcttaccagtacaagaagaagtatgagaagagtaaaggccactaccacaccatacccgataatctggagcagcttcacctaaaagaggccacagaattacagagtatagtgaaatacaaagaaaagtatgaaaaggaacgaggaaaacccatgctggactttgaaacaccaacgtacatcactgccaaagagtctcagcagatgcagagtgggaaagaatataggaaagattatgaagagtccattaaaggcagaaacctgactggcctggaggtcacgccagctttgttacatgtcaaatatgcaactaaaatagcaagcgagaaagagtacaggaaagatctagaggaaagcatccgtgggaagggcctcactgaaatggaagatacacctgacatgctaagagcaaagaatgccactcaaatcctcaatgagaaagaatataagcgagacctggaactggaagtcaaaggaagaggcctgaatgccatggccaatgaaactccggattttatgagggccaggaatgctactgatattgccagtcagattaagtataagcaatcagcagaaatggagaaagccaatttcacttctgtggttgatactccagagatcattcatgcccaacaagtcaagaatctttcaagccagaaaaagtacaaggaagatgctgagaagtccatgtcgtattatgagactgttttggacaccccagagatacagagagtccgggagaaccaaaagaacttcagccttctccaataccagtgtgaccttaaaaacagtaaaggaaaaattacagttgttcaagacacgccagaaatactgcgtgtaaaagaaaatcagaagaatttcagctcggttttatataaagaggatgtctcaccaggaacggctatcggaaagacacctgagatgatgagagtgaaacaaacacaggaccacattagctcggtgaagtataaggaagcaataggacaaggaactccaatccctgacctgcctgaagtgaaacgtgtgaaggagacgcagaagcacattagctcggttatgtacaaagaaaacttgggaacaggcattccaaccactgtgactccagagattgagagagtcaaacgcaatcaagagaactttagctcggttttgtacaaagaaaatttggggaaaggaatcccaacacctatcactccagagatggagagagtcaaacgcaatcaagagaactttagctcgatattgtacaaagagaacttgagcaaggggactcccctacctgtcactcctgagatggagcgagtcaaactcaatcaagaaaactttagctcggtgttgtataaagaaaacgttggaaaagggattccaatccccatcactccagagatggagagagtcaaacacaatcaagaaaactttagttcggtgctatacaaagaaaacctggggacaggaattccaatccccatcactcctgagatgcagagagtcaaacacaatcaagaaaaccttagctcggtgttatacaaagaaaacatgggcaagggaacccctttacctgtcactcccgagatggaaagagtcaaacacaatcaagaaaatattagctcggtgttatacaaagaaaacatgggcaagggaacccctctacctgtcactcctgagatggagagagtcaaacacaatcaagaaaatattagctcggtgttatacaaagaaaacatgggcaagggaactcctttagctgtcactcccgagatggagcgagtcaaacacaatcaagaaaatattagctcggttttgtacaaagaaaatgtggggaaagccaccgcaacccctgtcactcctgagatgcagagagtcaaacgcaatcaagaaaacattagctcggtgttatacaaagagaacctggggaaagcaacccccacaccctttactcctgagatggaaagagtgaaacgcaatcaagaaaactttagctcggtattgtacaaagagaacatgagaaaagcaactccgacacctgttactccagagatggagagagctaagcgcaaccaagaaaacattagctcggttctttattctgatagtttccggaaacaaatacaaggcaaagctgcctatgtattggatacccccgagatgagacgggtgagggagacccaacggcacatctcaacggtgaaatatcatgaagactttgagaaacacaagggttgcttcacaccagtggtgacagatcctatcactgaacgagtaaagaagaacatgcaggacttcagtgacattaactaccgaggtattcagaggaaagtggtagaaatggaacaaaaacggaatgaccaagatcaggagactattacaggtttacgtgtctggcgtactaatcctggttcggtttttgactatgatccagcagaagacaacatccagtcccgaagcttacacatgattaatgtccaagctcagcgccggagccgggagcagtcacgatctgccagtgcactaagcatcagtgggggtgaggagaagtctgagcattcagaagcaccagaccaccacctttcgacttacagcgacgggggtgtctttgcagtctcaacagcttacaaacatgcaaaaaccacagagctcccacaacaacgatcatcttcagttgctacccaacagacaacggtatcttccatcccatctcatccatctactgctggaaaaatcttccgtgccatgtatgactatatggctgctgatgcagatgaggtgtccttcaaggatggagatgccatcataaatgttcaagcaattgatgaaggctggatgtatggcactgtgcagaggactggcaggaccggaatgctcccagccaactacgttgaagctatttag

SEQ ID NO: 158139 - DNA, 25578 bp, Homo sapiens
  Payload ID: 10961
  Gene Symbol: NEB
  Gene Name: nebulin
  Uniprot ID: P20929
  ENST ID: ENST00000604864
  CDS Start-End: 1-25578
atggcagatgacgaagactatgaggaggtggtggagtactacacagaagaagtggtttacgaagaggtgccgggagagacaataacaaaaatttatgagactacgacaacaaggacatctgactatgagcaatcagaaacttccaaaccagctctggcacagccagcactggcacagccagcatcagcaaagccggtggagaggaggaaggtcatccggaagaaagtggatccttcaaagttcatgaccccctacattgcacacagtcagaaaatgcaggatctttttagcccaaataaatacaaggagaagtttgagaaaacaaaaggacagccatacgccagcacaacagatactccagaacttcgcagaatcaaaaaagtacaagatcaactcagtgaggttaagtatcgaatggatggtgatgttgctaagactatatgtcacgtagatgaaaaagcaaaggatattgaacatgcaaagaaagtgtcgcagcaagtcagtaaggttttatacaagcagaactgggaagacaccaaggataagtacctgcttcctcctgatgcccctgaacttgtccaggccgttaagaacaccgccatgttcagcaagaaactgtacactgaagactgggaagcagacaaaagtttgttttacccctataatgatagcccggaactgaggagagttgcccaggcccagaaagctctcagtgatgttgcctacaaaaaaggtctcgctgaacagcaagctcaattcacgcctctggctgatcctccagatatagaatttgccaagaaagtaaccaatcaagtgagcaagcaaaaatacaaagaagactatgaaaataaaatcaaaggcaaatggagtgagacaccttgctttgaagttgcaaatgccagaatgaatgctgataacattagcacaaggaaataccaggaagattttgaaaacatgaaagaccagatctacttcatgcagaccgaaacaccagagtataaaatgaataaaaaagctggtgtggcagctagcaaggtaaaatacaaagaagactatgaaaagaataaaggaaaagcagattataatgtgcttcctgcttcagagaacccacagcttaggcagctgaaggcagcaggagatgccctaagtgacaaactatacaaggaaaactatgaaaagacaaaagcaaagagcataaattactgcgagacccccaaattcaagctcgatactgttctgcagaacttcagtagtgataaaaaatataaagattcctacttaaaagatattttgggacattatgtaggcagcttcgaggatccataccattcacactgcatgaaagtcacagctcaaaacagtgataaaaactacaaagcagaatacgaagaagacagaggcaaaggcttcttccctcagaccataactcaagaatatgaagcaattaagaaactagatcagtgtaaagaccacacctacaaagtccatccagataagacaaaattcacccaagttacagactctcctgttctgctacaagcccaagtcaattccaaacaactgagtgacttaaattacaaagcaaaacatgaaagtgaaaagttcaagtgccatatcccccctgatactcctgcttttatccagcacaaagtcaatgcctataacttgagtgataatctttataagcaagactgggagaagagcaaagccaaaaagtttgacattaaagtggatgccattcccctgctggcagccaaagccaacaccaagaacaccagcgatgtgatgtacaagaaagactatgaaaaaaacaaagggaaaatgattggagtcctcagcattaatgacgatcccaagatgctgcactccttgaaggtggccaaaaaccagagtgatagattatacaaggaaaactatgagaagacaaaggcaaagagtatgaattactgtgagaccccaaaatatcaacttgatactcagctgaagaacttcagtgaggctagatataaagacttatatgtaaaggatgttttgggacattatgtaggcagcatggaggacccatatcacacacactgcatgaaagttgcagctcaaaacagtgataaaagttacaaagcagaatatgaagaagataaaggaaaatgctatttccctcagacaataacacaagaatatgaagcaatcaagaagctggaccagtgtaaagatcatacctacaaagttcatccagataagaccaaattcacggcagtcactgattctcctgtactgttgcaagcccagctcaacacgaaacagcttagtgatctgaattacaaagcaaaacatgaaggtgagaagttcaagtgccatataccagcagatgctccacagtttatccaacacagagtcaatgcctataatctgagtgataatgtttataagcaagactgggagaagagcaaagccaagaagtttgacattaaagtggacgccattcccctgttggcagccaaagccaacaccaagaacaccagcgatgtgatgtacaagaaagactatgaaaagagcaaagggaaaatgattggagccctcagcattaatgacgatccaaagatgctgcactccttgaagacagccaaaaaccagagtgatcgcgaatatcgaaaagattatgaaaagtcaaaaactatctacacggcacctcttgatatgctccaagtcactcaagctaagaaatctcaggcaattgccagcgacgttgattataagcacatcttacacagttacagctacccccctgatagcatcaatgtggaccttgccaagaaggcatatgcgctgcagagcgatgttgaatacaaagctgactacaatagctggatgaaaggttgtggctgggtgccttttgggtccttagaaatggaaaaggcaaagcgagcttcagacatcctcaatgagaaaaaatatcgccaacatccagacaccctcaagtttacctcgattgaagatgctccaattacagtacagtctaaaattaaccaggcccagaggagtgatatcgcttacaaagccaaaggagaggaaattattcacaaatacaacctgccaccagacctgccccagttcatccaggctaaagttaatgcctacaatatcagtgagaatatgtacaaagcagacttgaaagacttgagcaagaagggatatgacctgagaactgatgcgattcccatcagagctgccaaagctgccaggcaggcggcgagtgacgttcagtacaaaaaagactatgaaaaggctaaagggaaaatggttggcttccaaagtcttcaagatgaccctaaactggttcattatatgaacgtggccaagatacaatcagatcgggagtataaaaaagactatgagaagacaaagtccaaatacaacacgccccatgatatgttcaatgtcgtggcggctaagaaagcccaggatgtggtcagcaatgtcaactataagcattctctccatcattacacctacttgcctgacgccatggacctggagctgtctaagaacatgatgcagatacagagtgataacgtctacaaggaagactacaacaactggatgaaaggcattggctggattcctattggcagtctcgacgtcgaaaaagttaaaaaggccggtgatgctctgaatgaaaagaagtacaggcaacatccagacaccctcaaatttaccagcattgtggactccccagttatggtccaggcaaaacagaacacgaagcaagtcagtgatatcttatacaaggctaaaggagaagatgtgaaacataaatacaccatgagtcctgatcttcctcagtttctccaggccaagtgcaatgcttacaatataagtgacgtctgttataaacgggattggtatgacttaatagccaagggcaacaatgtgctgggcgatgctattcccatcactgcagccaaggcatcgagaaacattgccagtgattataaatacaaggaagcttatgagaagtcaaagggaaagcatgtgggtttcagaagcctccaggatgatcccaagctggtccactatatgaatgtggcaaagctgcagtctgatcgtgaatacaagaagaactatgagaacaccaaaaccagctaccatacccctggggacatggttagcatcacagctgcaaagatggcccaggatgtcgctaccaatgtcaactacaaacagccattgcatcattacacatacctacctgacgccatgagtcttgagcatacgaggaatgtcaatcaaattcagagtgataatgtgtataaagacgagtataacagcttcttgaagggcatcggatggatccctattggttccctggaggtggagaaggtcaagaaagcaggcgatgcattaaatgagaggaagtatcgacagcacccagataccgtcaagttcacaagtgtgcctgattccatgggcatggtgttggctcagcataacacaaagcagctaagtgatttgaactacaaggtagagggagagaaactgaagcacaagtatactattgaccctgaattgcctcagtttattcaagccaaagtcaacgccctcaacatgagtgatgctcattataaagcagattggaagaaaaccattgccaagggctatgatttgagaccagatgccatcccaattgttgctgcaaaaagttcaaggaatattgctagtgattgcaaatataaggaggcctacgagaaagccaaaggcaagcaagttggatttctcagtcttcaggatgatcctaaactggttcactacatgaatgtggccaaaatccagtctgatcgtgagtacaaaaagggctatgaagccagcaagaccaagtaccacacacctctggatatggtcagtgtgacagctgcaaagaaatctcaggaggttgccaccaacgccaactacagacagtcataccaccactacactctcctgcccgatgccttgaatgtggagcactccaggaatgccatgcagattcagagtgataatctgtacaaatctgacttcaccaattggatgaaagggatcggctgggtgcccatagagtccctggaggtggagaaggcaaagaaagcaggagagattcttagtgagaagaagtatcgccagcaccccgagaagctgaagttcacttacgccatggacacaatggaacaggcacttaacaagagtaacaaactgaacatggacaagaggctctacactgaaaaatggaacaaggacaagaccaccattcatgtcatgcctgacacaccggatattttactctccagagtaaaccaaatcaccatgagtgataaactgtacaaagctggctgggaagaggaaaagaagaaaggatatgacctgaggcctgatgccattgcaataaaggctgcaagagcctctagagacattgccagtgattacaaatacaagaaagcctatgaacaagccaaagggaaacacattggcttccggagcctggaagatgaccccaagctggtgcacttcatgcaagtggccaagatgcagtcagaccgggaatacaagaagggatatgagaaatccaagacctccttccacaccccggtggacatgctcagtgtggtggcagccaagaagtctcaggaagtggccaccaatgccaactacaggaacgtgatccatacctacaacatgcttcctgatgccatgagctttgaattggccaaaaatatgatgcagattcaaagtgataatcagtacaaggctgactatgctgacttcatgaagggcattggatggctccctctgggctccctggaagcagagaaaaacaagaaagccatggagattattagtgaaaagaagtaccgccagcacccagacactttgaagtattccacactcatggactcgatgaacatggttttggcccagaataatgcaaaaattatgaacgaacatctctacaaacaagcatgggaggctgacaaaaccaaagtccacatcatgcctgatatcccccagattattttggcaaaggcaaatgcaattaatatgagtgataaactctacaaactttccttggaagagtctaaaaagaaaggctatgatctcagacctgatgcaattcctatcaaagctgccaaggcttccagagatattgcaagtgattataaatacaagtacaattatgaaaaagggaaggggaaaatggttggtttccgcagtctcgaggatgatcccaaattagtccattccatgcaagtggctaagatgcaatctgatcgggagtacaagaaaaactatgagaacacaaagaccagctaccacacccctgccgacatgctcagtgtcacggctgcaaaggatgcccaagccaacatcaccaacactaactacaagcacctgattcacaagtacatcctccttccagatgcaatgaacattgagctgaccaggaatatgaatcgcatacagagtgataatgaatataagcaagattacaatgaatggtacaaagggcttggctggagtccagcaggttctctggaagtggagaaggccaagaaagcaactgaatatgccagtgatcagaaataccgccagcacccgagcaacttccagtttaagaagctgactgattccatggacatggtgcttgccaagcagaatgcacataccatgaacaagcatttatacaccattgattggaataaagataagaccaagattcatgtgatgcctgatacaccagatattttacaagccaagcagaatcaaacactgtatagtcagaaactctataaacttggatgggaagaagctttgaagaaaggctatgatctcccagttgatgcaatttctgtacagctagctaaagcttcaagagacattgctagtgattataaatacaaacaaggctaccgaaagcaacttggccaccatgttggattccggagtctgcaagatgacccaaaacttgtgttgtccatgaatgtagccaaaatgcagagtgaaagagaatacaagaaggactttgagaagtggaaaactaagttctccagcccagtggacatgttgggagtggtactggccaagaagtgtcaggagttggttagtgacgtggactacaagaactacctgcatcagtggacatgtctgcctgatcagaacgatgttgtgcaagctaagaaagtttatgaactgcaaagtgagaatctatataaatctgaccttgagtggctgagaggcataggatggagtcccttgggttctttagaggcagaaaagaacaagcgggcttcggaaatcatcagtgagaagaaatatcgtcagcctccagacagaaacaagttcaccagcattcctgatgccatggatatagttctggcaaagacaaatgccaaaaataggagtgatagactttatagagaagcttgggacaaagacaagactcagatccacatcatgcctgatacacctgacattgttctggctaaagcaaacttaatcaacacaagtgataaactctaccgaatgggttatgaggagctgaagagaaaaggttacgatcttcctgttgatgccataccaatcaaagcagcaaaagcctcccgggaaattgccagtgaatacaagtacaaggaaggctttcgcaagcagctcggccaccacattggtgcccggaacattgaagatgaccccaagatgatgtggtccatgcatgtggccaagatccagagtgacagggagtacaagaaggactttgagaagtggaagaccaagttcagcagcccagtggacatgctgggggtggtgttggccaagaagtgccagaccttagtcagcgacgtggactacaagaactacctgcaccagtggacatgcctgcccgaccagagcgatgtcatccatgctcggcaggcctatgacctccagagcgataatttgtacaagtcagaccttcagtggctaaaaggcattggctggatgactagtggttctctcgaggatgagaaaaataaacgagccacccagattttgagtgaccatgtttaccgtcagcacccagatcaatttaagttttccagccttatggattccataccaatggttttggcaaaaaacaatgctattaccatgaatcatcgcctctatacagaagcttgggataaagataaaaccactgtccacattatgccagatacccctgaagttttattagctaaacaaaacaaagtaaattacagtgagaaattgtataagcttggcctagaagaagccaagaggaaaggttatgacatgcgggtagatgccattcctatcaaggcagccaaggcctccagagatattgcaagtgaattcaagtacaaagaaggctatcgtaagcagctcggccaccacattggtgcccgagctatacgtgatgaccccaagatgatgtggtccatgcacgtggccaagatccagagtgacagggagtacaagaaggactttgagaagtggaagaccaagttcagcagcccagtggacatgctgggggtggtgctggccaagaagtgccagaccttagtcagcgatgtggactacaagaactacctgcaccagtggacatgcctgcccgaccagagcgacgtcatccatgctcggcaggcctatgacctccagagcgataatatgtacaagtctgatctccagtggatgagaggcattggctgggtgtccattggctctttggatgtggaaaaatgcaaaagggcaactgaaattttgagtgataaaatctatcgccagcctccagacagattcaaatttaccagtgtgactgactctctggaacaagtgttggccaaaaataatgccatcactatgaacaagcgtttatacacagaagcctgggacaaagacaagactcagatccacataatgccagacacaccagaaattatgttggcaagaatgaacaaaatcaactacagtgagagtctgtacaaacttgctaatgaagaagcaaagaagaaaggctatgacttgcgaagcgacgccatccccatcgtggcggccaaggcctccagggacatcatcagtgactacaaatataaagatggttactgcaagcaacttggccaccatattggagcccggaacattgaagatgaccccaagatgatgtggtccatgcacgtagccaagatccagagtgacagggagtacaaaaaggactttgagaagtggaagaccaagttcagcagcccagtggacatgctgggggtggtgctggccaagaagtgccagaccttagtcagtgacgtggactataagaactacctgcacgagtggacatgcctgcctgaccagagcgatgtcatccatgctcggcaggcctatgacctccagagtgacaatatttacaagtcagatctccagtggctgagaggcattggctgggtccccattgggtctatggatgtggtcaagtgcaagagagctaccgaaatactgagtgataacatctaccgccagcctccggacaagctgaaatttaccagtgtgactgattctctagagcaggtgctggccaagaacaatgctctcaacatgaataagcgtttatacacagaggcctgggacaaagacaagactcaaattcacataatgcctgatacaccagagattatgttggcaaggcagaacaaaatcaactacagtgagactctatacaaacttgccaatgaagaagcaaaaaagaaaggctacgacttgcgaagtgacgccatccccatcgtggctgccaaggcctccagggacgttatcagtgattacaaatacaaagatggttaccgcaagcagctcggccaccacattggagcccggaacattgaagatgaccccaagatgatgtggtccatgcatgtggccaagatccagagtgacagggagtataagaaggactttgagaagtggaagaccaagttcagcagcccagtggacatgctgggagtggtgttagccaagaagtgccagaccttagtcagcgatgtggactacaagaactacctgcacgagtggacgtgcctgcccgaccagaatgatgtcatccatgctcggcaggcctatgacctccagagcgataacatttacaaatctgatctccagtggctgagaggcattggctgggtccccattgggtctatggatgtggtcaagtgcaagagagctgctgaaatactgagtgataacatctaccgccagcctccggacaagctgaaatttaccagtgtgactgactctctagagcaggtgctggccaagaacaatgctctcaatatgaacaagcgcttatacacagaagcctgggacaaagacaagacccaagtccatattatgcctgatacacctgaaatcatgttggcaagacaaaataaaataaattatagtgagagcctctatcgtcaggccatggaagaagccaagaaagaaggctatgacttgagaagtgatgccattcccattgtggctgccaaggcctctcgggatattgccagtgattacaaatacaaagaagcatatcgtaaacagttgggtcaccacattggcgcccgagcagtacacgatgaccccaagataatgtggtccctccacattgccaaagtgcagagtgaccgtgagtacaagaaagattttgagaaatacaagacaaggtacagcagcccagtggacatgcttggtatcgttttggccaagaagtgtcagaccttggtcagcgatgtggactataaacatcctctgcatgaatggatctgcctgcccgaccagaatgacatcattcatgcacggaaagcctatgacctccagagtgacaatttgtataagtcagaccttgaatggatgaaaggcattggctgggttccgattgattccttggaagttgttagggccaagagagctggagaattacttagtgatactatctaccgtcagcgtccagaaacgctgaaatttaccagtataacggacactccggagcaggtgctggcaaaaaacaatgctttaaacatgaataagcgcttatatactgaagcctgggacaatgacaagaaaactattcatgtcatgcctgatacaccagaaatcatgttagccaaactcaaccgaataaactacagtgataaactctataaacttgctttggaagagtccaagaaggaaggctatgacttgcgtctggatgccattccaatccaagcagccaaggcttcaagagatattgctagtgattacaagtacaaggaaggctaccgcaaacagcttggccaccatattggggcccggaacattaaggatgacccgaagatgatgtggtccatccatgtggccaagatccagagtgacagggagtacaagaaggagtttgagaagtggaagaccaagttcagcagcccagtggacatgctgggggtggtgctggccaagaagtgtcagatccttgtaagcgacatagactacaagcatcccctgcatgaatggacctgcctgcctgatcagaatgacgtcattcaggctcggaaggcctatgacctgcagagtgatgctatttacaaatctgatcttgagtggctgagaggcataggatgggttcccattggctctgtagaggtcgagaaagtgaagagagctggagaaatcctgagtgacaggaagtatcgccagcctgcagaccagctcaaattcacatgcattaccgacactccggaaattgtcctagcaaagaataatgccctgacaatgagcaagcatttatacacagaagcttgggatgctgacaaaacctccatccacgtgatgccagacaccccagatatcctgctggccaagagtaattctgccaatatcagccaaaaactttacaccaagggatgggatgaatcaaagatgaaggactatgatctgagagcagatgctatttccatcaaaagtgccaaggcctccagggacatcgccagtgactacaaatacaaggaagcctatgagaaacagaaaggccaccacattggagcccagagcattgaagatgatcccaagattatgtgtgccatacatgcaggaaaaattcaaagtgaaagggagtacaagaaggaattccaaaagtggaaaaccaagttctctagcccagtggacatgttaagcatcttgctggccaagaaatgtcagactttggtcactgacattgattatcgcaattacctgcatgaatggacatgcatgccggatcaaaacgacattatccaagcaaaaaaggcctatgacctgcagagtgatagtgtgtataaggcagacctggagtggctgcgtggcatcggctggatgccagaaggctcagtggaaatgaacagagtgaaggttgctcaagacctcgtgaatgaaagactctataggacacgtccagaagctttgtcattcaccagcattgtcgacactccagaagttgtcttggcaaaagccaattctctgcaaataagtgagaaactgtatcaggaagcctggaataaagataaaagcaacatcaccattccttctgatactccggagatgctgcaggcccacatcaatgccttgcaaatcagcaataaactctaccaaaaagactggaatgacgccaagcagaaaggctatgacataagggcagatgccattgaaatcaagcacgccaaggcctccagagaaattgccagtgagtacaaatacaaagaaggttaccgtaagcaactgggccaccacatgggtttccgcaccctacaagatgaccccaagtcagtatgggctatacatgctgccaagatccagagtgacagagaatataagaaagcttatgagaagtctaaaggaattcacaacacaccgttggacatgatgtcaattgttcaagccaagaaatgccaggtcctggttagcgacattgattatcgcaattatctgcaccagtggacgtgtctgccagatcagaacgatgtgatccaggccaagaaagcctacgacctgcagagcgataacttgtacaagtcagacctggaatggctgaagggtattggatggctgccagagggttctgtggaagtgatgagagtgaagaatgcccagaatctcttgaatgaaaggctgtatcgtataaagcctgaggccctcaaattcaccagcattgttgacaccccggaagtaatccaggcaaagatcaatgctgtacagatcagtgagccattgtatcgcgatgcctgggagaaagagaaggctaatgtgaacgtgccagctgacactcccctgatgctgcaatccaaaatcaatgccctgcagatcagcaataaacgctatcagcaagcttgggaagatgtcaagatgactggttatgacctgcgagcagatgccattgggatccagcatgccaaggcttccagggatattgccagtgactatctgtacaaaactgcttatgagaaacagaaaggccattacattggctgtcgcagcgccaaggaagaccctaaactggtttgggcagcaaatgtgttgaagatgcagaatgacaggctgtacaaaaaggcctacaacgaccacaaagccaagatctccatccctgtggacatggtgtccatcagcgctgccaaagaaggtcaggcactggcaagtgatgtggactatcgccattacctgcaccactggtcttgctttcccgaccagaatgatgtgatccaagccaggaaagcctacgacctacagagcgacagtgtgtataaggcagacctggagtggctgcgtggcatcggctggatgccagaaggctcagtggaaatgaacagagtgaaggttgctcaagacctcgtgaatgaaagactctataggacacgtccagaagctttgtcattcaccagcattgtcgacactccagaagttgtcttggcaaaagccaattctctgcaaataagtgagaaactgtatcaggaagcctggaataaagataaaagcaacatcaccattccttctgatactccggagatgctgcaggcccacatcaatgccttgcaaatcagcaataaactctaccaaaaagactggaatgacaccaagcagaaaggctatgacataagggcagatgccattgaaatcaagcacgccaaggcctccagagaaattgccagtgagtacaaatacaaagaaggttaccgtaagcaactgggccaccacatgggtttccgcaccctacaagatgaccccaagtcagtatgggctatacatgctgccaagatccagagtgacagagaatataagaaagcttatgagaagtctaaaggaattcacaacacaccgttggacatgatgtcaattgttcaagccaagaaatgccaggtcctggttagcgacattgattatcgcaattatctgcaccagtggacgtgtctgccagatcagaacgatgtgatccaggccaagaaagcctacgacctgcagagcgataacttgtacaagtcagacctggaatggctgaagggtattggatggttgccagagggttctgtggaagtgatgagagtgaagaatgcccagaatctcttgaatgaaaggctgtatcgtataaagcctgaggccctcaaattcaccagcattgttgacaccccggaagtaatccaggcaaagatcaatgctgtacagatcagtgagccattgtatcgcaatgcctgggagaaagagaaggctaatgtgaacgtgccagctgacactcccctgatgctgcaatccaaaatcaatgctctgcagatcagcaataaacgctatcagcaagcttgggaagatgtcaagatgactggttatgacctgcgagcagatgccattgggatccagcatgccaaggcttccagggatattgccagtgattatctgtacaaaactgcttatgagaaacagaaaggccattacattggctgtcgcagcgccaaggaagaccctaaactggtttgggcagcaaatgtgttgaagatgcagaatgacaggctgtacaaaaaggcctacaacgaccacaaagccaagatctccatccctgtggacatggtgtccatcagcgctgccaaagaaggtcaggcactggcaagtgatgtggactatcgccattacctgcaccactggtcttgctttcccgaccagaatgatgtgatccaagccaggaaagcctacgacctacagagcgacagtgtgtataaggcagacctggagtggctgcgtggcatcggctggatgccagaaggctcagtggaaatgaacagagtgaaggttgctcaagacctcgtgaatgaaagactctataggacacgtccagaagctttgtcattcaccagcattgtcgacactccagaagttgtcttggcaaaagccaattctctgcaaataagtgagaaactgtatcaggaagcctggaataaagataaaagcaacatcaccattccttctgatactccggagatgctgcaggcccacatcaatgccttgcaaatcagcaataaactctaccaaaaagactggaatgacaccaagcagaaaggctatgacataagggcagatgccattgaaatcaagcacgccaaggcctccagagaaattgccagtgagtacaaatacaaagaaggttaccgtaagcaactgggccaccacatgggtttccgcaccctacaagatgaccccaagtcagtatgggctatacatgctgccaagatccagagtgacagagaatataagaaagcttatgagaagtctaaaggaattcacaacacaccgttggacatgatgtcaattgttcaagccaagaaatgccaggtcctggttagcgacattgattatcgcaattatctgcaccagtggacgtgtctgccagatcagaacgatgtgatccaggccaagaaagcctacgacctgcagagcgataacttgtacaagtcagacctggaatggctgaagggtattggatggttgccagagggttctgtggaagtgatgagagtgaagaatgcccagaatctcttgaatgaaaggctgtatcgtataaagcctgaggccctcaaattcaccagcattgttgacaccccggaagtaatccaggcaaagatcaatgctgtacagatcagtgagccattgtatcgcgatgcctgggagaaagagaaggctaatgtgaacgtgccagctgacactcccctgatgctgcaatccaaaatcaatgccctgcagatcagcaataaacgctatcagcaagcttgggaagatgtcaagatgactggttatgacctgcgagcagatgccattgggatccagcatgccaaggcttccagggatattgccagtgactatctgtacaaaactgcttatgagaaacagaaaggccattacattggctgtcgcagcgccaaggaagaccctaaactggtttgggcagcaaatgtgttgaagatgcagaatgacaggctgtacaaaaaggcctacaacgaccacaaagccaagatctccatccctgtggacatggtgtccatcagcgctgccaaagaaggtcaggcactggcaagtgatgtggactatcgccattacctgcaccgctggtcttgctttcccgaccagaatgatgtgatccaagccaggaaagcctacgacctacagagcgacgccctctacaaggctgacttggagtggttgcgtggcattggctggatgccccaagggtctcctgaagtgttgagagtcaaaaacgcccagaatatcttttgtgacagtgtctatcggacgcctgtggtgaaccttaagtacacaagcattgttgacacacctgaagtggtccttgctaaatcaaatgctgaaaatattagtattccaaagtacagagaggtttgggacaaggataaaacttcaatacacataatgccagatactccagaaattaatctcgctagagcaaatgctcttaatgtgagcaataaactttaccgtgagggctgggatgaaatgaaggcgggctgtgatgtccggctggatgccatccccatccaggctgccaaggcctccagggagattgccagtgactataaatataagcttgaccatgagaagcagaagggacactacgtgggcaccctcacagccagggatgacaacaagatccgctgggccctcatagctgacaagctccagaatgaacgagagtaccggctggactgggccaaatggaaggccaagatccagagccctgtggacatgctttccatcctgcactctaaaaattcccaggctctggtcagtgacatggattaccgcaattacctgcaccagtggacctgcatgcccgaccagaacgatgtgattcaggccaagaaggcctacgaactgcagagcgataatgtttacaaggctgacttggaatggttgcgtggaattgggtggatgccaaatgactccgtgtccgtcaatcatgccaaacatgccgcggacatcttcagtgagaaaaaatatcgcacaaaaatagaaactctcaactttacgcctgtggatgacagagttgattatgtgacagcgaaacaaagtggcgagatcctcgatgatattaaataccggaaagactggaatgccaccaaatcaaagtacaccctcacagaaacccccctgctgcacactgcccaggaggctgctaggatactggaccagtatctctacaaggaaggctgggagagacaaaaagccacaggttacattttgcctccagatgctgtgccatttgttcatgcccatcactgcaatgacgttcagagtgagctgaaatacaaagctgaacatgtgaagcaaaaaggtcattatgttggtgtcccgacgatgagagatgatcctaagctggtttggtttgagcatgcaggccagattcagaatgagagactatacaaagaggactatcacaaaacaaaggccaaaatcaatatacctgctgatatggtgtcagtcttggccgccaagcaggggcagacccttgtcagtgatattgattatcgtaattacttgcaccaatggatgtgtcatcctgaccagaacgatgttattcaggcaagaaaggcctatgacctacagagtgataatgtctacagagctgacctggagtggctccgaggcattggctggatcccactggattctgtggaccatgtaagggttactaagaaccaggaaatgatgagtcagatcaaatataagaaaaatgcccttgaaaactatcctaactttagaagtgtggtggatcctccagagattgttttagccaagattaattctgtcaatcaaagtgatgtaaaatataaagaaacatttaataaagcaaagggcaaatatacgttttcaccagatacaccacatatctcccactccaaagacatgggaaaactctacagtactatactgtataaaggggcgtgggagggcaccaaggcctatggctacaccctggatgagcgctacattcccattgttggagccaagcatgctgatctggtgaacagtgagcttaaatacaaagagacatatgagaagcagaaaggtcactacctggctggaaaagtgatcggtgaattccctggtgtggttcactgtctggatttccaaaagatgaggagtgcgttgaactacagaaaacattatgaggataccaaagcaaatgttcatatccccaatgacatgatgaatcacgtgctggctaaaaggtgccagtacatcctcagtgacctggagtatcgacactatttccaccagtggacgtctcttctggaagaacccaatgttatacgcgtccgaaacgcccaggagatcttgagtgataatgtgtataaagatgacctgaattggttgaaaggcattggttgctacgtttgggatacaccccaaatcctccatgccaagaaatcatacgaccttcagagtcagctacaatatacagcagcaggtaaagaaaatctacaaaactataatctggtcacagacacgcccctctatgtgactgctgttcagagtggcattaatgccagtgaggtaaaatataaagaaaattatcatcagattaaggacaaatacacaacagttctagaaacagtggattatgacagaaccagaaacctgaagaatctttacagcagtaacctgtacaaggaggcctgggatagagtgaaagccaccagctacatcctgccttccagcaccttgtccctgacacacgccaagaaccagaagcatctggccagccatatcaaatatcgggaagaatatgaaaagttcaaagctctttatacgttaccaagaagtgttgacgatgatccgaacacagcacggtgcctccgagttggcaagcttaacatcgatcgcctgtacagatcagtttatgaaaagaacaagatgaaaatccacatcgtgcccgacatggtagagatggttactgccaaggattcccagaagaaagtcagtgagattgattaccgcctgcgcctccacgaatggatttgccaccccgacttgcaagtcaatgatcacgtcaggaaagtcacagatcagatcagcgatattgtatacaaggatgacctcaactggctgaaaggcattggttgctacgtctgggacactcctgaaatcctccatgccaagcatgcttatgatctacgtgatgatatcaagtataaagctcacatgttgaaaacaaggaatgactacaagcttgtcacagatacaccagtctacgtgcaggctgtcaaaagtgggaaacagctaagtgacgctgtctaccactatgactatgtgcacagtgtcagaggcaaagtggctccaactaccaaaaccgtggatctggaccgggcccttcatgcatacaagctccagagttcgaatctatacaaaaccagcctgcgcaccctgcccactggatatagacttccaggtgacactcctcacttcaaacacatcaaggacacccgttacatgagcagttatttcaagtacaaagaagcctatgaacacaccaaggcatatgggtatacacttggccccaaagatgttccatttgtccacgtccggagagtcaacaatgttaccagcgagagactgtatcgggaattgtaccacaaactgaaagacaagatccatacaactcccgatacccctgagatccgccaagtcaagaagacacaagaggctgtcagtgagttgatctacaaatcagacttcttcaagatgcagggccacatgatctctctgccatacacaccccaagtgatccattgccgctatgtgggagacatcaccagtgatattaaatacaaagaggacttgcaggtcctgaagggatttggctgcttcctgtatgacactcctgacatggtccgctcccggcacctgcggaagctctggtctaattacctatacactgataaggcaaggaagatgcgagacaaatacaaagtggtgcttgacactccagaatacagaaaagtgcaagaactgaagacacatctgagtgagctggtctacagagctgcaggcaagaagcagaagtcaatctttacttcagttcctgatactcctgatcttttaagagccaagcgagggcagaagcttcagagtcagtatctgtatgttgaacttgccaccaaagagagaccccatcatcacgctggaaaccagaccacagccttgaagcatgctaaagacgtgaaggacatggtcagtgagaaaaagtacaagattcaatatgaaaagatgaaagacaagtacactccggttccagatacgccaatcctcatcagagccaagagggcttactggaatgccagtgatctacgctacaaagaaacatttcaaaagaccaaagggaaataccacacggtgaaagatgccctagacattgtctatcatcgcaaagtcacagatgacatcagtaaaataaaatacaaggagaactacatgagccagttgggtatctggaggtccattcctgatcgtccagagcatttccaccaccgagcagtcactgacacagtcagtgatgtaaaatataaagaagacttgacttggcttaaaggcattggttgctatgcctatgatacccctgatttcactctggctgaaaagaacaagactctctacagcaagtataagtataaagaagtatttgaaaggacaaagtcagatttcaagtatgttgccgactctccgatcaataggcatttcaagtatgcaactcaattgatgaatgagaaaaaatacagagctgattatgagcagcggaaagataaataccacctggtagtcgatgagcctagacatctgctggctaagaccgcaggcgaccagatcagtcagatcaaatacaggaaaaactatgaaaaatcaaaggacaaatttacctcaattgtggatactccagaacacctgcgtactacaaaagtcaacaaacaaatcagcgatatcctttataaattggaatacaacaaggccaaacccagaggctacaccacaatccacgacacacccatgttgctgcatgtccgcaaggttaaagatgaagtcagtgatctgaaatacaaagaagtataccaaagaaataaatccaactgcaccattgagccagatgctgttcatatcaaagcagccaaggacgcctacaaagtcaacaccaatctggactataagaaacagtacgaagccaacaaagcccactggaagtggactcctgaccgaccggacttcctccaggctgccaagtcatccctgcagcaaagcgattttgaatataagctggaccgggagttcctcaagggttgcaagctttctgtcactgatgacaaaaacacggtgctcgccctcaggaatactttaatagaaagtgatctgaaatacaaagagaaacatgtcaaggaaagaggaacctgccatgccgtacctgacacgcctcagatcctgctggcgaagactgtcagcaacctggtgtctgagaacaagtacaaggaccatgtcaagaagcacttggcacagggctcatacacaacactaccagagacccgggacactgttcacgtcaaggaagtgaccaagcatgtcagtgatacaaattacaaaaagaagtttgtcaaggagaaaggaaaatccaactactccatcatgctggagccaccagaggtgaaacatgctatggaagtggccaagaagcaaagtgatgtcgcttacagaaaagatgccaaagagaacctgcattacaccacagtggctgatcgaccagacatcaagaaggccacacaggcagccaaacaggccagtgaggtggagtacagagccaagcaccgcaaggaaggcagccatggcttaagcatgctcggtcgcccagacatagaaatggccaagaaggcagccaagctgagcagccaggttaaataccgagaaaatttcgataaagaaaagggcaagacaccaaaatacaatccaaaagacagccagctctacaaagtcatgaaagatgctaataatcttgcaagtgaggttaaatacaaggctgacctgaagaaacttcacaaacccgtgactgacatgaaggagtctctgatcatgaatcatgtcctgaatacaagccaacttgccagttcttaccagtacaagaagaagtatgagaagagtaaaggccactaccacaccatacccgataatctggagcagcttcacctaaaagaggccacagaattacagagtatagtgaaatacaaagaaaagtatgaaaaggaacgaggaaaacccatgctggactttgaaacaccaacgtacatcactgccaaagagtctcagcagatgcagagtgggaaagaatataggaaagattatgaagagtccattaaaggcagaaacctgactggcctggaggtcacgccagctttgttacatgtcaaatatgcaactaaaatagcaagcgagaaagagtacaggaaagatctagaggaaagcatccgtgggaagggcctcactgaaatggaagatacacctgacatgctaagagcaaagaatgccactcaaatcctcaatgagaaagaatataagcgagacctggaactggaagtcaaaggaagaggcctgaatgccatggccaatgaaactccggattttatgagggccaggaatgctactgatattgccagtcagattaagtataagcaatcagcagaaatggagaaagccaatttcacttctgtggttgatactccagagatcattcatgcccaacaagtcaagaatctttcaagccagaaaaagtacaaggaagatgctgagaagtccatgtcgtattatgagactgttttggacaccccagagatacagagagtccgggagaaccaaaagaacttcagccttctccaataccagtgtgaccttaaaaacagtaaaggaaaaattacagttgttcaagacacgccagaaatactgcgtgtaaaagaaaatcagaagaatttcagctcggttttatataaagaggatgtctcaccaggaacggctatcggaaagacacctgagatgatgagagtgaaacaaacacaggaccacattagctcggtgaagtataaggaagcaataggacaaggaactccaatccctgacctgcctgaagtgaaacgtgtgaaggagacgcagaagcacattagctcggttatgtacaaagaaaacttgggaacaggcattccaaccactgtgactccagagattgagagagtcaaacgcaatcaagagaactttagctcggttttgtacaaagaaaatttggggaaaggaatcccaacacctatcactccagagatggagagagtcaaacgcaatcaagagaactttagctcgatattgtacaaagagaacttgagcaaggggactcccctacctgtcactcctgagatggagcgagtcaaactcaatcaagaaaactttagctcggtgttgtataaagaaaacgttggaaaagggattccaatccccatcactccagagatggagagagtcaaacacaatcaagaaaactttagttcggtgctatacaaagaaaacctggggacaggaattccaatccccatcactcctgagatgcagagagtcaaacacaatcaagaaaaccttagctcggtgttatacaaagaaaacatgggcaagggaacccctttacctgtcactcccgagatggaaagagtcaaacacaatcaagaaaatattagctcggtgttatacaaagaaaacatgggcaagggaacccctctacctgtcactcctgagatggagagagtcaaacacaatcaagaaaatattagctcggtgttatacaaagaaaacatgggcaagggaactcctttagctgtcactcccgagatggagcgagtcaaacacaatcaagaaaatattagctcggttttgtacaaagaaaatgtggggaaagccaccgcaacccctgtcactcctgagatgcagagagtcaaacgcaatcaagaaaacattagctcggtgttatacaaagagaacctggggaaagcaacccccacaccctttactcctgagatggaaagagtgaaacgcaatcaagaaaactttagctcggtattgtacaaagagaacatgagaaaagcaactccgacacctgttactccagagatggagagagctaagcgcaaccaagaaaacattagctcggttctttattctgatagtttccggaaacaaatacaaggcaaagctgcctatgtattggatacccccgagatgagacgggtgagggagacccaacggcacatctcaacggtgaaatatcatgaagactttgagaaacacaagggttgcttcacaccagtggtgacagatcctatcactgaacgagtaaagaagaacatgcaggacttcagtgacattaactaccgaggtattcagaggaaagtggtagaaatggaacaaaaacggaatgaccaagatcaggagactattacaggtttacgtgtctggcgtactaatcctggttcggtttttgactatgatccagcagaagacaacatccagtcccgaagcttacacatgattaatgtccaagctcagcgccggagccgggagcagtcacgatctgccagtgcactaagcatcagtgggggtgaggagaagtctgagcattcagaagcaccagaccaccacctttcgacttacagcgacgggggtgtctttgcagtctcaacagcttacaaacatgcaaaaaccacagagctcccacaacaacgatcatcttcagttgctacccaacagacaacggtatcttccatcccatctcatccatctactgctggaaaaatcttccgtgccatgtatgactatatggctgctgatgcagatgaggtgtccttcaaggatggagatgccatcataaatgttcaagcaattgatgaaggctggatgtatggcactgtgcagaggactggcaggaccggaatgctcccagccaactacgttgaagctatttag

SEQ ID NO: 158140 - DNA, 26307 bp, Homo sapiens
  Payload ID: 10961
  Gene Symbol: NEB
  Gene Name: nebulin
  ENST ID: ENST00000618972
  CDS Start-End: 204-25886
aggcatcacgctggcttttgcctggggttctcaggaggggagagttgggagaggctttgctgctgaggaaatttatttggtagattgaaggtttgaacgagagctacagaaacgaaagaaaaagtctgtataagccaatggtgttcgggaagaaaataaccccattgccttgagtttgtaggtgccactactactctggaaaaatggcagatgacgaagactatgaggaggtggtggagtactacacagaagaagtggtttacgaagaggtgccgggagagacaataacaaaaatttatgagactacgacaacaaggacatctgactatgagcaatcagaaacttccaaaccagctctggcacagccagcactggcacagccagcatcagcaaagccggtggagaggaggaaggtcatccggaagaaagtggatccttcaaagttcatgaccccctacattgcacacagtcagaaaatgcaggatctttttagcccaaataaatacaaggagaagtttgagaaaacaaaaggacagccatacgccagcacaacagatactccagaacttcgcagaatcaaaaaagtacaagatcaactcagtgaggttaagtatcgaatggatggtgatgttgctaagactatatgtcacgtagatgaaaaagcaaaggatattgaacatgcaaagaaagtgtcgcagcaagtcagtaaggttttatacaagcagaactgggaagacaccaaggataagtacctgcttcctcctgatgcccctgaacttgtccaggccgttaagaacaccgccatgttcagcaagaaactgtacactgaagactgggaagcagacaaaagtttgttttacccctataatgatagcccggaactgaggagagttgcccaggcccagaaagctctcagtgatgttgcctacaaaaaaggtctcgctgaacagcaagctcaattcacgcctctggctgatcctccagatatagaatttgccaagaaagtaaccaatcaagtgagcaagcaaaaatacaaagaagactatgaaaataaaatcaaaggcaaatggagtgagacaccttgctttgaagttgcaaatgccagaatgaatgctgataacattagcacaaggaaataccaggaagattttgaaaacatgaaagaccagatctacttcatgcagaccgaaacaccagagtataaaatgaataaaaaagctggtgtggcagctagcaaggtaaaatacaaagaagactatgaaaagaataaaggaaaagcagattataatgtgcttcctgcttcagagaacccacagcttaggcagctgaaggcagcaggagatgccctaagtgacaaactatacaaggaaaactatgaaaagacaaaagcaaagagcataaattactgcgagacccccaaattcaagctcgatactgttctgcagaacttcagtagtgataaaaaatataaagattcctacttaaaagatattttgggacattatgtaggcagcttcgaggatccataccattcacactgcatgaaagtcacagctcaaaacagtgataaaaactacaaagcagaatacgaagaagacagaggcaaaggcttcttccctcagaccataactcaagaatatgaagcaattaagaaactagatcagtgtaaagaccacacctacaaagtccatccagataagacaaaattcacccaagttacagactctcctgttctgctacaagcccaagtcaattccaaacaactgagtgacttaaattacaaagcaaaacatgaaagtgaaaagttcaagtgccatatcccccctgatactcctgcttttatccagcacaaagtcaatgcctataacttgagtgataatctttataagcaagactgggagaagagcaaagccaaaaagtttgacattaaagtggatgccattcccctgctggcagccaaagccaacaccaagaacaccagcgatgtgatgtacaagaaagactatgaaaaaaacaaagggaaaatgattggagtcctcagcattaatgacgatcccaagatgctgcactccttgaaggtggccaaaaaccagagtgatagattatacaaggaaaactatgagaagacaaaggcaaagagtatgaattactgtgagaccccaaaatatcaacttgatactcagctgaagaacttcagtgaggctagatataaagacttatatgtaaaggatgttttgggacattatgtaggcagcatggaggacccatatcacacacactgcatgaaagttgcagctcaaaacagtgataaaagttacaaagcagaatatgaagaagataaaggaaaatgctatttccctcagacaataacacaagaatatgaagcaatcaagaagctggaccagtgtaaagatcatacctacaaagttcatccagataagaccaaattcacggcagtcactgattctcctgtactgttgcaagcccagctcaacacgaaacagcttagtgatctgaattacaaagcaaaacatgaaggtgagaagttcaagtgccatataccagcagatgctccacagtttatccaacacagagtcaatgcctataatctgagtgataatgtttataagcaagactgggagaagagcaaagccaagaagtttgacattaaagtggacgccattcccctgttggcagccaaagccaacaccaagaacaccagcgatgtgatgtacaagaaagactatgaaaagagcaaagggaaaatgattggagccctcagcattaatgacgatccaaagatgctgcactccttgaagacagccaaaaaccagagtgatcgcgaatatcgaaaagattatgaaaagtcaaaaactatctacacggcacctcttgatatgctccaagtcactcaagctaagaaatctcaggcaattgccagcgacgttgattataagcacatcttacacagttacagctacccccctgatagcatcaatgtggaccttgccaagaaggcatatgcgctgcagagcgatgttgaatacaaagctgactacaatagctggatgaaaggttgtggctgggtgccttttgggtccttagaaatggaaaaggcaaagcgagcttcagacatcctcaatgagaaaaaatatcgccaacatccagacaccctcaagtttacctcgattgaagatgctccaattacagtacagtctaaaattaaccaggcccagaggagtgatatcgcttacaaagccaaaggagaggaaattattcacaaatacaacctgccaccagacctgccccagttcatccaggctaaagttaatgcctacaatatcagtgagaatatgtacaaagcagacttgaaagacttgagcaagaagggatatgacctgagaactgatgcgattcccatcagagctgccaaagctgccaggcaggcggcgagtgacgttcagtacaaaaaagactatgaaaaggctaaagggaaaatggttggcttccaaagtcttcaagatgaccctaaactggttcattatatgaacgtggccaagatacaatcagatcgggagtataaaaaagactatgagaagacaaagtccaaatacaacacgccccatgatatgttcaatgtcgtggcggctaagaaagcccaggatgtggtcagcaatgtcaactataagcattctctccatcattacacctacttgcctgacgccatggacctggagctgtctaagaacatgatgcagatacagagtgataacgtctacaaggaagactacaacaactggatgaaaggcattggctggattcctattggcagtctcgacgtcgaaaaagttaaaaaggccggtgatgctctgaatgaaaagaagtacaggcaacatccagacaccctcaaatttaccagcattgtggactccccagttatggtccaggcaaaacagaacacgaagcaagtcagtgatatcttatacaaggctaaaggagaagatgtgaaacataaatacaccatgagtcctgatcttcctcagtttctccaggccaagtgcaatgcttacaatataagtgacgtctgttataaacgggattggtatgacttaatagccaagggcaacaatgtgctgggcgatgctattcccatcactgcagccaaggcatcgagaaacattgccagtgattataaatacaaggaagcttatgagaagtcaaagggaaagcatgtgggtttcagaagcctccaggatgatcccaagctggtccactatatgaatgtggcaaagctgcagtctgatcgtgaatacaagaagaactatgagaacaccaaaaccagctaccatacccctggggacatggttagcatcacagctgcaaagatggcccaggatgtcgctaccaatgtcaactacaaacagccattgcatcattacacatacctacctgacgccatgagtcttgagcatacgaggaatgtcaatcaaattcagagtgataatgtgtataaagacgagtataacagcttcttgaagggcatcggatggatccctattggttccctggaggtggagaaggtcaagaaagcaggcgatgcattaaatgagaggaagtatcgacagcacccagataccgtcaagttcacaagtgtgcctgattccatgggcatggtgttggctcagcataacacaaagcagctaagtgatttgaactacaaggtagagggagagaaactgaagcacaagtatactattgaccctgaattgcctcagtttattcaagccaaagtcaacgccctcaacatgagtgatgctcattataaagcagattggaagaaaaccattgccaagggctatgatttgagaccagatgccatcccaattgttgctgcaaaaagttcaaggaatattgctagtgattgcaaatataaggaggcctacgagaaagccaaaggcaagcaagttggatttctcagtcttcaggatgatcctaaactggttcactacatgaatgtggccaaaatccagtctgatcgtgagtacaaaaagggctatgaagccagcaagaccaagtaccacacacctctggatatggtcagtgtgacagctgcaaagaaatctcaggaggttgccaccaacgccaactacagacagtcataccaccactacactctcctgcccgatgccttgaatgtggagcactccaggaatgccatgcagattcagagtgataatctgtacaaatctgacttcaccaattggatgaaagggatcggctgggtgcccatagagtccctggaggtggagaaggcaaagaaagcaggagagattcttagtgagaagaagtatcgccagcaccccgagaagctgaagttcacttacgccatggacacaatggaacaggcacttaacaagagtaacaaactgaacatggacaagaggctctacactgaaaaatggaacaaggacaagaccaccattcatgtcatgcctgacacaccggatattttactctccagagtaaaccaaatcaccatgagtgataaactgtacaaagctggctgggaagaggaaaagaagaaaggatatgacctgaggcctgatgccattgcaataaaggctgcaagagcctctagagacattgccagtgattacaaatacaagaaagcctatgaacaagccaaagggaaacacattggcttccggagcctggaagatgaccccaagctggtgcacttcatgcaagtggccaagatgcagtcagaccgggaatacaagaagggatatgagaaatccaagacctccttccacaccccggtggacatgctcagtgtggtggcagccaagaagtctcaggaagtggccaccaatgccaactacaggaacgtgatccatacctacaacatgcttcctgatgccatgagctttgaattggccaaaaatatgatgcagattcaaagtgataatcagtacaaggctgactatgctgacttcatgaagggcattggatggctccctctgggctccctggaagcagagaaaaacaagaaagccatggagattattagtgaaaagaagtaccgccagcacccagacactttgaagtattccacactcatggactcgatgaacatggttttggcccagaataatgcaaaaattatgaacgaacatctctacaaacaagcatgggaggctgacaaaaccaaagtccacatcatgcctgatatcccccagattattttggcaaaggcaaatgcaattaatatgagtgataaactctacaaactttccttggaagagtctaaaaagaaaggctatgatctcagacctgatgcaattcctatcaaagctgccaaggcttccagagatattgcaagtgattataaatacaagtacaattatgaaaaagggaaggggaaaatggttggtttccgcagtctcgaggatgatcccaaattagtccattccatgcaagtggctaagatgcaatctgatcgggagtacaagaaaaactatgagaacacaaagaccagctaccacacccctgccgacatgctcagtgtcacggctgcaaaggatgcccaagccaacatcaccaacactaactacaagcacctgattcacaagtacatcctccttccagatgcaatgaacattgagctgaccaggaatatgaatcgcatacagagtgataatgaatataagcaagattacaatgaatggtacaaagggcttggctggagtccagcaggttctctggaagtggagaaggccaagaaagcaactgaatatgccagtgatcagaaataccgccagcacccgagcaacttccagtttaagaagctgactgattccatggacatggtgcttgccaagcagaatgcacataccatgaacaagcatttatacaccattgattggaataaagataagaccaagattcatgtgatgcctgatacaccagatattttacaagccaagcagaatcaaacactgtatagtcagaaactctataaacttggatgggaagaagctttgaagaaaggctatgatctcccagttgatgcaatttctgtacagctagctaaagcttcaagagacattgctagtgattataaatacaaacaaggctaccgaaagcaacttggccaccatgttggattccggagtctgcaagatgacccaaaacttgtgttgtccatgaatgtagccaaaatgcagagtgaaagagaatacaagaaggactttgagaagtggaaaactaagttctccagcccagtggacatgttgggagtggtactggccaagaagtgtcaggagttggttagtgacgtggactacaagaactacctgcatcagtggacatgtctgcctgatcagaacgatgttgtgcaagctaagaaagtttatgaactgcaaagtgagaatctatataaatctgaccttgagtggctgagaggcataggatggagtcccttgggttctttagaggcagaaaagaacaagcgggcttcggaaatcatcagtgagaagaaatatcgtcagcctccagacagaaacaagttcaccagcattcctgatgccatggatatagttctggcaaagacaaatgccaaaaataggagtgatagactttatagagaagcttgggacaaagacaagactcagatccacatcatgcctgatacacctgacattgttctggctaaagcaaacttaatcaacacaagtgataaactctaccgaatgggttatgaggagctgaagagaaaaggttacgatcttcctgttgatgccataccaatcaaagcagcaaaagcctcccgggaaattgccagtgaatacaagtacaaggaaggctttcgcaagcagctcggccaccacattggtgcccggaacattgaagatgaccccaagatgatgtggtccatgcatgtggccaagatccagagtgacagggagtacaagaaggactttgagaagtggaagaccaagttcagcagcccagtggacatgctgggggtggtgttggccaagaagtgccagaccttagtcagcgacgtggactacaagaactacctgcaccagtggacatgcctgcccgaccagagcgatgtcatccatgctcggcaggcctatgacctccagagcgataatttgtacaagtcagaccttcagtggctaaaaggcattggctggatgactagtggttctctcgaggatgagaaaaataaacgagccacccagattttgagtgaccatgtttaccgtcagcacccagatcaatttaagttttccagccttatggattccataccaatggttttggcaaaaaacaatgctattaccatgaatcatcgcctctatacagaagcttgggataaagataaaaccactgtccacattatgccagatacccctgaagttttattagctaaacaaaacaaagtaaattacagtgagaaattgtataagcttggcctagaagaagccaagaggaaaggttatgacatgcgggtagatgccattcctatcaaggcagccaaggcctccagagatattgcaagtgaattcaagtacaaagaaggctatcgtaagcagctcggccaccacattggtgcccgagctatacgtgatgaccccaagatgatgtggtccatgcacgtggccaagatccagagtgacagggagtacaagaaggactttgagaagtggaagaccaagttcagcagcccagtggacatgctgggggtggtgctggccaagaagtgccagaccttagtcagcgatgtggactacaagaactacctgcaccagtggacatgcctgcccgaccagagcgacgtcatccatgctcggcaggcctatgacctccagagcgataatatgtacaagtctgatctccagtggatgagaggcattggctgggtgtccattggctctttggatgtggaaaaatgcaaaagggcaactgaaattttgagtgataaaatctatcgccagcctccagacagattcaaatttaccagtgtgactgactctctggaacaagtgttggccaaaaataatgccatcactatgaacaagcgtttatacacagaagcctgggacaaagacaagactcagatccacataatgccagacacaccagaaattatgttggcaagaatgaacaaaatcaactacagtgagagtctgtacaaacttgctaatgaagaagcaaagaagaaaggctatgacttgcgaagcgacgccatccccatcgtggcggccaaggcctccagggacatcatcagtgactacaaatataaagatggttactgcaagcaacttggccaccatattggagcccggaacattgaagatgaccccaagatgatgtggtccatgcacgtagccaagatccagagtgacagggagtacaaaaaggactttgagaagtggaagaccaagttcagcagcccagtggacatgctgggggtggtgctggccaagaagtgccagaccttagtcagtgacgtggactataagaactacctgcacgagtggacatgcctgcctgaccagagcgatgtcatccatgctcggcaggcctatgacctccagagtgacaatatttacaagtcagatctccagtggctgagaggcattggctgggtccccattgggtctatggatgtggtcaagtgcaagagagctaccgaaatactgagtgataacatctaccgccagcctccggacaagctgaaatttaccagtgtgactgattctctagagcaggtgctggccaagaacaatgctctcaacatgaataagcgtttatacacagaggcctgggacaaagacaagactcaaattcacataatgcctgatacaccagagattatgttggcaaggcagaacaaaatcaactacagtgagactctatacaaacttgccaatgaagaagcaaaaaagaaaggctacgacttgcgaagtgacgccatccccatcgtggctgccaaggcctccagggacgttatcagtgattacaaatacaaagatggttaccgcaagcagctcggccaccacattggagcccggaacattgaagatgaccccaagatgatgtggtccatgcatgtggccaagatccagagtgacagggagtataagaaggactttgagaagtggaagaccaagttcagcagcccagtggacatgctgggagtggtgttagccaagaagtgccagaccttagtcagcgatgtggactacaagaactacctgcacgagtggacgtgcctgcccgaccagaatgatgtcatccatgctcggcaggcctatgacctccagagcgataacatttacaaatctgatctccagtggctgagaggcattggctgggtccccattgggtctatggatgtggtcaagtgcaagagagctgctgaaatactgagtgataacatctaccgccagcctccggacaagctgaaatttaccagtgtgactgactctctagagcaggtgctggccaagaacaatgctctcaatatgaacaagcgcttatacacagaagcctgggacaaagacaagacccaagtccatattatgcctgatacacctgaaatcatgttggcaagacaaaataaaataaattatagtgagagcctctatcgtcaggccatggaagaagccaagaaagaaggctatgacttgagaagtgatgccattcccattgtggctgccaaggcctctcgggatattgccagtgattacaaatacaaagaagcatatcgtaaacagttgggtcaccacattggcgcccgagcagtacacgatgaccccaagataatgtggtccctccacattgccaaagtgcagagtgaccgtgagtacaagaaagattttgagaaatacaagacaaggtacagcagcccagtggacatgcttggtatcgttttggccaagaagtgtcagaccttggtcagcgatgtggactataaacatcctctgcatgaatggatctgcctgcccgaccagaatgacatcattcatgcacggaaagcctatgacctccagagtgacaatttgtataagtcagaccttgaatggatgaaaggcattggctgggttccgattgattccttggaagttgttagggccaagagagctggagaattacttagtgatactatctaccgtcagcgtccagaaacgctgaaatttaccagtataacggacactccggagcaggtgctggcaaaaaacaatgctttaaacatgaataagcgcttatatactgaagcctgggacaatgacaagaaaactattcatgtcatgcctgatacaccagaaatcatgttagccaaactcaaccgaataaactacagtgataaactctataaacttgctttggaagagtccaagaaggaaggctatgacttgcgtctggatgccattccaatccaagcagccaaggcttcaagagatattgctagtgattacaagtacaaggaaggctaccgcaaacagcttggccaccatattggggcccggaacattaaggatgacccgaagatgatgtggtccatccatgtggccaagatccagagtgacagggagtacaagaaggagtttgagaagtggaagaccaagttcagcagcccagtggacatgctgggggtggtgctggccaagaagtgtcagatccttgtaagcgacatagactacaagcatcccctgcatgaatggacctgcctgcctgatcagaatgacgtcattcaggctcggaaggcctatgacctgcagagtgatgctatttacaaatctgatcttgagtggctgagaggcataggatgggttcccattggctctgtagaggtcgagaaagtgaagagagctggagaaatcctgagtgacaggaagtatcgccagcctgcagaccagctcaaattcacatgcattaccgacactccggaaattgtcctagcaaagaataatgccctgacaatgagcaagcatttatacacagaagcttgggatgctgacaaaacctccatccacgtgatgccagacaccccagatatcctgctggccaagagtaattctgccaatatcagccaaaaactttacaccaagggatgggatgaatcaaagatgaaggactatgatctgagagcagatgctatttccatcaaaagtgccaaggcctccagggacatcgccagtgactacaaatacaaggaagcctatgagaaacagaaaggccaccacattggagcccagagcattgaagatgatcccaagattatgtgtgccatacatgcaggaaaaattcaaagtgaaagggagtacaagaaggaattccaaaagtggaaaaccaagttctctagcccagtggacatgttaagcatcttgctggccaagaaatgtcagactttggtcactgacattgattatcgcaattacctgcatgaatggacatgcatgccggatcaaaacgacattatccaagcaaaaaaggcctatgacctgcagagtgatagtgtgtataaggcagacctggagtggctgcgtggcatcggctggatgccagaaggctcagtggaaatgaacagagtgaaggttgctcaagacctcgtgaatgaaagactctataggacacgtccagaagctttgtcattcaccagcattgtcgacactccagaagttgtcttggcaaaagccaattctctgcaaataagtgagaaactgtatcaggaagcctggaataaagataaaagcaacatcaccattccttctgatactccggagatgctgcaggcccacatcaatgccttgcaaatcagcaataaactctaccaaaaagactggaatgacgccaagcagaaaggctatgacataagggcagatgccattgaaatcaagcacgccaaggcctccagagaaattgccagtgagtacaaatacaaagaaggttaccgtaagcaactgggccaccacatgggtttccgcaccctacaagatgaccccaagtcagtatgggctatacatgctgccaagatccagagtgacagagaatataagaaagcttatgagaagtctaaaggaattcacaacacaccgttggacatgatgtcaattgttcaagccaagaaatgccaggtcctggttagcgacattgattatcgcaattatctgcaccagtggacgtgtctgccagatcagaacgatgtgatccaggccaagaaagcctacgacctgcagagcgataacttgtacaagtcagacctggaatggctgaagggtattggatggctgccagagggttctgtggaagtgatgagagtgaagaatgcccagaatctcttgaatgaaaggctgtatcgtataaagcctgaggccctcaaattcaccagcattgttgacaccccggaagtaatccaggcaaagatcaatgctgtacagatcagtgagccattgtatcgcgatgcctgggagaaagagaaggctaatgtgaacgtgccagctgacactcccctgatgctgcaatccaaaatcaatgccctgcagatcagcaataaacgctatcagcaagcttgggaagatgtcaagatgactggttatgacctgcgagcagatgccattgggatccagcatgccaaggcttccagggatattgccagtgactatctgtacaaaactgcttatgagaaacagaaaggccattacattggctgtcgcagcgccaaggaagaccctaaactggtttgggcagcaaatgtgttgaagatgcagaatgacaggctgtacaaaaaggcctacaacgaccacaaagccaagatctccatccctgtggacatggtgtccatcagcgctgccaaagaaggtcaggcactggcaagtgatgtggactatcgccattacctgcaccactggtcttgctttcccgaccagaatgatgtgatccaagccaggaaagcctacgacctacagagcgacagtgtgtataaggcagacctggagtggctgcgtggcatcggctggatgccagaaggctcagtggaaatgaacagagtgaaggttgctcaagacctcgtgaatgaaagactctataggacacgtccagaagctttgtcattcaccagcattgtcgacactccagaagttgtcttggcaaaagccaattctctgcaaataagtgagaaactgtatcaggaagcctggaataaagataaaagcaacatcaccattccttctgatactccggagatgctgcaggcccacatcaatgccttgcaaatcagcaataaactctaccaaaaagactggaatgacaccaagcagaaaggctatgacataagggcagatgccattgaaatcaagcacgccaaggcctccagagaaattgccagtgagtacaaatacaaagaaggttaccgtaagcaactgggccaccacatgggtttccgcaccctacaagatgaccccaagtcagtatgggctatacatgctgccaagatccagagtgacagagaatataagaaagcttatgagaagtctaaaggaattcacaacacaccgttggacatgatgtcaattgttcaagccaagaaatgccaggtcctggttagcgacattgattatcgcaattatctgcaccagtggacgtgtctgccagatcagaacgatgtgatccaggccaagaaagcctacgacctgcagagcgataacttgtacaagtcagacctggaatggctgaagggtattggatggttgccagagggttctgtggaagtgatgagagtgaagaatgcccagaatctcttgaatgaaaggctgtatcgtataaagcctgaggccctcaaattcaccagcattgttgacaccccggaagtaatccaggcaaagatcaatgctgtacagatcagtgagccattgtatcgcaatgcctgggagaaagagaaggctaatgtgaacgtgccagctgacactcccctgatgctgcaatccaaaatcaatgctctgcagatcagcaataaacgctatcagcaagcttgggaagatgtcaagatgactggttatgacctgcgagcagatgccattgggatccagcatgccaaggcttccagggatattgccagtgattatctgtacaaaactgcttatgagaaacagaaaggccattacattggctgtcgcagcgccaaggaagaccctaaactggtttgggcagcaaatgtgttgaagatgcagaatgacaggctgtacaaaaaggcctacaacgaccacaaagccaagatctccatccctgtggacatggtgtccatcagcgctgccaaagaaggtcaggcactggcaagtgatgtggactatcgccattacctgcaccactggtcttgctttcccgaccagaatgatgtgatccaagccaggaaagcctacgacctacagagcgacagtgtgtataaggcagacctggagtggctgcgtggcatcggctggatgccagaaggctcagtggaaatgaacagagtgaaggttgctcaagacctcgtgaatgaaagactctataggacacgtccagaagctttgtcattcaccagcattgtcgacactccagaagttgtcttggcaaaagccaattctctgcaaataagtgagaaactgtatcaggaagcctggaataaagataaaagcaacatcaccattccttctgatactccggagatgctgcaggcccacatcaatgccttgcaaatcagcaataaactctaccaaaaagactggaatgacaccaagcagaaaggctatgacataagggcagatgccattgaaatcaagcacgccaaggcctccagagaaattgccagtgagtacaaatacaaagaaggttaccgtaagcaactgggccaccacatgggtttccgcaccctacaagatgaccccaagtcagtatgggctatacatgctgccaagatccagagtgacagagaatataagaaagcttatgagaagtctaaaggaattcacaacacaccgttggacatgatgtcaattgttcaagccaagaaatgccaggtcctggttagcgacattgattatcgcaattatctgcaccagtggacgtgtctgccagatcagaacgatgtgatccaggccaagaaagcctacgacctgcagagcgataacttgtacaagtcagacctggaatggctgaagggtattggatggttgccagagggttctgtggaagtgatgagagtgaagaatgcccagaatctcttgaatgaaaggctgtatcgtataaagcctgaggccctcaaattcaccagcattgttgacaccccggaagtaatccaggcaaagatcaatgctgtacagatcagtgagccattgtatcgcgatgcctgggagaaagagaaggctaatgtgaacgtgccagctgacactcccctgatgctgcaatccaaaatcaatgccctgcagatcagcaataaacgctatcagcaagcttgggaagatgtcaagatgactggttatgacctgcgagcagatgccattgggatccagcatgccaaggcttccagggatattgccagtgactatctgtacaaaactgcttatgagaaacagaaaggccattacattggctgtcgcagcgccaaggaagaccctaaactggtttgggcagcaaatgtgttgaagatgcagaatgacaggctgtacaaaaaggcctacaacgaccacaaagccaagatctccatccctgtggacatggtgtccatcagcgctgccaaagaaggtcaggcactggcaagtgatgtggactatcgccattacctgcaccgctggtcttgctttcccgaccagaatgatgtgatccaagccaggaaagcctacgacctacagagcgacgccctctacaaggctgacttggagtggttgcgtggcattggctggatgccccaagggtctcctgaagtgttgagagtcaaaaacgcccagaatatcttttgtgacagtgtctatcggacgcctgtggtgaaccttaagtacacaagcattgttgacacacctgaagtggtccttgctaaatcaaatgctgaaaatattagtattccaaagtacagagaggtttgggacaaggataaaacttcaatacacataatgccagatactccagaaattaatctcgctagagcaaatgctcttaatgtgagcaataaactttaccgtgagggctgggatgaaatgaaggcgggctgtgatgtccggctggatgccatccccatccaggctgccaaggcctccagggagattgccagtgactataaatataagcttgaccatgagaagcagaagggacactacgtgggcaccctcacagccagggatgacaacaagatccgctgggccctcatagctgacaagctccagaatgaacgagagtaccggctggactgggccaaatggaaggccaagatccagagccctgtggacatgctttccatcctgcactctaaaaattcccaggctctggtcagtgacatggattaccgcaattacctgcaccagtggacctgcatgcccgaccagaacgatgtgattcaggccaagaaggcctacgaactgcagagcgataatgtttacaaggctgacttggaatggttgcgtggaattgggtggatgccaaatgactccgtgtccgtcaatcatgccaaacatgccgcggacatcttcagtgagaaaaaatatcgcacaaaaatagaaactctcaactttacgcctgtggatgacagagttgattatgtgacagcgaaacaaagtggcgagatcctcgatgatattaaataccggaaagactggaatgccaccaaatcaaagtacaccctcacagaaacccccctgctgcacactgcccaggaggctgctaggatactggaccagtatctctacaaggaaggctgggagagacaaaaagccacaggttacattttgcctccagatgctgtgccatttgttcatgcccatcactgcaatgacgttcagagtgagctgaaatacaaagctgaacatgtgaagcaaaaaggtcattatgttggtgtcccgacgatgagagatgatcctaagctggtttggtttgagcatgcaggccagattcagaatgagagactatacaaagaggactatcacaaaacaaaggccaaaatcaatatacctgctgatatggtgtcagtcttggccgccaagcaggggcagacccttgtcagtgatattgattatcgtaattacttgcaccaatggatgtgtcatcctgaccagaacgatgttattcaggcaagaaaggcctatgacctacagagtgataatgtctacagagctgacctggagtggctccgaggcattggctggatcccactggattctgtggaccatgtaagggttactaagaaccaggaaatgatgagtcagatcaaatataagaaaaatgcccttgaaaactatcctaactttagaagtgtggtggatcctccagagattgttttagccaagattaattctgtcaatcaaagtgatgtaaaatataaagaaacatttaataaagcaaagggcaaatatacgttttcaccagatacaccacatatctcccactccaaagacatgggaaaactctacagtactatactgtataaaggggcgtgggagggcaccaaggcctatggctacaccctggatgagcgctacattcccattgttggagccaagcatgctgatctggtgaacagtgagcttaaatacaaagagacatatgagaagcagaaaggtcactacctggctggaaaagtgatcggtgaattccctggtgtggttcactgtctggatttccaaaagatgaggagtgcgttgaactacagaaaacattatgaggataccaaagcaaatgttcatatccccaatgacatgatgaatcacgtgctggctaaaaggtgccagtacatcctcagtgacctggagtatcgacactatttccaccagtggacgtctcttctggaagaacccaatgttatacgcgtccgaaacgcccaggagatcttgagtgataatgtgtataaagatgacctgaattggttgaaaggcattggttgctacgtttgggatacaccccaaatcctccatgccaagaaatcatacgaccttcagagtcagctacaatatacagcagcaggtaaagaaaatctacaaaactataatctggtcacagacacgcccctctatgtgactgctgttcagagtggcattaatgccagtgaggtaaaatataaagaaaattatcatcagattaaggacaaatacacaacagttctagaaacagtggattatgacagaaccagaaacctgaagaatctttacagcagtaacctgtacaaggaggcctgggatagagtgaaagccaccagctacatcctgccttccagcaccttgtccctgacacacgccaagaaccagaagcatctggccagccatatcaaatatcgggaagaatatgaaaagttcaaagctctttatacgttaccaagaagtgttgacgatgatccgaacacagcacggtgcctccgagttggcaagcttaacatcgatcgcctgtacagatcagtttatgaaaagaacaagatgaaaatccacatcgtgcccgacatggtagagatggttactgccaaggattcccagaagaaagtcagtgagattgattaccgcctgcgcctccacgaatggatttgccaccccgacttgcaagtcaatgatcacgtcaggaaagtcacagatcagatcagcgatattgtatacaaggatgacctcaactggctgaaaggcattggttgctacgtctgggacactcctgaaatcctccatgccaagcatgcttatgatctacgtgatgatatcaagtataaagctcacatgttgaaaacaaggaatgactacaagcttgtcacagatacaccagtctacgtgcaggctgtcaaaagtgggaaacagctaagtgacgctgtctaccactatgactatgtgcacagtgtcagaggcaaagtggctccaactaccaaaaccgtggatctggaccgggcccttcatgcatacaagctccagagttcgaatctatacaaaaccagcctgcgcaccctgcccactggatatagacttccaggtgacactcctcacttcaaacacatcaaggacacccgttacatgagcagttatttcaagtacaaagaagcctatgaacacaccaaggcatatgggtatacacttggccccaaagatgttccatttgtccacgtccggagagtcaacaatgttaccagcgagagactgtatcgggaattgtaccacaaactgaaagacaagatccatacaactcccgatacccctgagatccgccaagtcaagaagacacaagaggctgtcagtgagttgatctacaaatcagacttcttcaagatgcagggccacatgatctctctgccatacacaccccaagtgatccattgccgctatgtgggagacatcaccagtgatattaaatacaaagaggacttgcaggtcctgaagggatttggctgcttcctgtatgacactcctgacatggtccgctcccggcacctgcggaagctctggtctaattacctatacactgataaggcaaggaagatgcgagacaaatacaaagtggtgcttgacactccagaatacagaaaagtgcaagaactgaagacacatctgagtgagctggtctacagagctgcaggcaagaagcagaagtcaatctttacttcagttcctgatactcctgatcttttaagagccaagcgagggcagaagcttcagagtcagtatctgtatgttgaacttgccaccaaagagagaccccatcatcacgctggaaaccagaccacagccttgaagcatgctaaagacgtgaaggacatggtcagtgagaaaaagtacaagattcaatatgaaaagatgaaagacaagtacactccggttccagatacgccaatcctcatcagagccaagagggcttactggaatgccagtgatctacgctacaaagaaacatttcaaaagaccaaagggaaataccacacggtgaaagatgccctagacattgtctatcatcgcaaagtcacagatgacatcagtaaaataaaatacaaggagaactacatgagccagttgggtatctggaggtccattcctgatcgtccagagcatttccaccaccgagcagtcactgacacagtcagtgatgtaaaatataaagaagacttgacttggcttaaaggcattggttgctatgcctatgatacccctgatttcactctggctgaaaagaacaagactctctacagcaagtataagtataaagaagtatttgaaaggacaaagtcagatttcaagtatgttgccgactctccgatcaataggcatttcaagtatgcaactcaattgatgaatgagaaaaaatacagagctgattatgagcagcggaaagataaataccacctggtagtcgatgagcctagacatctgctggctaagaccgcaggcgaccagatcagtcagagaaaatataaatctagtgccaagatgtttctgcaacatggatgtaatgaaattctgcgtccagatatgttgactgctctctacaattcgcatatgtggagccagatcaaatacaggaaaaactatgaaaaatcaaaggacaaatttacctcaattgtggatactccagaacacctgcgtactacaaaagtcaacaaacaaatcagcgatatcctttataaattggaatacaacaaggccaaacccagaggctacaccacaatccacgacacacccatgttgctgcatgtccgcaaggttaaagatgaagtcagtgatctgaaatacaaagaagtataccaaagaaataaatccaactgcaccattgagccagatgctgttcatatcaaagcagccaaggacgcctacaaagtcaacaccaatctggactataagaaacagtacgaagccaacaaagcccactggaagtggactcctgaccgaccggacttcctccaggctgccaagtcatccctgcagcaaagcgattttgaatataagctggaccgggagttcctcaagggttgcaagctttctgtcactgatgacaaaaacacggtgctcgccctcaggaatactttaatagaaagtgatctgaaatacaaagagaaacatgtcaaggaaagaggaacctgccatgccgtacctgacacgcctcagatcctgctggcgaagactgtcagcaacctggtgtctgagaacaagtacaaggaccatgtcaagaagcacttggcacagggctcatacacaacactaccagagacccgggacactgttcacgtcaaggaagtgaccaagcatgtcagtgatacaaattacaaaaagaagtttgtcaaggagaaaggaaaatccaactactccatcatgctggagccaccagaggtgaaacatgctatggaagtggccaagaagcaaagtgatgtcgcttacagaaaagatgccaaagagaacctgcattacaccacagtggctgatcgaccagacatcaagaaggccacacaggcagccaaacaggccagtgaggtggagtacagagccaagcaccgcaaggaaggcagccatggcttaagcatgctcggtcgcccagacatagaaatggccaagaaggcagccaagctgagcagccaggttaaataccgagaaaatttcgataaagaaaagggcaagacaccaaaatacaatccaaaagacagccagctctacaaagtcatgaaagatgctaataatcttgcaagtgaggttaaatacaaggctgacctgaagaaacttcacaaacccgtgactgacatgaaggagtctctgatcatgaatcatgtcctgaatacaagccaacttgccagttcttaccagtacaagaagaagtatgagaagagtaaaggccactaccacaccatacccgataatctggagcagcttcacctaaaagaggccacagaattacagagtatagtgaaatacaaagaaaagtatgaaaaggaacgaggaaaacccatgctggactttgaaacaccaacgtacatcactgccaaagagtctcagcagatgcagagtgggaaagaatataggaaagattatgaagagtccattaaaggcagaaacctgactggcctggaggtcacgccagctttgttacatgtcaaatatgcaactaaaatagcaagcgagaaagagtacaggaaagatctagaggaaagcatccgtgggaagggcctcactgaaatggaagatacacctgacatgctaagagcaaagaatgccactcaaatcctcaatgagaaagaatataagcgagacctggaactggaagtcaaaggaagaggcctgaatgccatggccaatgaaactccggattttatgagggccaggaatgctactgatattgccagtcagattaagtataagcaatcagcagaaatggagaaagccaatttcacttctgtggttgatactccagagatcattcatgcccaacaagtcaagaatctttcaagccagaaaaagtacaaggaagatgctgagaagtccatgtcgtattatgagactgttttggacaccccagagatacagagagtccgggagaaccaaaagaacttcagccttctccaataccagtgtgaccttaaaaacagtaaaggaaaaattacagttgttcaagacacgccagaaatactgcgtgtaaaagaaaatcagaagaatttcagctcggttttatataaagaggatgtctcaccaggaacggctatcggaaagacacctgagatgatgagagtgaaacaaacacaggaccacattagctcggtgaagtataaggaagcaataggacaaggaactccaatccctgacctgcctgaagtgaaacgtgtgaaggagacgcagaagcacattagctcggttatgtacaaagaaaacttgggaacaggcattccaaccactgtgactccagagattgagagagtcaaacgcaatcaagagaactttagctcggttttgtacaaagaaaatttggggaaaggaatcccaacacctatcactccagagatggagagagtcaaacgcaatcaagagaactttagctcgatattgtacaaagagaacttgagcaaggggactcccctacctgtcactcctgagatggagcgagtcaaactcaatcaagaaaactttagctcggtgttgtataaagaaaacgttggaaaagggattccaatccccatcactccagagatggagagagtcaaacacaatcaagaaaactttagttcggtgctatacaaagaaaacctggggacaggaattccaatccccatcactcctgagatgcagagagtcaaacacaatcaagaaaaccttagctcggtgttatacaaagaaaacatgggcaagggaacccctttacctgtcactcccgagatggaaagagtcaaacacaatcaagaaaatattagctcggtgttatacaaagaaaacatgggcaagggaacccctctacctgtcactcctgagatggagagagtcaaacacaatcaagaaaatattagctcggtgttatacaaagaaaacatgggcaagggaactcctttagctgtcactcccgagatggagcgagtcaaacacaatcaagaaaatattagctcggttttgtacaaagaaaatgtggggaaagccaccgcaacccctgtcactcctgagatgcagagagtcaaacgcaatcaagaaaacattagctcggtgttatacaaagagaacctggggaaagcaacccccacaccctttactcctgagatggaaagagtgaaacgcaatcaagaaaactttagctcggtattgtacaaagagaacatgagaaaagcaactccgacacctgttactccagagatggagagagctaagcgcaaccaagaaaacattagctcggttctttattctgatagtttccggaaacaaatacaaggcaaagctgcctatgtattggatacccccgagatgagacgggtgagggagacccaacggcacatctcaacggtgaaatatcatgaagactttgagaaacacaagggttgcttcacaccagtggtgacagatcctatcactgaacgagtaaagaagaacatgcaggacttcagtgacattaactaccgaggtattcagaggaaagtggtagaaatggaacaaaaacggaatgaccaagatcaggagactattacaggtttacgtgtctggcgtactaatcctggttcggtttttgactatgatccagcagaagacaacatccagtcccgaagcttacacatgattaatgtccaagctcagcgccggagccgggagcagtcacgatctgccagtgcactaagcatcagtgggggtgaggagaagtctgagcattcagaagcaccagaccaccacctttcgacttacagcgacgggggtgtctttgcagtctcaacagcttacaaacatgcaaaaaccacagagctcccacaacaacgatcatcttcagttgctacccaacagacaacggtatcttccatcccatctcatccatctactgctggaaaaatcttccgtgccatgtatgactatatggctgctgatgcagatgaggtgtccttcaaggatggagatgccatcataaatgttcaagcaattgatgaaggctggatgtatggcactgtgcagaggactggcaggaccggaatgctcccagccaactacgttgaagctatttaggcatttcaaagcatcacacttgtctgcaggacttacagatcctgcagtcaatgtttcggtttagactctccactgttacctaagttctcaagctgcctatggtttttctgtgtcaatgtgatttatggtagtaccatcctttctcctttgggttttaaaataagttgcagaacagacactttaaaagcttctgcaatattatttctgtgcctagagtctttctccattataaacatgttttaacattatttcttttctaaaacagggattttgaatatgccaaacacattaaaggaaaaatagcagagatgttcaccttttccttgctgattgctaatgcttattatttctaattcagttctgaagttataaacttataatcaatacaaaccagcaactaataaaacctctaattctgcaa

SEQ ID NO: 158141 - DNA, 5580 bp, Homo sapiens
  Payload ID: 10962
  Gene Symbol: NRAP
  Gene Name: nebulin-related anchoring protein
  Uniprot ID: Q86VF7
  ENST ID: ENST00000359988
  CDS Start-End: 246-5438
agacacatgcgtgctgagtgagtggccaaaatagccccttgagtaagtggcagctttaaaaaccatccaactgctgacttcaaactagaaggtcagcaaaggaaagtggaagttggattctgaaagatcgaggtgcccacaggaattttatggtcgtcggattttgaagacttgaactagactgggggttctccttgcatttcttgcctgttgcctatctttgtcctctctcttccggcttcgagatgaatgtgcagccctgttctaggtgtgggtatggggtttatcctgccgagaagatcagctgtatagatcagatatggcataaagcctgttttcactgtgaagtttgcaagatgatgctgtctgttaataactttgtgagtcaccagaaaaagccgtactgtcacgcccataaccctaagaacaacactttcaccagtgtctatcacactccattaaatctaaatgtgaggacatttccagaggccatcagtgggatccatgaccaagaagatggtgaacagtgtaaatcagtttttcactgggacatgaaatccaaggataaggaaggtgcacctaacaggcagccactggcaaatgagagagcctattggactggatatggggaagggaatgcttggtgcccaggagctctgccagaccccgaaattgtaaggatggttgaggctcgaaagtctcttggtgaggaatatacagaagactatgagcaacccaggggcaaggggagctttccagccatgatcacacctgcttatcaaagggccaagaaagccaaccagctggccagccaagtggagtataagagagggcatgatgaacgcatctccaggttctccacggtggtggatactcctgagctgctacggagcaaggctggggcacagcttcaaagtgatgtgagatacacagaggactatgaacaacaaagagggaaaggcagtttccctgcgatgatcacacccgcctatcagatagccaaaagagccaatgagctggcaagtgatgtgaggtaccatcaacaatatcaaaaagaaatgaggggaatggctggtccagccattggagctgagggcatcttgacaagggaatgtgcagaccaatatggccagggttacccggaggagtatgaggagcacaggggaaagggcagcttcccagctatgatcactccagcatatcagaacgccaagaaagctcacgaactcgctagtgacataaaatacaggcaggacttcaataagatgaaaggcgctgcacattatcactcgcttccagctcaagacaacttggttctcaaacaggctcagagcgtaaacaaactcgtgagtgaggtggagtataagaaggatctggaaagtagtagaggtcacagtatcaactactgtgaaacacctcaattcaggaacgtgagcaagatctcaaaatttaccagtgataataaatataaagaaaactaccagaaccacatgagaggccgctatgaaggagttggtatggacagacgcactctgcatgctatgaaagttggcagcctggcaagcaacgttgcctacaaagctgattataaacatgatattgtcgactacaactacccagccactctcacgccttcctatcaaacagctatgaaactggtgcccttgaaagatgccaattataggcagagcatcgacaagttgaagtacagctcggtgactgacaccccacagattgttcaagccaaaatcaatgcccagcagctgagtcatgtgaattaccgtgctgactatgagaaaaataagttgaattacacattgccccaggatgttcctcagctggtgaaggccaaaaccaatgccaaactcttcagtgaggttaagtataaagaaggctgggagaagacaaaggggaaaggatttgagatgaagctggatgccatgtctctgctggccgccaaagcctctggggagcttgctagcaatattaaatataaagaagaatatgaaaagacaaaaggcaaagccatgggaacagccgactctaggcttctgcactccctgcagattgctaagatgagcagtgaggttgaatataagaaaggctttgaagagagtaagacccggtttcacctgcccatggatatggtaaacatcaggcatgctaagaaggcccaaactctcgccagtgacctggactacaggaagaaactgcatgaatacactgtgctgcctgaagatatgaagactcagtgggccaagaaggcctatgggctccagagcgagctgcagtacaaggctgacctggcatggatgaagggagttgggtggctgacagaggggagtctcaacttggaacaagccaagaaggctggacagctggtcagcgagaaaaactaccggcagagggtcgatgagctgaagttcaccagcgtgaccgacagctcccagatggagcacgccaagaagagccaggagctacagagcggggtggcctacaaggcaggaaatgagcagtctgtccatcagtataccatcagcaaagacgagcctctcttcctgcaggcccgagccaatgctgcaaatctcagcgagaaactgtataagagcagctgggaaaaccagaaagcaaaagggtttgagctgcgtcttgattccttgaccttcctggcagccaaagccaagagggacctggctagcgaggtgaagtacaaggaggattatgagagatccagagggaagctcattggggcaaaagatgtacagggagattcgcaaatgagccactcactgcaaatgtccaagctgcagagtgagctggagtacaagaagggattcgaggacaccaaatcccaatgccacgtctccctggacatggtccacctcgtgcatgcccgcaaagctcagcatttagccacagacgtaggctacaagacagcggaacatcactttacggctttgcccacagacatgaaggtggaatgggccaagaaggcttatggcttacagagtgataaccaatacagggcagatgtgaagtggatgaaaggcatgggctgggtcgccaccgggtcattaaatgtggagcaggcgaagaaggcaggagaactcattagcgagaagaagtaccgtcagcatccagatgctttgaagtttaccagtattaaagacactccggagatggtccaggccagaattagttatacccaagcagtggatagattatacagggaacaaggagaaaacataaagcatcattacacaccgactgctgacctccctgaagtcctgctggccaagctgaatgccatgaatatcagtgagacgcgttataaggaatcctggagcaaacttcgagatggtggctataaactgaggttggatgcccttccattccaagcagcaaaggcttctggtgaaatcataagtgattacaaatacaaagaggcatttgagaaaatgaaaggacagatgcttggttcccggagcttggaagatgatatcagccttgcacattcagtgtatgcgacctcactgcagagtgatgtgaattacaagaaaggctttgaacactcaaaggcgcagttccatctgccgttggacatggccgccctggtgcatgccaagaaggctcagaccctggccagcaatcaggactacaaacatccactgccccagtacacttccttggcagaagacctgaggctgagctgtgccaagaaagctcacaaattgcagagtgagaatttgtaccggtcagacctgaactttatgcgaggtgttgcatgtgtcattccaggcacgttagagattgaagggaggaagaaagcatcggaactcatcagtgagagtaaatatcggcagcatccccactcattcaagtacacagctgtgacagacactcccaacctccttcatgcgaaattcagcaaccagataacgaatgagcgcctctataaagcagctggagaggatgcaagacacgagtatacaatgaccctgggtctgcccgagttcatccgagcaaaaacgaatgcagccaacctgagtgacgcaagatacaaagagtcctggcgtaatcttcgtgctcaaggctacaagctgacaatagaagcgctccccttccaggctgcccgggcctctggagatatagccagtgattttctctacagacatgactttgtgaaggagcgagggaaactcatagggccccagagtgtaagagacgacccccggatccagcactgccggcgcatgggccagctgcagagcgagcttcagtacaggaggggggcgaccagcagccaagcccagttccatctgcccatggacatggtgcacctggtccatgccaagaatgcccaggctctggccagcgaccacgactacaggacacagtatcacaagttcacagcactgcccgaggacctgaagatggcctgggccaagaaagcccatgccctgcagagtgagttgcgctacaagtcagacctgatcggcatgaagggcataggatggctggcgctgagatccccacagatggagagtgcaaagaaggctggagaactcatcagcgagaccaagtaccgtaaaaaaccagacagtatcaagttcaccacagtggttgactccccagacctggttcatgccaagaacagctatatgcactgcaatgagcgcatgtatagatctggagatgcagaatccctgcacagatacaccctgatccccgaccatcccgatttcacccgagctcgcctcaatgcgctgcatctgagtgacaaagtctacagaaactcctgggagcagacccgggctggcagttatgacttcaggctggatgccatccccttccagactgcccgggcatctagggagatcgccagtgatttccggtacaaagaggctttcctgcgggaccgaggcctgcagatcgggtaccgcagtgtcgacgatgacccaaggatgaagcatttcctcaacgttggcaggctccagagtgacaatgagtacaagaaggactttgccaagagtcggtcccagtttcacagcagcacagaccagcccggcctccttcaggccaagaggagccagcagctggccagtgatgtgcactacaggcagcccctgccccagcccacctgcgacccggagcagctgggcctcaggcatgctcagaaggcccaccagctgcagagtgatgtcaagtataaatcagacttgaacctgaccagaggtgttggctggacccctcctggctcctacaaagtggaaatggctcggcgggctgcggaactggccaacgcaaggggcctgggtctccagggagcttaccggggggcagaagcagtggaggctggagatcatcagagtggggaggtgaacccagatgccactgagattctgcacgtcaaaaagaagaaggccctgctgttgtgagccatgtccaccctgattcctgagaggccagagaggaagtttgttcaccagagacaggcttcagatggctttgatttcggcaagctggaatggcccaccagcccatcccagatcttcctttattaaaataataactctgaaa

SEQ ID NO: 158142 - DNA, 5426 bp, Homo sapiens
  Payload ID: 10962
  Gene Symbol: NRAP
  Gene Name: nebulin-related anchoring protein
  Uniprot ID: Q86VF7
  ENST ID: ENST00000360478
  CDS Start-End: 189-5276
aaaaaccatccaactgctgacttcaaactagaaggtcagcaaaggaaagtggaagttggattctgaaagatcgaggtgcccacaggaattttatggtcgtcggattttgaagacttgaactagactgggggttctccttgcatttcttgcctgttgcctatctttgtcctctctcttccggcttcgagatgaatgtgcagccctgttctaggtgtgggtatggggtttatcctgccgagaagatcagctgtatagatcagatatggcataaagcctgttttcactgtgaagtttgcaagatgatgctgtctgttaataactttgtgagtcaccagaaaaagccgtactgtcacgcccataaccctaagaacaacactttcaccagtgtctatcacactccattaaatctaaatgtgaggacatttccagaggccatcagtgggatccatgaccaagaagatggtgaacagtgtaaatcagtttttcactgggacatgaaatccaaggataaggaaggtgcacctaacaggcagccactggcaaatgagagagcctattggactggatatggggaagggaatgcttggtgcccaggagctctgccagaccccgaaattgtaaggatggttgaggctcgaaagtctcttggtgaggaatatacagaagactatgagcaacccaggggcaaggggagctttccagccatgatcacacctgcttatcaaagggccaagaaagccaaccagctggccagccaagtggagtataagagagggcatgatgaacgcatctccaggttctccacggtggtggatactcctgagctgctacggagcaaggctggggcacagcttcaaagtgatgtgagatacacagaggactatgaacaacaaagagggaaaggcagtttccctgcgatgatcacacccgcctatcagatagccaaaagagccaatgagctggcaagtgatgtgaggtaccatcaacaatatcaaaaagaaatgaggggaatggctggtccagccattggagctgagggcatcttgacaagggaatgtgcagaccaatatggccagggttacccggaggagtatgaggagcacaggggaaagggcagcttcccagctatgatcactccagcatatcagaacgccaagaaagctcacgaactcgctagtgacataaaatacaggcaggacttcaataagatgaaaggcgctgcacattatcactcgcttccagctcaagacaacttggttctcaaacaggctcagagcgtaaacaaactcgtgagtgagaataaatataaagaaaactaccagaaccacatgagaggccgctatgaaggagttggtatggacagacgcactctgcatgctatgaaagttggcagcctggcaagcaacgttgcctacaaagctgattataaacatgatattgtcgactacaactacccagccactctcacgccttcctatcaaacagctatgaaactggtgcccttgaaagatgccaattataggcagagcatcgacaagttgaagtacagctcggtgactgacaccccacagattgttcaagccaaaatcaatgcccagcagctgagtcatgtgaattaccgtgctgactatgagaaaaataagttgaattacacattgccccaggatgttcctcagctggtgaaggccaaaaccaatgccaaactcttcagtgaggttaagtataaagaaggctgggagaagacaaaggggaaaggatttgagatgaagctggatgccatgtctctgctggccgccaaagcctctggggagcttgctagcaatattaaatataaagaagaatatgaaaagacaaaaggcaaagccatgggaacagccgactctaggcttctgcactccctgcagattgctaagatgagcagtgaggttgaatataagaaaggctttgaagagagtaagacccggtttcacctgcccatggatatggtaaacatcaggcatgctaagaaggcccaaactctcgccagtgacctggactacaggaagaaactgcatgaatacactgtgctgcctgaagatatgaagactcagtgggccaagaaggcctatgggctccagagcgagctgcagtacaaggctgacctggcatggatgaagggagttgggtggctgacagaggggagtctcaacttggaacaagccaagaaggctggacagctggtcagcgagaaaaactaccggcagagggtcgatgagctgaagttcaccagcgtgaccgacagctcccagatggagcacgccaagaagagccaggagctacagagcggggtggcctacaaggcaggaaatgagcagtctgtccatcagtataccatcagcaaagacgagcctctcttcctgcaggcccgagccaatgctgcaaatctcagcgagaaactgtataagagcagctgggaaaaccagaaagcaaaagggtttgagctgcgtcttgattccttgaccttcctggcagccaaagccaagagggacctggctagcgaggtgaagtacaaggaggattatgagagatccagagggaagctcattggggcaaaagatgtacagggagattcgcaaatgagccactcactgcaaatgtccaagctgcagagtgagctggagtacaagaagggattcgaggacaccaaatcccaatgccacgtctccctggacatggtccacctcgtgcatgcccgcaaagctcagcatttagccacagacgtaggctacaagacagcggaacatcactttacggctttgcccacagacatgaaggtggaatgggccaagaaggcttatggcttacagagtgataaccaatacagggcagatgtgaagtggatgaaaggcatgggctgggtcgccaccgggtcattaaatgtggagcaggcgaagaaggcaggagaactcattagcgagaagaagtaccgtcagcatccagatgctttgaagtttaccagtattaaagacactccggagatggtccaggccagaattagttatacccaagcagtggatagattatacagggaacaaggagaaaacataaagcatcattacacaccgactgctgacctccctgaagtcctgctggccaagctgaatgccatgaatatcagtgagacgcgttataaggaatcctggagcaaacttcgagatggtggctataaactgaggttggatgcccttccattccaagcagcaaaggcttctggtgaaatcataagtgattacaaatacaaagaggcatttgagaaaatgaaaggacagatgcttggttcccggagcttggaagatgatatcagccttgcacattcagtgtatgcgacctcactgcagagtgatgtgaattacaagaaaggctttgaacactcaaaggcgcagttccatctgccgttggacatggccgccctggtgcatgccaagaaggctcagaccctggccagcaatcaggactacaaacatccactgccccagtacacttccttggcagaagacctgaggctgagctgtgccaagaaagctcacaaattgcagagtgagaatttgtaccggtcagacctgaactttatgcgaggtgttgcatgtgtcattccaggcacgttagagattgaagggaggaagaaagcatcggaactcatcagtgagagtaaatatcggcagcatccccactcattcaagtacacagctgtgacagacactcccaacctccttcatgcgaaattcagcaaccagataacgaatgagcgcctctataaagcagctggagaggatgcaagacacgagtatacaatgaccctgggtctgcccgagttcatccgagcaaaaacgaatgcagccaacctgagtgacgcaagatacaaagagtcctggcgtaatcttcgtgctcaaggctacaagctgacaatagaagcgctccccttccaggctgcccgggcctctggagatatagccagtgattttctctacagacatgactttgtgaaggagcgagggaaactcatagggccccagagtgtaagagacgacccccggatccagcactgccggcgcatgggccagctgcagagcgagcttcagtacaggaggggggcgaccagcagccaagcccagttccatctgcccatggacatggtgcacctggtccatgccaagaatgcccaggctctggccagcgaccacgactacaggacacagtatcacaagttcacagcactgcccgaggacctgaagatggcctgggccaagaaagcccatgccctgcagagtgagttgcgctacaagtcagacctgatcggcatgaagggcataggatggctggcgctgagatccccacagatggagagtgcaaagaaggctggagaactcatcagcgagaccaagtaccgtaaaaaaccagacagtatcaagttcaccacagtggttgactccccagacctggttcatgccaagaacagctatatgcactgcaatgagcgcatgtatagatctggagatgcagaatccctgcacagatacaccctgatccccgaccatcccgatttcacccgagctcgcctcaatgcgctgcatctgagtgacaaagtctacagaaactcctgggagcagacccgggctggcagttatgacttcaggctggatgccatccccttccagactgcccgggcatctagggagatcgccagtgatttccggtacaaagaggctttcctgcgggaccgaggcctgcagatcgggtaccgcagtgtcgacgatgacccaaggatgaagcatttcctcaacgttggcaggctccagagtgacaatgagtacaagaaggactttgccaagagtcggtcccagtttcacagcagcacagaccagcccggcctccttcaggccaagaggagccagcagctggccagtgatgtgcactacaggcagcccctgccccagcccacctgcgacccggagcagctgggcctcaggcatgctcagaaggcccaccagctgcagagtgatgtcaagtataaatcagacttgaacctgaccagaggtgttggctggacccctcctggctcctacaaagtggaaatggctcggcgggctgcggaactggccaacgcaaggggcctgggtctccagggagcttaccggggggcagaagcagtggaggctggagatcatcagagtggggaggtgaacccagatgccactgagattctgcacgtcaaaaagaagaaggccctgctgttgtgagccatgtccaccctgattcctgagaggccagagaggaagtttgttcaccagagacaggcttcagatggctttgatttcggcaagctggaatggcccaccagcccatcccagatcttcctttattaaaataataactctgaaagcagatgg

SEQ ID NO: 158143 - DNA, 5534 bp, Homo sapiens
  Payload ID: 10962
  Gene Symbol: NRAP
  Gene Name: nebulin-related anchoring protein
  ENST ID: ENST00000369358
  CDS Start-End: 189-5384
aaaaaccatccaactgctgacttcaaactagaaggtcagcaaaggaaagtggaagttggattctgaaagatcgaggtgcccacaggaattttatggtcgtcggattttgaagacttgaactagactgggggttctccttgcatttcttgcctgttgcctatctttgtcctctctcttccggcttcgagatgaatgtgcagccctgttctaggtgtgggtatggggtttatcctgccgagaagatcagctgtatagatcagatatggcataaagcctgttttcactgtgaagtttgcaagatgatgctgtctgttaataactttgtgagtcaccagaaaaagccgtactgtcacgcccataaccctaagaacaacactttcaccagtgtctatcacactccattaaatctaaatgtgaggacatttccagaggccatcagtgggatccatgaccaagaagatggtgaacagtgtaaatcagtttttcactgggacatgaaatccaaggataaggaaggtgcacctaacaggcagccactggcaaatgagagagcctattggactggatatggggaagggaatgcttggtgcccaggagctctgccagaccccgaaattgtaaggatggttgaggctcgaaagtctcttggtgaggaatatacagaagactatgagcaacccaggggcaaggggagctttccagccatgatcacacctgcttatcaaagggccaagaaagccaaccagctggccagccaagtggagtataagagagggcatgatgaacgcatctccaggttctccacggtggtggatactcctgagctgctacggagcaaggctggggcacagcttcaaagtgatgtgagatacacagaggactatgaacaacaaagagggaaaggcagtttccctgcgatgatcacacccgcctatcagatagccaaaagagccaatgagctggcaagtgatgtgaggtaccatcaacaatatcaaaaagaaatgaggggaatggctggtccagccattggagctgagggcatcttgacaagggaatgtgcagaccaatatggccagggttacccggaggagtatgaggagcacaggggaaagggcagcttcccagctatgatcactccagcatatcagaacgccaagaaagctcacgaactcgctagtgacataaaatacaggcaggacttcaataagatgaaaggcgctgcacattatcactcgcttccagctcaagacaacttggttctcaaacaggctcagagcgtaaacaaactcgtgagtgaggtggagtataagaaggatctggaaagtagtagaggtcacagtatcaactactgtgaaacacctcaattcaggaacgtgagcaagatctcaaaatttaccagtgataataaatataaagaaaactaccagaaccacatgagaggccgctatgaaggagttggtatggacagacgcactctgcatgctatgaaagttggcagcctggcaagcaacgttgcctacaaagctgattataaacatgatattgtcgactacaactacccagccactctcacgccttcctatcaaacagctatgaaactggtgcccttgaaagatgccaattataggcagagcatcgacaagttgaagtacagctcggtgactgacaccccacagattgttcaagccaaaatcaatgcccagcagctgagtcatgtgaattaccgtgctgactatgagaaaaataagttgaattacacattgccccaggatgttcctcagctggtgaaggccaaaaccaatgccaaactcttcagtgaggttaagtataaagaaggctgggagaagacaaaggggaaaggatttgagatgaagctggatgccatgtctctgctggccgccaaagcctctggggagcttgctagcaatattaaatataaagaagaatatgaaaagacaaaaggcaaagccatgggaacagccgactctaggcttctgcactccctgcagattgctaagatgagcagtgaggttgaatataagaaaggctttgaagagagtaagacccggtttcacctgcccatggatatggtaaacatcaggcatgctaagaaggcccaaactctcgccagtgacctggactacaggaagaaactgcatgaatacactgtgctgcctgaagatatgaagactcagtgggccaagaaggcctatgggctccagagcgagctgcagtacaaggctgacctggcatggatgaagggagttgggtggctgacagaggggagtctcaacttggaacaagccaagaaggctggacagctggtcagcgagaaaaactaccggcagagggtcgatgagctgaagttcaccagcgtgaccgacagctcccagatggagcacgccaagaagagccaggagctacagagcggggtggcctacaaggcaggaaatgagcagtctgtccatcagtataccatcagcaaagacgagcctctcttcctgcaggcccgagccaatgctgcaaatctcagcgagaaactgtataagagcagctgggaaaaccagaaagcaaaagggtttgagctgcgtcttgattccttgaccttcctggcagccaaagccaagagggacctggctagcgaggtgaagtacaaggaggattatgagagatccagagggaagctcattggggcaaaagatgtacagggagattcgcaaatgagccactcactgcaaatgtccaagctgcagagtgagctggagtacaagaagggattcgaggacaccaaatcccaatgccacgtctccctggacatggtccacctcgtgcatgcccgcaaagctcagcatttagccacagacgtaggctacaagacagcggaacatcactttacggctttgcccacagacatgaaggtggaatgggccaagaaggcttatggcttacagagtgataaccaatacagggcagatgtgaagtggatgaaaggcatgggctgggtcgccaccgggtcattaaatgtggagcaggcgaagaaggcaggagaactcattagcgagaagaagtaccgtcagcatccagatgctttgaagtttaccagtattaaagacactccggagatggtccaggccagaattagttatacccaagcagtggatagattatacagggaacaaggagaaaacataaagcatcattacacaccgactgctgacctccctgaagtcctgctggccaagctgaatgccatgaatatcagtgagacgcgttataaggaatcctggagcaaacttcgagatggtggctataaactgaggttggatgcccttccattccaagcagcaaaggcttctggtgaaatcataagtgattacaaatacaaagaggcatttgagaaaatgaaaggacagatgcttggttcccggagcttggaagatgatatcagccttgcacattcagtgtatgcgacctcactgcagagtgatgtgaattacaagaaaggctttgaacactcaaaggcgcagttccatctgccgttggacatggccgccctggtgcatgccaagaaggctcagaccctggccagcaatcaggactacaaacatccactgccccagtacacttccttggcagaagacctgaggctgagctgtgccaagaaagctcacaaattgcagagtgagaatttgtaccggtcagacctgaactttatgcgaggtgttgcatgtgtcattccaggcacgttagagattgaagggaggaagaaagcatcggaactcatcagtgagagtaaatatcggcagcatccccactcattcaagtacacagctgtgacagacactcccaacctccttcatgcgaaattcagcaaccagataacgaatgagcgcctctataaagcagctggagaggatgcaagacacgagtatacaatgaccctgggtctgcccgagttcatccgagcaaaaacgaatgcagccaacctgagtgacgcaagatacaaagagtcctggcgtaatcttcgtgctcaaggctacaagctgacaatagaagcgctccccttccaggctgcccgggcctctggagatatagccagtgattttctctacagacatgactttgtgaaggagcgagggaaactcatagggccccagagtgtaagagacgacccccggatccagcactgccggcgcatgggccagctgcagagcgagcttcagtacaggaggggggcgaccagcagccaagcccagttccatctgcccatggacatggtgcacctggtccatgccaagaatgcccaggctctggccagcgaccacgactacaggacacagtatcacaagttcacagcactgcccgaggacctgaagatggcctgggccaagaaagcccatgccctgcagagtgagttgcgctacaagtcagacctgatcggcatgaagggcataggatggctggcgctgagatccccacagatggagagtgcaaagaaggctggagaactcatcagcgagaccaagtaccgtaaaaaaccagacagtatcaagttcaccacagtggttgactccccagacctggttcatgccaagaacagctatatgcactgcaatgagcgcatgtatagatctggagatgcagaatccctgcacagatacaccctgatccccgaccatcccgatttcacccgagctcgcctcaatgcgctgcatctgagtgacaaagtctacagaaactcctgggagcagacccgggctggcagttatgacttcaggctggatgccatccccttccagactgcccgggcatctagggagatcgccagtgatttccggtacaaagaggctttcctgcgggaccgaggcctgcagatcgggtaccgcagtgtcgacgatgacccaaggatgaagcatttcctcaacgttggcaggctccagagtgacaatgagtacaagaaggactttgccaagagtcggtcccagtttcacagcagcacagaccagcccggcctccttcaggccaagaggagccagcagctggccagtgatgtgcactacaggcagcccctgccccagcccacctgcgacccggagcagctgggcctcaggcatgctcagaaggcccaccagctgcagagtgatgtcaagtataaatcagacttgaacctgaccagaggtgttggctggacccctcctggctcctacaaagtggaaatggctcggcgggctgcggaactggccaacgcaaggggcctgggtctccagggagcttaccagcggggggcagaagcagtggaggctggagatcatcagagtggggaggtgaacccagatgccactgagattctgcacgtcaaaaagaagaaggccctgctgttgtgagccatgtccaccctgattcctgagaggccagagaggaagtttgttcaccagagacaggcttcagatggctttgatttcggcaagctggaatggcccaccagcccatcccagatcttcctttattaaaataataactctgaaagcagatgg

SEQ ID NO: 158144 - DNA, 5535 bp, Homo sapiens
  Payload ID: 10962
  Gene Symbol: NRAP
  Gene Name: nebulin-related anchoring protein
  Uniprot ID: Q86VF7
  ENST ID: ENST00000369360
  CDS Start-End: 165-5276
aaactagaaggtcagcaaaggaaagtggaagttggattctgaaagatcgaggtgcccacaggaattttatggtcgtcggattttgaagacttgaactagactgggggttctccttgcatttcttgcctgttgcctatctttgtcctctctcttccggcttcgagatgaatgtgcagccctgttctaggtgtgggtatggggtttatcctgccgagaagatcagctgtatagatcagatatggcataaagcctgttttcactgtgaagtttgcaagatgatgctgtctgttaataactttgtgagtcaccagaaaaagccgtactgtcacgcccataaccctaagaacaacactttcaccagtgtctatcacactccattaaatctaaatgtgaggacatttccagaggccatcagtgggatccatgaccaagaagatggtgaacagtgtaaatcagtttttcactgggacatgaaatccaaggataaggaaggtgcacctaacaggcagccactggcaaatgagagagcctattggactggatatggggaagggaatgcttggtgcccaggagctctgccagaccccgaaattgtaaggatggttgaggctcgaaagtctcttggtgaggaatatacagaagactatgagcaacccaggggcaaggggagctttccagccatgatcacacctgcttatcaaagggccaagaaagccaaccagctggccagccaagtggagtataagagagggcatgatgaacgcatctccaggttctccacggtggtggatactcctgagctgctacggagcaaggctggggcacagcttcaaagtgatgtgagatacacagaggactatgaacaacaaagagggaaaggcagtttccctgcgatgatcacacccgcctatcagatagccaaaagagccaatgagctggcaagtgatgtgaggtaccatcaacaatatcaaaaagaaatgaggggaatggctggtccagccattggagctgagggcatcttgacaagggaatgtgcagaccaatatggccagggttacccggaggagtatgaggagcacaggggaaagggcagcttcccagctatgatcactccagcatatcagaacgccaagaaagctcacgaactcgctagtgacataaaatacaggcaggacttcaataagatgaaaggcgctgcacattatcactcgcttccagctcaagacaacttggttctcaaacaggctcagagcgtaaacaaactcgtgagtgagaataaatataaagaaaactaccagaaccacatgagaggccgctatgaaggagttggtatggacagacgcactctgcatgctatgaaagttggcagcctggcaagcaacgttgcctacaaagctgattataaacatgatattgtcgactacaactacccagccactctcacgccttcctatcaaacagctatgaaactggtgcccttgaaagatgccaattataggcagagcatcgacaagttgaagtacagctcggtgactgacaccccacagattgttcaagccaaaatcaatgcccagcagctgagtcatgtgaattaccgtgctgactatgagaaaaataagttgaattacacattgccccaggatgttcctcagctggtgaaggccaaaaccaatgccaaactcttcagtgaggttaagtataaagaaggctgggagaagacaaaggggaaaggatttgagatgaagctggatgccatgtctctgctggccgccaaagcctctggggagcttgctagcaatgtacaccttcttctttctctcaagattaaatataaagaagaatatgaaaagacaaaaggcaaagccatgggaacagccgactctaggcttctgcactccctgcagattgctaagatgagcagtgaggttgaatataagaaaggctttgaagagagtaagacccggtttcacctgcccatggatatggtaaacatcaggcatgctaagaaggcccaaactctcgccagtgacctggactacaggaagaaactgcatgaatacactgtgctgcctgaagatatgaagactcagtgggccaagaaggcctatgggctccagagcgagctgcagtacaaggctgacctggcatggatgaagggagttgggtggctgacagaggggagtctcaacttggaacaagccaagaaggctggacagctggtcagcgagaaaaactaccggcagagggtcgatgagctgaagttcaccagcgtgaccgacagctcccagatggagcacgccaagaagagccaggagctacagagcggggtggcctacaaggcaggaaatgagcagtctgtccatcagtataccatcagcaaagacgagcctctcttcctgcaggcccgagccaatgctgcaaatctcagcgagaaactgtataagagcagctgggaaaaccagaaagcaaaagggtttgagctgcgtcttgattccttgaccttcctggcagccaaagccaagagggacctggctagcgaggtgaagtacaaggaggattatgagagatccagagggaagctcattggggcaaaagatgtacagggagattcgcaaatgagccactcactgcaaatgtccaagctgcagagtgagctggagtacaagaagggattcgaggacaccaaatcccaatgccacgtctccctggacatggtccacctcgtgcatgcccgcaaagctcagcatttagccacagacgtaggctacaagacagcggaacatcactttacggctttgcccacagacatgaaggtggaatgggccaagaaggcttatggcttacagagtgataaccaatacagggcagatgtgaagtggatgaaaggcatgggctgggtcgccaccgggtcattaaatgtggagcaggcgaagaaggcaggagaactcattagcgagaagaagtaccgtcagcatccagatgctttgaagtttaccagtattaaagacactccggagatggtccaggccagaattagttatacccaagcagtggatagattatacagggaacaaggagaaaacataaagcatcattacacaccgactgctgacctccctgaagtcctgctggccaagctgaatgccatgaatatcagtgagacgcgttataaggaatcctggagcaaacttcgagatggtggctataaactgaggttggatgcccttccattccaagcagcaaaggcttctggtgaaatcataagtgattacaaatacaaagaggcatttgagaaaatgaaaggacagatgcttggttcccggagcttggaagatgatatcagccttgcacattcagtgtatgcgacctcactgcagagtgatgtgaattacaagaaaggctttgaacactcaaaggcgcagttccatctgccgttggacatggccgccctggtgcatgccaagaaggctcagaccctggccagcaatcaggactacaaacatccactgccccagtacacttccttggcagaagacctgaggctgagctgtgccaagaaagctcacaaattgcagagtgagaatttgtaccggtcagacctgaactttatgcgaggtgttgcatgtgtcattccaggcacgttagagattgaagggaggaagaaagcatcggaactcatcagtgagagtaaatatcggcagcatccccactcattcaagtacacagctgtgacagacactcccaacctccttcatgcgaaattcagcaaccagataacgaatgagcgcctctataaagcagctggagaggatgcaagacacgagtatacaatgaccctgggtctgcccgagttcatccgagcaaaaacgaatgcagccaacctgagtgacgcaagatacaaagagtcctggcgtaatcttcgtgctcaaggctacaagctgacaatagaagcgctccccttccaggctgcccgggcctctggagatatagccagtgattttctctacagacatgactttgtgaaggagcgagggaaactcatagggccccagagtgtaagagacgacccccggatccagcactgccggcgcatgggccagctgcagagcgagcttcagtacaggaggggggcgaccagcagccaagcccagttccatctgcccatggacatggtgcacctggtccatgccaagaatgcccaggctctggccagcgaccacgactacaggacacagtatcacaagttcacagcactgcccgaggacctgaagatggcctgggccaagaaagcccatgccctgcagagtgagttgcgctacaagtcagacctgatcggcatgaagggcataggatggctggcgctgagatccccacagatggagagtgcaaagaaggctggagaactcatcagcgagaccaagtaccgtaaaaaaccagacagtatcaagttcaccacagtggttgactccccagacctggttcatgccaagaacagctatatgcactgcaatgagcgcatgtatagatctggagatgcagaatccctgcacagatacaccctgatccccgaccatcccgatttcacccgagctcgcctcaatgcgctgcatctgagtgacaaagtctacagaaactcctgggagcagacccgggctggcagttatgacttcaggctggatgccatccccttccagactgcccgggcatctagggagatcgccagtgatttccggtacaaagaggctttcctgcgggaccgaggcctgcagatcgggtaccgcagtgtcgacgatgacccaaggatgaagcatttcctcaacgttggcaggctccagagtgacaatgagtacaagaaggactttgccaagagtcggtcccagtttcacagcagcacagaccagcccggcctccttcaggccaagaggagccagcagctggccagtgatgtgcactacaggcagcccctgccccagcccacctgcgacccggagcagctgggcctcaggcatgctcagaaggcccaccagctgcagagtgatgtcaagtataaatcagacttgaacctgaccagaggtgttggctggacccctcctggctcctacaaagtggaaatggctcggcgggctgcggaactggccaacgcaaggggcctgggtctccagggagcttaccggggggcagaagcagtggaggctggagatcatcagagtggggaggtgaacccagatgccactgagattctgcacgtcaaaaagaagaaggccctgctgttgtgagccatgtccaccctgattcctgagaggccagagaggaagtttgttcaccagagacaggcttcagatggctttgatttcggcaagctggaatggcccaccagcccatcccagatcttcctttattaaaataataactctgaaagcagatggagaatgttgtatttgtggtcctctctgatacctagacgtggatggctgattctgttgagtgcctcgagtgtctgggctgaggaataaagatgtgatggtggttcccgct

SEQ ID NO: 158145 - DNA, 2587 bp, Homo sapiens
  Payload ID: 10963
  Gene Symbol: NECAP1
  Gene Name: NECAP endocytosis associated 1
  Uniprot ID: Q8NC96
  ENST ID: ENST00000339754
  CDS Start-End: 79-906
gcgctttgcatctccgcctcccgtgctccgcctccggtcttacgtttcgcccccggcagcgccgacagcggacccaagatggcgaccgagttggagtacgagtctgtgctgtgtgtgaagccagacgtcagcgtctaccggattccgccccgggcctccaaccgcggttacagggcctctgactggaaattagaccagcctgattggactggtcgcctccgaatcacttcaaaagggaagactgcctatatcaaactcgaggataaagtttcaggggagctctttgctcaggcaccagtagaacaatatcctggtattgctgtggagacggtgacagattctagccgctactttgtaatccggatccaggatggtactgggcgcagtgctttcattggcattggcttcacagatcggggagatgccttcgactttaatgtctccttgcaggatcacttcaagtgggtaaagcaggaatctgagatttccaaggaatctcaagaaatggatgctcgtcctaagttggatctgggcttcaaggaaggacaaaccatcaagttgtgtatcgggaacattacaaacaagaaaggaggtgcttctaagcccaggactgcaaggggtgggggtctgagcttactcccacccccgccaggaggcaaagtcactattcccccaccatcctcctcagttgccatcagcaatcatgtcaccccaccacccattccgaaatctaaccatggaggcagtgatgcagatatccttttagatttggattctcctgctcctgtcacgacaccagcaccaactccagtttctgtaagcaatgacttgtggggagacttcagcactgcctccagctctgttccaaaccaggcaccacagccatccaactgggtccagttctgaatggcattggcaggacattaaggacagacttgaggaataaaaatgaccttgagggcaccaatctgtgagggaagttaggaacccatttcctccccagaaccagaatgactggacaatctttttcatagcttctccatcacattcaagctggtttatgtcactcccctgtgttgttacttgtacagccaagaaagtatctgttatctcctgcgtagtaccaaggtaggggactagtggatcttatcatagttttggctgactatgcagggcttaaaaggccagcgtctgtttgagggggaatgacctctaacatctgtaaaatttgtctcatcttttaatttctttaacttatttcaaaatcatctcatgacccttgtgtgcctctttgtgaagccctatttagcaatttcaggggagtcaaaaaccttgcaacttccttctccactaacccaggactaaaaatggacaggctgacctcagtgtttacaaattcagaattttgataggggtagatatggagaaagacctatttcctgggtctctgctgtgtagtctccttcaggcttattgtgctcagtgaacatccagtgctgggtgcagctccatcaccctcttgtgtgtttacatgtctctttctatgataagagggttgtgttggtggcacctccactactcttttctgtttgttgagtttgaattgtgttaacatctttgatcagtgggtgtatctgtaatgaaggaggttcaagaggctgtgctttccaagtgatagtctataggagtgtttaatttcttgcagctccatctggttgctgcatttgaagcatggcattaatttgtatttgccctgttctttgacctaaagttgaagggtttagagtttttaacctgatctgtagagcagagaggttgaaagcacttaactcttgtttagtatcctcattgccttgctgcctgggtatctggcccctttccataaacatttcttttcagttcatgtagttctttaatagaaagctgctattatgtatattgtcatttgtgaaggaagttggagagtcacagctttactgtgacaggttttgcccaaggctttgatacctgtcacccagggtatcttaaaagcaagttgttctcccactactttcctttccctctgccctgccattcctattacaatgctgtgaaaaaagttctgcttcttaggtgaatgggtactttctattttgtttctaaacgagcaattttgaggatgaaatgggaagatatcattgcttcctttttgcacctattgggtatgtacactctggccgaagggagtccttatgtttagtttcaaaatatattactttcctggattctcttcttcactttttctgactttgggtccattttcttttcattgcctccttttccaggcagctctattcttgcagagccatagcaggacatgttaaaattccaatagaaaacactaaaaggaaagtctgtggaatcactagtgactaaatactgggaacctattttctcaatcttcctccatgttgtgttctttgtattcttgagatgataatatattatgtatttgaattcctgaaaaatggaaaatgtttaagatatatgtatataaagtgtatgctgtattggtgcaataatggtaattaaaaatatgaaaaaagtg

SEQ ID NO: 158146 - DNA, 2446 bp, Homo sapiens
  Payload ID: 10963
  Gene Symbol: NECAP1
  Gene Name: NECAP endocytosis associated 1
  Uniprot ID: Q8NC96
  ENST ID: ENST00000450991
  CDS Start-End: 22-330
agcgccgacagcggacccaagatggcgaccgagttggagtacgagtctgtgctgtgtgtgaagccagacgtcagcgtctaccggattccgccccgggcctccaaccgcggttacagggcctctgactggaaattagaccagcctgattggactggtcgcctccgaatcacttcaaaagggaagactgcctatatcaaactcgaggataaagtttcaggggagctctttgctcaggcaccagtagaacaatatcctggtattgctgtggagacggtgacagattctagccgctactttgtaatccggatccaggatggtactggtgggtaaagcaggaatctgagatttccaaggaatctcaagaaatggatgctcgtcctaagttggatctgggcttcaaggaaggacaaaccatcaagttgtgtatcgggaacattacaaacaagaaaggaggtgcttctaagcccaggactgcaaggggtgggggtctgagcttactcccacccccgccaggaggcaaagtcactattcccccaccatcctcctcagttgccatcagcaatcatgtcaccccaccacccattccgaaatctaaccatggaggcagtgatgcagatatccttttagatttggattctcctgctcctgtcacgacaccagcaccaactccagtttctgtaagcaatgacttgtggggagacttcagcactgcctccagctctgttccaaaccaggcaccacagccatccaactgggtccagttctgaatggcattggcaggacattaaggacagacttgaggaataaaaatgaccttgagggcaccaatctgtgagggaagttaggaacccatttcctccccagaaccagaatgactggacaatctttttcatagcttctccatcacattcaagctggtttatgtcactcccctgtgttgttacttgtacagccaagaaagtatctgttatctcctgcgtagtaccaaggtaggggactagtggatcttatcatagttttggctgactatgcagggcttaaaaggccagcgtctgtttgagggggaatgacctctaacatctgtaaaatttgtctcatcttttaatttctttaacttatttcaaaatcatctcatgacccttgtgtgcctctttgtgaagccctatttagcaatttcaggggagtcaaaaaccttgcaacttccttctccactaacccaggactaaaaatggacaggctgacctcagtgtttacaaattcagaattttgataggggtagatatggagaaagacctatttcctgggtctctgctgtgtagtctccttcaggcttattgtgctcagtgaacatccagtgctgggtgcagctccatcaccctcttgtgtgtttacatgtctctttctatgataagagggttgtgttggtggcacctccactactcttttctgtttgttgagtttgaattgtgttaacatctttgatcagtgggtgtatctgtaatgaaggaggttcaagaggctgtgctttccaagtgatagtctataggagtgtttaatttcttgcagctccatctggttgctgcatttgaagcatggcattaatttgtatttgccctgttctttgacctaaagttgaagggtttagagtttttaacctgatctgtagagcagagaggttgaaagcacttaactcttgtttagtatcctcattgccttgctgcctgggtatctggcccctttccataaacatttcttttcagttcatgtagttctttaatagaaagctgctattatgtatattgtcatttgtgaaggaagttggagagtcacagctttactgtgacaggttttgcccaaggctttgatacctgtcacccagggtatcttaaaagcaagttgttctcccactactttcctttccctctgccctgccattcctattacaatgctgtgaaaaaagttctgcttcttaggtgaatgggtactttctattttgtttctaaacgagcaattttgaggatgaaatgggaagatatcattgcttcctttttgcacctattgggtatgtacactctggccgaagggagtccttatgtttagtttcaaaatatattactttcctggattctcttcttcactttttctgactttgggtccattttcttttcattgcctccttttccaggcagctctattcttgcagagccatagcaggacatgttaaaattccaatagaaaacactaaaaggaaagtctgtggaatcactagtgactaaatactgggaacctattttctcaatcttcctccatgttgtgttctttgtattcttgagatgataatatattatgtatttgaattcctgaaaaatggaaaatgtttaagatatatgtatataaagtgtatgctgtattggtgcaataatggtaattaaaaatatgaaaaaag

SEQ ID NO: 158147 - DNA, 863 bp, Homo sapiens
  Payload ID: 10963
  Gene Symbol: NECAP1
  Gene Name: NECAP endocytosis associated 1
  ENST ID: ENST00000540083
  CDS Start-End: 514-863
cacacacacacacacacacacacacacacacctttccagttccccatgcacatttatgggtaatcgtgttgcttgccactctggattatctgatttattttttgtactgttgtcaatttcgtcaccaactgtcatcatccaccattcggtttttccttcagcagttttaccagtgagcaaagggcctctgactggaaattagaccagcctgattggactggtcgcctccgaatcacttcaaaagggaagactgcctatatcaaactcgaggataaagtttcaggggagctctttgctcaggcaccagtagaacaatatcctggtattgctgtggagacggtgacagattctagccgctactttgtaatccggatccaggatggtactgggcgcagtgctttcattggcattggcttcacagatcggggagatgccttcgactttaatgtctccttgcaggatcacttcaagtgggtaaagcaggaatctgagatttccaaggaatctcaagaaatggatgctcgtcctaagttggatctgggcttcaaggaaggacaaaccatcaagttgtgtatcgggaacattacaaacaagaaaggaggtgcttctaagcccaggactgcaaggggtgggggtctgagcttactcccacccccgccaggaggcaaagtcactattcccccaccatcctcctcagttgccatcagcaatcatgtcaccccaccacccattccgaaatctaaccatggaggcagtgatgcagatatccttttagatttggattctcctgctcctgtcacgacaccagcaccaactccagtttctgtaagcaatgacttgtggggagacttcagcactgcctc

SEQ ID NO: 158148 - DNA, 582 bp, Homo sapiens
  Payload ID: 10963
  Gene Symbol: NECAP1
  Gene Name: NECAP endocytosis associated 1
  ENST ID: ENST00000541948
  CDS Start-End: 8-340
acccaagatggcgaccgagttggagtacgagtctgtgctgtgtgtgaagccagacgtcagcgtctaccggattccgccccgggcctccaaccgcggttacagggcctctgactggaaattagaccagcctgattggactggtcgcctccgaatcacttcaaaagggaagactgcctatatcaaactcgaggataaagtttcaggggagctctttgctcaggcaccagtagaacaatatcctggtattgctgtggagacggtgacagattctagccgctactttgtaatccggatccaggatggtactgaacattacaaacaagaaaggaggtgcttctaagcccaggactgcaaggggtgggggtctgagcttactcccacccccgccaggaggcaaagtcactattcccccaccatcctcctcagttgccatcagcaatcatgtcaccccaccacccattccgaaatctaaccatggaggcagtgatgcagatatccttttagatttggattctcctgctcctgtcacgacaccagcaccaactccagtttctgtaagcaatgacttgtggggagacttca

SEQ ID NO: 158149 - DNA, 2070 bp, Homo sapiens
  Payload ID: 10964
  Gene Symbol: NECAP2
  Gene Name: NECAP endocytosis associated 2
  Uniprot ID: Q9NVZ3
  ENST ID: ENST00000337132
  CDS Start-End: 91-882
gaaacctggtcagagagtcgcaccgcttccgtccgtcggacagaggaacggtggaagtcgccggaagttcggtgggctccaggcgtcgcgatggaggagagcgggtacgagtcggtgctctgtgtcaagcctgacgtccacgtctaccgcatccctccgcgggctaccaaccgtggctacagggctgcggagtggcagctggaccagccatcatggagtggccggctgaggatcactgcaaagggacagatggcctacatcaagctggaggacaggacgtcaggggagctctttgctcaggccccggtggatcagtttcctggcacagctgtggagagtgtgacggattccagcaggtacttcgtgatccgcatcgaagatggaaatgggcgacgggcgtttattggaattggcttcggggaccgaggtgatgcctttgacttcaatgttgcattgcaggaccatttcaagtgggtgaaacagcagtgtgaatttgcaaaacaagcccagaacccagaccaaggccctaaactggacctgggcttcaaggagggccagaccatcaagctcaacatcgcaaacatgaagaagaaggaaggagcagctgggaatccccgagtccggcctgccagcacaggagggctgagcctgcttccccctcccccaggggggaaaacctccaccctgatccctccccctggggagcagttggctgtggggggatccctcgtccagccagcagttgctcccagttcaggaggtgctcctgtaccctggccacagcccaatcctgccactgctgacatctggggagactttaccaaatctacaggatcaacttccagccagacccagccaggcacaggctgggtccagttctgacctgagcacggtttttcctcatgtgacttctgggaaggcgctccctcatctgggccaaaggaaggaggacgaagccctcctcagctggcctgtgtttggggcatgaatctctcctctcctccttgtctggctctgttgacaaaccgggcatgtttggcagtaaattggcaccgtgtcacactgtttcctgggattcaagtatgcaaccagaacacaggagaagaaaagctccaggatccctgtccccatctgtcctcttgatgtgagagagactctgagacttcttccatcgcaatgacctgtattaaacacaagccccccaagcaaaagaagaggttgagtttgctgccaggattcagatcagcccttcccagggtctgcaggtgtcacatgatcacagttcagcgggaggctttccgtacccacactggctgtagccacttcagtccatctgccctccagaggaggggtttcttcctgatttttagcaggtttagaggctgcagcttgagctacaatcaggagggaaattggaaggattagcagcttttaaaaatgtttaaatattttgctttgctaatgtgctgatccgcactaactcatctttgcaaaaggaactgctccctcggcgtgccccagctggggcctctgaagggattcctcactgtgggcagctgccctgagcttcaggcagcagtgtttatctctggccagttgtctggtttccatgtattctaggccaggtaggcaacacagagccaaggcgggtgctggaagccagacggaacagtgttggggcaggaaggtggatgctgttgtcatggagctgtgggagttggcactctgtctgctggtggccctctcggctcacatgttcacagtgcagctcctggcagacttgggttttctctttggtggtttctaaagtgccttatctgcaaacaacttcttttctccttcaggaactgtgaatggctagaagaaggagctcagtaaactagaagtccagggttgcttggtttactggtttataagaaatctgaaagcacctctgacattccttttattaactcacctctcagttgaaagatttcttctttgaaaggtcaagaccgtgaactgaaaaaagtgttggcctttttgcgggaccagatttttaagataaaataaatatttttacttctgtca

SEQ ID NO: 158150 - DNA, 1929 bp, Homo sapiens
  Payload ID: 10964
  Gene Symbol: NECAP2
  Gene Name: NECAP endocytosis associated 2
  Uniprot ID: Q9NVZ3
  ENST ID: ENST00000443980
  CDS Start-End: 27-848
aagttcggtgggctccaggcgtcgcgatggaggagagcgggtacgagtcggtgctctgtgtcaagcctgacgtccacgtctaccgcatccctccgcgggctaccaaccgtggctacagggctgcggagtggcagctggaccagccatcatggagtggccggctgaggatcactgcaaagggacagatggcctacatcaagctggaggacaggacgtcaggggagctctttgctcaggccccggtggatcagtttcctggcacagctgtggagagtgtgacggattccagcaggtacttcgtgatccgcatcgaagatggaaatgggcgacgggcgtttattggaattggcttcggggaccgaggtgatgcctttgacttcaatgttgcattgcaggaccatttcaagtgggtgaaacagcagtgtgaatttgcaaaacaagcccagaacccagaccaaggccctaaactggacctgggcttcaaggagggccagaccatcaagctcaacatcgcaaacatgaagaagaaggaaggagcagctgggaatccccgagtccggcctgccagcacaggagggctgagcctgcttccccctcccccaggggggaaaacctccaccctgatccctccccctggggagcagttggctgtggggggatccctcgtccagccagcagttgctcccagttcagatcaacttccagccagacccagccaggcacaggctgggtccagttctgacctgagcacggtttttcctcatgtgacttctgggaaggcgctccctcatctgggccaaaggaaggaggacgaagccctcctcagctggcctgtgtttggggcatgaatctctcctctcctccttgtctggctctgttgacaaaccgggcatgtttggcagtaaattggcaccgtgtcacactgtttcctgggattcaagtatgcaaccagaacacaggagaagaaaagctccaggatccctgtccccatctgtcctcttgatgtgagagagactctgagacttcttccatcgcaatgacctgtattaaacacaagccccccaagcaaaagaagaggttgagtttgctgccaggattcagatcagcccttcccagggtctgcaggtgtcacatgatcacagttcagcgggaggctttccgtacccacactggctgtagccacttcagtccatctgccctccagaggaggggtttcttcctgatttttagcaggtttagaggctgcagcttgagctacaatcaggagggaaattggaaggattagcagcttttaaaaatgtttaaatattttgctttgctaatgtgctgatccgcactaactcatctttgcaaaaggaactgctccctcggcgtgccccagctggggcctctgaagggattcctcactgtgggcagctgccctgagcttcaggcagcagtgtttatctctggccagttgtctggtttccatgtattctaggccaggtaggcaacacagagccaaggcgggtgctggaagccagacggaacagtgttggggcaggaaggtggatgctgttgtcatggagctgtgggagttggcactctgtctgctggtggccctctcggctcacatgttcacagtgcagctcctggcagacttgggttttctctttggtggtttctaaagtgccttatctgcaaacaacttcttttctccttcaggaactgtgaatggctagaagaaggagctcagtaaactagaagtccagggttgcttggtttactggtttataagaaatctgaaagcacctctgacattccttttattaactcacctctcagttgaaagatttcttctttgaaaggtcaagaccgtgaactgaaaaaagtgttggcctttttgcgggaccagatttttaagataaaataaatatttttacttctgtc

SEQ ID NO: 158151 - DNA, 935 bp, Homo sapiens
  Payload ID: 10964
  Gene Symbol: NECAP2
  Gene Name: NECAP endocytosis associated 2
  Uniprot ID: Q9NVZ3
  ENST ID: ENST00000457722
  CDS Start-End: 39-752
ggaagtcgccggaagttcggtgggctccaggcgtcgcgatggaggagagcggggctgcggagtggcagctggaccagccatcatggagtggccggctgaggatcactgcaaagggacagatggcctacatcaagctggaggacaggacgtcaggggagctctttgctcaggccccggtggatcagtttcctggcacagctgtggagagtgtgacggattccagcaggtacttcgtgatccgcatcgaagatggaaatgggcgacgggcgtttattggaattggcttcggggaccgaggtgatgcctttgacttcaatgttgcattgcaggaccatttcaagtgggtgaaacagcagtgtgaatttgcaaaacaagcccagaacccagaccaaggccctaaactggacctgggcttcaaggagggccagaccatcaagctcaacatcgcaaacatgaagaagaaggaaggagcagctgggaatccccgagtccggcctgccagcacaggagggctgagcctgcttccccctcccccaggggggaaaacctccaccctgatccctccccctggggagcagttggctgtggggggatccctcgtccagccagcagttgctcccagttcaggaggtgctcctgtaccctggccacagcccaatcctgccactgctgacatctggggagactttaccaaatctacaggatcaacttccagccagacccagccaggcacaggctgggtccagttctgacctgagcacggtttttcctcatgtgacttctgggaaggcgctccctcatctgggccaaaggaaggaggacgaagccctcctcagctggcctgtgtttggggcatgaatctctcctctcctccttgtctggctctgttgacaaaccgggcatgtttggcagtaaattggcaccgtgtcacactg

SEQ ID NO: 158152 - DNA, 981 bp, Homo sapiens
  Payload ID: 10964
  Gene Symbol: NECAP2
  Gene Name: NECAP endocytosis associated 2
  ENST ID: ENST00000459640
  CDS Start-End: 7-591
gtcgcgatggaggagagcgggtacgagtcggtgctctgtgtcaagcctgacgtccacgtctaccgcatccctccgcgggctaccaaccgtggctacagggctgcggagtggcagctggaccagccatcatggagtggccggctgaggatcactgcaaagggacagatggcctacatcaagctggaggacaggacgtcaggggagctctttgctcaggccccggtggatcagtttcctggcacagctgtggagagtgtgacggattccagcaggtacttcgtgatccgcatcgaagatggaaatgggcgacgggcgtttattggaattggcttcggggaccgaggtgatgcctttgacttcaatgttgcattgcaggaccatttcaagtgggtgaaacagcagtgtgaatttgcaaaacaagcccagaacccagaccaaggccctaaactggacctgggcttcaaggagggccagaccatcaagctcaacatcgcattggccagctggcccttaagagagaaatgcaagtccaatccagtggactggttgggatgtgattctttctctcgcttggaggaaactaacatttaatgagcatcagctgagggccagaacatgaagaagaaggaaggagcagctgggaatccccgagtccggcctgccagcacaggagggctgagcctgcttccccctcccccaggggggaaaacctccaccctgatccctccccctggggagcagttggctgtggggggatccctcgtccagccagcagttgctcccagttcaggaggtgctcctgtaccctggccacagcccaatcctgccactgctgacatctggggagactttaccaaatctacaggatcaacttccagccagacccagccaggcacaggctgggtccagttctgacctgagcacggtttttcctcatgtgacttctgggaaggcgctccctcatctgggccaaaggaagga

SEQ ID NO: 158153 - DNA, 727 bp, Homo sapiens
  Payload ID: 10964
  Gene Symbol: NECAP2
  Gene Name: NECAP endocytosis associated 2
  ENST ID: ENST00000504858
  CDS Start-End: 26-331
agttcggtgggctccaggcgtcgcgatggaggagagcgggtacgagtcggtgctctgtgtcaagcctgacgtccacgtctaccgcatccctccgcgggctaccaaccgtggctacagggctgcggagtggcagctggaccagccatcatggagtggccggctgaggatcactgcaaagggacagatggcctacatcaagctggaggacaggacgtcaggggagctctttgctcaggccccggtggatcagtttcctggcacagctgtggagagtgtgacggattccagcaggtacttcgtgatccgcatcgaagatggaaatggtgggtgaaacagcagtgtgaatttgcaaaacaagcccagaacccagaccaaggccctaaactggacctgggcttcaaggagggccagaccatcaagctcaacatcgcattggccagctggcccttaagagagaaatgcaagtccaatccagtggactggttgggatgtgattctttctctcgcttggaggaaactaacatttaatgagcatcagctgagggccagaacatgaagaagaaggaaggagcagctgggaatccccgagtccggcctgccagcacaggagggctgagcctgcttccccctcccccaggggggaaaacctccaccctgatccctccccctggggagcagttggctgtggggggatccctcgtccagccagcagttgctcccagttcag

SEQ ID NO: 158154 - DNA, 713 bp, Homo sapiens
  Payload ID: 10964
  Gene Symbol: NECAP2
  Gene Name: NECAP endocytosis associated 2
  ENST ID: ENST00000513161
  CDS Start-End: 1-191
gcgggtacgagtcggtgctctgtgtcaagcctgacgtccacgtctaccgcatccctccgcgggctaccaaccgtggctacagggctgcggagtggcagctggaccagccatcatggagtggccggctgaggatcactgcaaagggacagatggcctacatcaagctggaggacaggacgtcaggtgggtgaaacagcagtgtgaatttgcaaaacaagcccagaacccagaccaaggccctaaactggacctgggcttcaaggagggccagaccatcaagctcaacatcgcaaacatgaagaagaaggaaggagcagctgggaatccccgagtccggcctgccagcacaggagggctgagcctgcttccccctcccccaggggggaaaacctccaccctgatccctccccctggggagcagttggctgtggggggatccctcgtccagccagcagttgctcccagttcaggaggtgctcctgtaccctggccacagcccaatcctgccactgctgacatctggggagactttaccaaatctacaggatcaacttccagccagacccagccaggcacaggctgggtccagttctgacctgagcacggtttttcctcatgtgacttctgggaaggcgctccctcatctgggccaaaggaaggaggacgaagccctcctcagctggcctgtgtttggggcatgaatctctcctctc

SEQ ID NO: 158155 - DNA, 768 bp, Homo sapiens
  Payload ID: 10964
  Gene Symbol: NECAP2
  Gene Name: NECAP endocytosis associated 2
  ENST ID: ENST00000504551
  CDS Start-End: 42-650
ggtggaagtcgccggaagttcggtgggctccaggcgtcgcgatggaggagagcgggtacgagtcggtgctctgtgtcaagcctgacgtccacgtctaccgcatccctccgcgggctaccaaccgtggctacaggggagctctttgctcaggccccggtggatcagtttcctggcacagctgtggagagtgtgacggattccagcaggtacttcgtgatccgcatcgaagatggaaatggtgggtgaaacagcagtgtgaatttgcaaaacaagcccagaacccagaccaaggccctaaactggacctgggcttcaaggagggccagaccatcaagctcaacatcgcaaacatgaagaagaaggaaggagcagctgggaatccccgagtccggcctgccagcacaggagggctgagcctgcttccccctcccccaggggggaaaacctccaccctgatccctccccctggggagcagttggctgtggggggatccctcgtccagccagcagttgctcccagttcaggaggtgctcctgtaccctggccacagcccaatcctgccactgctgacatctggggagactttaccaaatctacaggatcaacttccagccagacccagccaggcacaggctgggtccagttctgacctgagcacggtttttcctcatgtgacttctgggaaggcgctccctcatctgggccaaaggaaggaggacgaagccctcctcagctggcctgtgtttggggcatgaatctctcctctc

SEQ ID NO: 158156 - DNA, 1787 bp, Homo sapiens
  Payload ID: 10964
  Gene Symbol: NECAP2
  Gene Name: NECAP endocytosis associated 2
  Uniprot ID: Q9NVZ3
  ENST ID: ENST00000492095
  CDS Start-End: 20-811
gtgggctccaggcgtcgcgatggaggagagcgggtacgagtcggtgctctgtgtcaagcctgacgtccacgtctaccgcatccctccgcgggctaccaaccgtggctacagggctgcggagtggcagctggaccagccatcatggagtggccggctgaggatcactgcaaagggacagatggcctacatcaagctggaggacaggacgtcaggggagctctttgctcaggccccggtggatcagtttcctggcacagctgtggagagtgtgacggattccagcaggtacttcgtgatccgcatcgaagatggaaatgggcgacgggcgtttattggaattggcttcggggaccgaggtgatgcctttgacttcaatgttgcattgcaggaccatttcaagtgggtgaaacagcagtgtgaatttgcaaaacaagcccagaacccagaccaaggccctaaactggacctgggcttcaaggagggccagaccatcaagctcaacatcgcaaacatgaagaagaaggaaggagcagctgggaatccccgagtccggcctgccagcacaggagggctgagcctgcttccccctcccccaggggggaaaacctccaccctgatccctccccctggggagcagttggctgtggggggatccctcgtccagccagcagttgctcccagttcaggaggtgctcctgtaccctggccacagcccaatcctgccactgctgacatctggggagactttaccaaatctacaggatcaacttccagccagacccagccaggcacaggctgggtccagttctgacctgagcacggtttttcctcatgtgacttctgggaaggcgctccctcatctgggccaaaggaaggaggacgaagccctcctcagctggcctgtgtttggggcatgaatctctcctctcctccttgtctggctctgttgacaaaccgggcatgtttggcagtaaattggcaccgtgtcacatgatcacagttcagcgggaggctttccgtacccacactggctgtagccacttcagtccatctgccctccagaggaggggtttcttcctgatttttagcaggtttagaggctgcagcttgagctacaatcaggagggaaattggaaggattagcagcttttaaaaatgtttaaatattttgctttgctaatgtgctgatccgcactaactcatctttgcaaaaggaactgctccctcggcgtgccccagctggggcctctgaagggattcctcactgtgggcagctgccctgagcttcaggcagcagtgtttatctctggccagttgtctggtttccatgtattctaggccaggtaggcaacacagagccaaggcgggtgctggaagccagacggaacagtgttggggcaggaaggtggatgctgttgtcatggagctgtgggagttggcactctgtctgctggtggccctctcggctcacatgttcacagtgcagctcctggcagacttgggttttctctttggtggtttctaaagtgccttatctgcaaacaacttcttttctccttcaggaactgtgaatggctagaagaaggagctcagtaaactagaagtccagggttgcttggtttactggtttataagaaatctgaaagcacctctgacattccttttattaactcacctctcagttgaaagatttcttctttgaaaggtcaagaccgtgaactgaaaaaagtgttggcctttttgcgggaccagatttttaagataaaataaatatttttacttctgtc

SEQ ID NO: 158157 - DNA, 1931 bp, Homo sapiens
  Payload ID: 10965
  Gene Symbol: NDN
  Gene Name: necdin, melanoma antigen (MAGE) family member
  Uniprot ID: Q99608
  ENST ID: ENST00000331837
  CDS Start-End: 114-1079
cggaaggcgccgcgcgcagcaacgcgcacttcctctccaggaatccgcggagggagcgcaggctcgaagagctcctggacgcagaggccctgcccttgccagacggcgcagacatgtcagaacaaagtaaggatctgagcgaccctaactttgcagccgaggcccccaactccgaggtgcacagcagccctggggtttcggagggggttcctccgtccgcgaccctggcagagccgcagagccctcctctaggcccgacggccgctccgcaggccgcgccgcctccccaggccccgaacgacgagggcgacccgaaggccctgcagcaggctgcggaggagggccgcgcccaccaggccccgagcgcggcccagccgggcccggcaccgccagccccggcgcagctggtgcagaaggcgcacgagctcatgtggtacgtgctggtcaaggaccagaagaagatgatcatctggtttccagacatggtgaaagatgtcatcggcagctacaagaagtggtgcaggagcatcctccggcgcaccagcctcatcctcgcccgggtgttcgggctgcacctgaggctaaccagcctgcacaccatggagtttgcgctggtcaaagcgctggagcccgaggagctggacagggtggcgctgagcaaccgcatgcccatgacaggcctcctgctcatgatcctgagcctcatctacgtgaagggccgcggcgccagagagagcgccgtctggaacgtgctgcgcatcctggggctgcggccctggaagaagcactccaccttcggggacgtgcggaagctcatcactgaggagttcgtccaaatgaattacctgaagtaccagcgcgtcccatacgtggagccgcccgaatacgagttcttttggggctcccgggccagccgcgaaatcaccaagatgcaaatcatggagttcctggccagggtctttaagaaagacccccaggcctggccctcccgatacagagaagctctggaggaggccagagctctgcgggaggctaatcccactgcccactaccctcgcagcagtgtctctgaggactagcaaagtctggaggcagatgaatggtttctgaccctcaccagggctgtggaagggtgggggtgggtcattatagtattcaggatttacagtgcagtattcacgtgtaacttttaagttttcagtacagtgcttttatacctttaatgcaatgttgtattcatttgggtactattgtgtagtatttaggatgtatgcatgtttgtttatatgtaagcttggttggtgctttcgcttttgtgctacctttcttggatttttgtaccagagatgtgctaaactgatgaaatacattgagaaagtttccatcttattcttttatatgggactgatgatgtgtgttggggtagactgctcctgcagagtttggaagaagtcaccagcaaagccggcctaaccaagaaaagtcaaggcccttcatgaccttgctgggcacagaaaacaccctcgtggagtacactaatttgaactggactggtctcagtgtgagcacttggcacactttactaaacacatatacaaccccaccgtgagtcaactttaaagtaaacattaaagattcttgtgatacaatcatttttggaaaagtgtactttatcattttaacaaagcagtatggttgggaatgagacaattctctattttacagtgtatacagatacaactatttcccctaatagggtgggaaaaatcgctactcatgattactcctaaatttgtgaagtttatagttctattgtctttaaatgtaactcatgtttatttcaaaaacattcacaaatatagaaaagtatacaaaacaaaacagtaagattgtctgtaatcacatcatatgggaataaaaaacaaaaataa

SEQ ID NO: 158158 - DNA, 1681 bp, Homo sapiens
  Payload ID: 10966
  Gene Symbol: NDNL2
  Gene Name: necdin-like 2, SMC5-SMC6 complex component
  Uniprot ID: Q96MG7
  ENST ID: ENST00000332303
  CDS Start-End: 125-1039
agcacgcagtctcagccgacactgcgcgcgcctccaggcaccggcgttagcgggtcgccgacccgcaatccccgccgcggctgcttgcctaccggagtgtgcgccggcacctgccgccggagacatgttgcaaaaaccgaggaaccggggccgctctggcggccaggccgagagggacagagactggagccatagcggaaaccccggggcttcgcgggccggggaagacgcccgggttctcagagacggctttgccgaggaggccccgagcacgtcccgcgggccgggcggctcgcaggggtcgcagggcccctcgcctcagggcgcccgccgggcccaggccgcccccgccgtggggcccaggagccagaagcagctggagctgaaagtgtccgagctggtgcagttcttgctgattaaagaccagaagaagattccgatcaagcgggccgacatactgaagcacgtcatcggggactacaaggacatcttccccgacctcttcaaacgggccgccgagcgcctccagtacgtcttcgggtataagctggtggaacttgaacccaagagcaacacttacatcctcatcaacaccctggagcctgtggaggaggatgccgagatgaggggtgaccaaggcacgcccactacgggcctcctgatgatcgtcttagggctcatctttatgaagggcaacaccatcaaggaaactgaagcctgggactttctgcggcgcttaggggtctaccccaccaagaagcatttaattttcggagatccaaagaaactcattactgaggactttgtgcgacagcgttacctggaataccggcggataccccacaccgaccccgtcgactacgaattccagtggggcccgcgaaccaacctggaaaccagcaagatgaaagttcttaagtttgtggccaaggtccataatcaagaccccaaggactggccagcgcagtactgtgaggctttggcagatgaggagaacagggccagacctcagcctagtggcccagctccatcctcttgaaaggtggattcagagggacccccgggacaagggtctgagacccaaaggcacagtttagaggattgggggaagggagaacgaacccagggagcatattgctgtaaacgcttcaatgtgtgtagctttaggatgtgtttgcaaagttttgtttttttaatgttgtgttattttgctccagattttcatctataaacaaaggagcatttgttttgattttactctttttggtataaaaaattttgctagcttagtaaaacgaattggaaaacttgactatgatctggaacagataatgcaagaaggaacacataagtaagttgctttggtgccaagaaaataaaaaagctattatcaggtctcctaactaccccagtttgtaaggaaaaataaaagtttttataaaattaaaaaaaataattgcctatatccttattatgttaacctattttatttttctatatttcgtacatatataagtattattcatggttccaagcaatgagtgtaatgtattttctcccaatagtaattgtttatattcataattattcagctctgctgctaaacacgtagttccacttcgtttttttcttcttgctactgtagttattacaataaatactgtatttttgaagcacttaa

SEQ ID NO: 158159 - DNA, 1681 bp, Homo sapiens; identical to SEQ ID NO: 158158
  Payload ID: 10966
  Gene Symbol: NDNL2
  Gene Name: necdin-like 2, SMC5-SMC6 complex component
  Uniprot ID: Q96MG7
  ENST ID: ENST00000631973
  CDS Start-End: 125-1039

SEQ ID NO: 158160 - DNA, 7106 bp, Homo sapiens
  Payload ID: 10967
  Gene Symbol: N4BP1
  Gene Name: NEDD4 binding protein 1
  Uniprot ID: O75113
  ENST ID: ENST00000262384
  CDS Start-End: 238-2928
ggcccggcccgcggcggcggcaaaggggcggaggggttcgctgccagcaattgccaagctgctgcggtcgtggcgggatggtatagccgggcctgagggcgggcggcggggcgcgggcgggggcgaggcggccgggaagggccgacgccgcctgactggcttgggagcagcggcagcaagctgagggggcgtcgccgccgccggcccccggcgccgccgcgggaggccgcgcccgccatggcggcccgggcggtgctggacgagttcactgcgccagctgagaaggcggagctgctggagcagagccgcggccgtatcgagggcctgtttggcgtgagcctagccgtgctcggcgcgctaggggctgaggagccgctgcccgcgcgcatctggctgcagctctgcggggcgcaggaggcggtgcacagcgccaaggaatatattaaaggaatctgtgaacctgaactagaagaaagagaatgttaccccaaggacatgcactgcatttttgttggggcagagagcctgtttctgaaaagcttgattcaggatacttgtgctgacctctgcattctggacattggccttcttggcatcagaggaagtgctgaggctgtggtcatggctaggagtcacattcaacaatttgtaaagctctttgaaaataaagagaacctacccagtagtcagaaagaatcagaggtgaaaagggaattcaaacaatttgttgaagcccatgcagacaattacacaatggatttgttgattttgcccacttccttgaaaaaagaacttttgacactcacacaaggtgaggagaatctctttgaaacaggagatgatgaggttattgaaatgagagattctcaacaaacagagtttacacagaatgctgccacagggctgaatatttctagagatgaaactgttttgcaggaagaggcaagaaataaagctgggactcctgtttctgagcttacaaaacaaatggacacagtcctttctagctcaccagatgtgctttttgatccaataaatggtctaaccccagatgaagaggcactttccaatgagagaatttgtcagaaaaggagattttctgattctgaagaaaggcatacgaagaagcagttttctttggaaaatgttcaggagggggagattttacacgatgctaagacattggctggaaatgtaatagctgacctatctgattcttctgctgattctgaaaatttaagtccagatataaaagaaactactgaggaaatggaatacaacatcctcgtaaacttttttaaaaccatgggctactcccaagaaattgttgaaaaggtcattaaggtgtatggaccatctactgaaccattattgctcttagaggaaattgaaaaagaaaataaaagattccaagaagacagagaattttcagctggtacagtgtatccagagaccaacaaaaccaaaaataaaggtgtttatagcagcacaaatgagcttacaactgattccactccaaagaaaacacaggctcacacacagcaaaatatggtagaaaaattttctcagttaccattcaaagtggaagctaaaccatgtacctcaaattgtagaattaatactttcagaacagtgccaatagaacagaaacatgaagtctggggttcaaaccagaactacatttgtaacacagaccctgaaactgatggcctttcaccttctgttgcctctccaagtcccaaagaagtcaattttgtttcaaggggagcttcaagtcaccagcccagagttccactttttcctgaaaatggtttacaccagcagccagaacccttgcttccaaataatatgaaatctgcctgtgaaaaacgtttaggatgttgtagttctcctcattctaagccaaattgctcaaccctttctccaccaatgccactgccccagctgttaccttcggttactgatgcaaggtcggcaggaccttctgatcatattgattcctcagttactggggttcaaaggtttcgagatactctaaaaataccctacaagctggaattaaaaaatgaaccagggagaacggatttgaaacacattgttatagatgggagcaatgttgcaattacccatggtctgaaaaagttcttttcttgtcgtggaattgcaattgcagttgaatatttttggaagcttggcaacagaaacatcactgtatttgtccctcagtggagaacaaggcgtgatcctaatgtcacagaacagcacttcttaacccagctccaggagctcggaatattatctttaactcctgcccggatggtctttggagaaagaattgcttctcatgatgacaggtttctactacacttagcggacaaaactggtggcataattgtgacaaatgataatttcagagaatttgtgaatgagtcagtctcttggagagaaattattacaaaaaggctgctgcagtacacgttcgtgggggacatatttatggttcccgatgatcctctgggaagaagtggacctcgattagaggagtttcttcagaaggaagtctgtcttagagatatgcagcccctactcagtgccctgccaaatgtgggcatgtttgaccccagcttcagagtccctggcacccaggcagccagcaccagccaccagcctccgacccggattcagggagccccttcaagccactggctccctcagcagccccacttcccactgctgccagccctccccagtctccagcagaacctgcccatgccagctcagagatcttctgcagaaaccaacgagctgagggaagcccttctgaagatcttccctgactcagagcaaagactgaaaatagaccagatcttggtggcccacccatacatgaaagatctaaatgcgctttctgccatggtgttggattgaagattgtgctgagcgctgagcttgcgctcagggctggctgatcaaactcaagctcacacctgtacctgatgggaatgaacataatgtgaagaaacttatttcccagtgtaaacgcagttgtacagaaaaaaaatgttttgggtataaatctgggttttcaaaaccagcttttttctatatataaattatgctgctattacagatttaacattttctgttaaaggaaagtctacattttctgcctgttcagaactgtttaatagcagttactcttgagtgtatttacctttttatgttttttaaactattttccttaaagccgaaaatattgacaaatggatatggttagcctttataaataaataaaaaaaaaagtgttgctttcttaaggaaagcaagacgtcttaaagtatattttcttgagatgagtatgtcccatcactaccatgaagtgtgctcacccttccagcctcctctgccctcacccccggagttaaagtgggtaagagttggtttgttctgcagtctttggttggagtgttgtgaaagtggacccgcggtgccactagatggcacttggtgcctagccatggtgaatgaccagggcgaagttagtctcacagaataccagggctagaagacatcgtggagcccatggagtcccaccctccttcccccttccaccctgcgcaaaaggggacggcccagtgtgcacgccgtccggccatgcccacagccacagccacagctgaggagtggccgggcaggcagcaggctccccagccagggcttgacacgcccacagtcaggggcctccacatgcctggcctggctctggaagtcacgtcttagcttctgaacaccgtagcgggttatgaggaagtttaatgaagagcccggtcactgtggccatcttgtgtccccaactgcaggagacgccctgatgtggagtttgtacagctttgccaaaaaatggttttctattctcaaaagtgacccaagccaataaatagcattagtagcttctgtggggggatcccagagcccctgtatttattttccctgtgtttgtctctagtgtcctcctaaacagcctttcctgtgagtctttctcagaattgatatcttaatattgtctgttctaggtgttgcccaaattcagtgtcagtgaagttcttttcctgggcaatcttaacatctttactcttattgtctggaccttcaaagggctttgtattttacacctgcgcccccaggctgctcacagtcggcttgctgcctgtcctgcctgtccggatcttgtctcctagtcctgaggagcggaggctgagaactcagtgctggtttgtaaatggtgaggggacttgggggcatcccagagtgctccctccaggcctgcttcttggttttgtttgatcactgcgttcttcaagggatgaatccagagccctccatgaggccaagcttgtccttcaatcatgtttcctctcagatgcgtccgtgatgcctcctaatgtggaactggttgtccattgtttgggcctatggccaagtcacccagctgtggaagcagaggtagaagacgaggccagccaggagggcgacttcagtcacagctcccatgcctcagctttgtacctgttttcaaaagcacaactgaggtgtgcgggctggagctgtcttgcagtgattctggccttctggctcatggttcagtccagcagcctggctgacccactatttctcctctgcttcagaggaaacccaggaaatgcccttactgccaggctgagtctccacccatgctggttggtgctggctaggctgagggggccaccacttttcctggctagaagctacttgacctttgatgtttgagttctgtaagtcttcgtgttctgacttactgcttcagagggattggcctgtcccctttccctttctcggctatgggaaggaaggattgctcattggttgccttcatcagttacagcatgagacggaattcatcattccttccgaaacccctgatatttaatatttaatatttaaaaacccaaattatcaaaccattaagaactcattactggttctcagcctcctccagtactagcctcagtgtggctgctgcataagtatctgtagcctgtctacctcctgcagtggggccgctcgcctcttccctgtctactgctcaggctctcccacttcgtggcatccatgtaaagtaggtggcagggcagagatgtcactctcattcaacagggaggatgtctgttgctcagagaggttgtcctgaggggctgggtgattcctgggcctacattcttcccgaggctccaggccgctgtctctggaagtaaaagagccttgtctgaccttaatgcaagcagtctgtttgaacccctgtaggctgcattcaggagacagaaggtgtctgggccatcctgggcggccggtcagcgttgctaggcaggctcggctgtctggccgggacttgggcctgggtggcttttgagaccagtgaagaagggagagccggcctcatgccgatgcggcttgtggcacggctgggatgtgagggaggactcagatctacacacagaaacccctcttctccccgccctcccccagctcctacctgcctcccacgcctcaggtgtggctgcctgtgggaccatcccccaacccctttcctcgcacctccttgtcctcacccagttcctgcagtgtctctgacccacgcctcccgcctcctggccgacttgcccaggaggtgtctctggctcacctccgtctgttcatcaccttcctccccagtgtttccacttatcttggatgttttagattgaaacagcctgattcccggaagaatcctcttcattcattgctagtgcttcccctcacctcccactctccacttcccagtttgcaaatgtggctttcgcccaccaagtgaaagcggactgagagcagcccttggggacggcccggtgcctggctgcaaggccgcgctggggctctgtcttggtgcacatggcttgaccggactttccctgcttcccaccacttccctcactcccagacctccctcattctttttgtctcttctttttgcctaaagccagtccttaacaccctattcttcctctgcaggtggcttgcagacttttccccacctttggggctcgtggtggtggagagggcagctggtgttaagaatgtaggttaccgggcatgacccggcagatgcttgcccagtagttctggaggaaggcccgggaatctgcaaatgagcgcattccccaggcagttcccatgcaggtgatccacggaccacatgttgagaaactgcagtcacccttagggccacaccgtccctctcctcgctgtcccctctctgtagtgactggccctgaccttcaggagtgcactttccactctaccaggaagccctatgacatcctcaggctccccagacctgcagcttgcatggggcccctcccttcttccacacccaccctccgtatggtcccctgctctgccctcgtgctttgctggcccctgcccgctactcccactctcagacacccaggggtggtgggccctaactggctggcccctcccagcgctgccctctgccgtccagatgctgcagtgtggccagatttaccttccagtaacatacttctagtcacccctcctcctgcgaagtgatctgcagtggctgtttgaccagaccacaaagttcacatctcctgagcttagtgtccgtggctgtccacctcccagccatacttgactgtccccaaactctccctgcagccacatgtttcccatgacctgtgggctctgcagatggacctctctccgctagagatgcccttctcccaaatggcttccctcctggaaggcccagcctgagtcctcgtctcctttccagtgcttctgccagaagcatccccatgatgttgtgaccgcacagcactttgtgtctcgctttgagcacttgccactctggctggtgctgctgccactgattgtgtactgtcttgctgccctttctagactgtgagctcctcgtgggcagggaccgcctgtgttctctgtatttcccacggcgcctagcacagtgccttgcacttgataggtgcttaataaatgtctgctcaactgaa

SEQ ID NO: 158161 - DNA, 540 bp, Homo sapiens
  Payload ID: 10967
  Gene Symbol: N4BP1
  Gene Name: NEDD4 binding protein 1
  ENST ID: ENST00000564710
  CDS Start-End: 114-540
aaaggaattctgaggatgactctgagggccaaggggtgcctcagtagttgtgggaatatattaaaggaatctgtgaacctgaactagaagaaagagaatgttaccccaaggacatgcactgcatttttgttggggcagagagcctgtttctgaaaagcttgattcaggatacttgtgctgacctctgcattctggacattggccttcttggcatcagaggaagtgctgaggctgtggtcatggctaggagtcacattcaacaatttgtaaagctctttgaaaataaagagaacctacccagtagtcagaaagaatcagaggtgaaaagggaattcaaacaatttgttgaagcccatgcagacaattacacaatggatttgttgattttgcccacttccttgaaaaaagaacttttgacactcacacaaggtgaggagaatctctttgaaacaggagatgatgaggttattgaaatgagagattctcaacaaacagagtttacacagaatgctgccacagggctgaatatttctagagatg

SEQ ID NO: 158162 - DNA, 9744 bp, Homo sapiens
  Payload ID: 10968
  Gene Symbol: N4BP2
  Gene Name: NEDD4 binding protein 2
  Uniprot ID: Q86UW6
  ENST ID: ENST00000261435
  CDS Start-End: 417-5729
ttccccggccggacggagagcggcagtgtctccccgccgggcgcgctcgccgtgtctcccccgcggccgcagctgcttgctagccttgcgcggcgcgggagagcgcagtggcgccggcgggaaagggctgcggacctgcggcgccgcgttgtgcgttcgacgacgcggcaccggcttcgacgccctctgcccgctccagaagcagtaagaagacatgttggataacaagaagaggtgtagagtttgcatatatcaactgtggccttaatgagcatgttgacagcatcgatgctagacagacagtctttttactgctggattgtgcaagatatttaaccctattttgtttgaattatgacttaaatgtcaaacatcttaactaagaaaagggaaacattttagttttggaagtcagaatgccaaggagaaggaaaaatcttgggggaaatccttttcggaagactgcaaaccctaaggaagttgtcgtatccagtgttgctagtcgtgaggagccaaccactactctaccttccatgggtgagacaaaagttgatcaggaagaactcttcaccagtatctcagagatattttctgatctggatcctgatgtagtgtatttgatgctttctgaatgtgatttcaaagttgaaaatgctatggattgtctattagaattatctgccactgataccaagatagaagaatcatcttcacaaagtttcgttgcttctgagaaccaagtaggtgcagcagaaagtaaaataatggaaaaacgtcctgaagaagagagtgaagattcaaaaatggattcatttttggacatgcagctaactgaagacctggattccttaatacagaatgcttttgagaaattgaactcttctcctgatgaccaagtatactcatttttgccttcacaagatgttaatagttttaatgactcaagtgagtttataaatcctgattcaagtaatatgactcccattttttctacacaaaatatgaatttgaacggtgaaaatttagagaattctggttctactttaagtttaaacccattaccttcacattcagttttgaacgagtccaagtgttttataaaggataacacattggctttggaaagtaactacccggaagattctcttctcagtagttctttaaatgtagcaagtgactccatcgcaggttgtagcagtctcaatcaaaaacagaaagaacttttagaatctgagtgcgttgaggctcaattctctgaagctcctgtagatttggatgccagtgaacctcaggcttgtttaaaccttccagggcttgatttaccaggtacaggtggggatcagaaatctactcgggtctctgatgtgtttctaccttccgaagggttcaacttcaagccacacaaacatcctgaactgccaactaaggggaaggatgtgagttactgcccggtacttgctcctctcccattgctgttgcctcctccgccacctccaccgatgtggaatccaatgattcctgcttttgacctcttccaaggaaaccatggctttgtagctcctgttgtaaccacagctgcacactggagatctgtcaactacacatttccaccctcagttatttctcacacttccccaacaaaagtatggagaaataaagatggaacaagtgcttatcaagtacaagaaaccccagtttctcaggttgtaagaaagaagacatcttacgttggactagttcttgttcttctcagaggtcttccgggatctggaaaatcttttttggcaaggactttgcaagaggataatccaagtggagtcattcttagtactgatgattatttttatataaatggacagtaccagtttgatgtaaagtacttaggagaagcacatgaatggaaccagaatcgtgcaaaagaagcatttgagaagaagatatctcctataattatagataatacaaacctacaggcatgggaaatgaaaccatatgttgctttgtctcagaaacacaaatataaagtcctttttcgggaaccagacacatggtggaagtttaaaccaaaggaacttgcaaggcgtaacattcatggggtaagcaaagaaaaaataacaagaatgttggaacattatcaacgttttgtttcagtgccaataattatgagttcttcggttccagagaaaattgaacgtattgagttgtgtgcatattcttgtgaggatagaagcactagcccaagagacgatgaagatattatctctgaaaaagaagaaaatattttatctttatctttgaagcatctagagttcactgaagagaagaatcttgatgtaaccaaagaaacaatgttacctgagaatgttgcatatctctctaatgcagatttaaacaaaagaagaaaagaaataagtgatatgaatcctagcattcaaagtgctttaattctggaaactccacacatgtatttttctgactctgaaagcaaactacaggcaacagacaaaagtgaaaacgagcaaatagaaatggtggctgtaaaagggtatagtaaaactgacacagatagttctatggagagagtatcacctagtacttgctgtagtgaaaataatcaagaagactgtgatcttgcaaatagtggaccacttcaaaatgaaaaatcctcacctggtgaaatagtggaagaaagagcaacagtaacgaaaaaagcctttgggaaacaaaaaagcaaatcgactttggaaaagttcccaagacatgagctatcaaattttgttggtgactggccagttgataagactattggtcagaggacaaaaaggaacagaaaaactgaaaaaacttcatccgtacaaagcgacaaaaagtataattaccctcagtcacacaaattagttaacagtgtatctgtgaatacagattgtgtccagcaacgaggatctccacatgaaagtgtagaggatggcagaaagtcacagtgtgatgatgcttcagagccactcaatagctataaatatgatgcttataaaaatattgacaaaaactcattcaacattatgggtgactggccttcatctgattctttagctcagagggaacacagatcaagaatgccaaagactggtttaagtgagcccaacctagaaattggaacaaatgacaaaatgaatgaaatatccttatctacagcacatgaggcctgttggggcacaagctctcaaaaactaaagacattgggtagctccaatctaggaagttctgaaatgctgctcagtgaaatgacctgtgagagtcagacttgtctaagtaaaaagagtcatgggcaacacacatcgttgcctcttacttttaccaatagtgcaccaactgtttctggagtagtagaaccacaaacgttagctgaatgtcaagagcaaatgcctaagagagaccctggaaaagaagtaggcatgtgcacccagactgaaccacaggattttgctcttttatggaaaatagaaaagaataaaattagcatttcagattctatcaaagtattaacaggaagattagatggatttaagccgaaagttttcaatattaacacaaaatcagacgttcaagaagcaattccatatagagtaatgtatgataaaagcacgtttgttgaagaaagtgagcttaccagtgcagatgaatctgaaaatcttaacattctttgtaaactgtttggatccttttcattagaagccctgaaagacttatatgagaggtgcaataaagatattatttgggccacaagccttttgttggattctgaaactaagttatgtgaggatacagagtttgagaatttccaaaaatcgtgtgatggatcacaaattgggcctttttctctggggttgaatttgaaagaaattattagccaaagaggaactttagagaattctaattctcctgtgccagagtttagccatgggattggtattagtaacgctgactcacagtctacttgtgatgcagaaagaggaaactcagagcaggcggaaatgagagctgtcactcctgaaaaccatgaatcgatgacaagtatatttcccagtgctgctgtgggtctaaagaataataatgacatacttcctaacagccaggaagaacttttatatagcagtaagcagtcctttccaggtattctaaaagctactactcctaaagatatgagtgaaacagaaaaaaacctagtagtcacagagactggagacaacatacattctccttcacatttctctgatatttttaactttgtatctagtacttcaaatcttgaattaaatgaagaaatttattttactgattctcttgaaataaagagaaatgaaaattttccaaaggattatgtgaaattttcagatgaagaagaatttatgaatgaagatgagaaggaaatgaaggaaattctaatggcaggaagtagtttatcagctggagttagtggggaagataaaaccgagatattgaatcccactccagcgatggccaaatctctgaccatagactgtctggaattggcattaccccctgaactggcttttcaacttaatgaattatttggtcctgttggtattgattcagggtctctaacagttgaagattgtgtggttcatatagatctgaatctggcgaaagtgattcatgagaaatggaaagaatctgtaatggagcgacaaagacaagaagaggtgtcttgtggcaagtttatgcaagatccttccttggttggacatactgggcttgataatcctgaacaaaaatcatctcagagaacaggcaaaaaattactgaagactttaacagcatctgaaatgctacctttattggatcattggaatactcaaactaaaaaagtatcactcagagaaataatgtcagaagaaattgccttacaggaaaaacataatttgaaaagggagacccttatgtttgaaaaagattgtgccactaaactaaaggagaagcagctctttaagatatttccagccattaaccaaaattttctggtggacattttcaaggaccacaactattcattagaacacacagtgcaatttcttaactgtgttcttgaaggggaccctgtaaaaacagttgtagcccaagagtttgttcaccaaaatgagaatgtcacatctcatactggccagaagtctaaagagaaaaagccaaagaaattaaaagagactgaagaaacaccaagtgaactgtctttccaggactttgagtacccagactatgatgactacagagcagaggctttccttcaccaacagaagaggatggagtgctacagcaaggccaaagaagcttatcggatagggaaaaaaaatgtcgccaccttttatgcccagcagggtactcttcatgagcagaagatgaaagaagccaatcaccttgctgccatagagatctttgagaaagtcaatgcttcgctgctgccacagaatgttttagacctccatgggctgcatgtggatgaagctctagaacatttgatgagagttttagagaagaagactgaagaatttaagcagaacggtgggaagccctatttgtctgtgattacggggagaggaaaccacagccagggaggagttgctcgcatcaaaccagctgtcattaagtacctcataagccatagcttcaggttctctgaaattaaaccagggtgcttgaaagtcatgctaaagtaaaataaacatccttgaattagaagtatgaaggtttgtaggttaaaattacttttatttgcagtaattcagtcaattctaccctaaagatgtgttttattataaataatattcaattatgaaacaaaaaaattatgatgtttttcaaaatgcaagtgaggtttgattttttactgaatcaaatgcaaatgttacctgttaaagatattacagagaaattttattgattacaaaatatgtaagaaaattatcagctacagttttaaagtttaaaatgctctgattgtttctcagaaaaggttacctttgtattaattgttgtatgacatttagtaatgtcctaaaagtcttttgtgagaggtatttaaagtgctttgagacctgattcatgccccccaaagggtggtattaaaagaggaaaaaggacatagtagtggtagtaaagaaaaaaaggagatctaacaaaaacacttgaatattttttattttcaaaactaaacacataaaatgcttttattttgccatatcctacaggaaggaagacatgcttttgccctttcttctgctttgtatatgaccttgatcttttaccttttgttctgttcttctgtgtgcattttatggaaagaaagttgggtctgagattatattgtaattttatactttctatagacagaaaggttttcagagaaaaagaaatggttaaatatcttccagatgttgctgccttatcgaaatgcttctagaactgtctgtataagtcgtatttcagacagtactaaatacttatattttatttttgaggcatgtaattttaaaactgcagtaggttaaaattctattaaacaaatatagaaaatattttgtttataattggcctggtgtggtggcccacgcctgtaatcccagcactttgggaggccgaggtaggtggatcgcctgaggtcagaagttcaagaccagcctggccaacatggtgaatccccgtctctattaaaaatacaaaaattagctgggtgtggtggcgtgtgcctgtaatcccagctacttgggaggctgaggcaggagaaccgcttaaacctgggaggtggaggttgcagtgacccgagatcgagatcacaccactgcactcagcctgggtgacagagcaagactccgtctccaaaaaaaaaaaagaaaaaaaagagaaaatattttggttataatcataagaagaatccttacaatttaaaatattttcacttttattttgaaaaagagccaactttctcaaaggaagctgtcattaacttctgttgtttggttagctaataaattctgttagtatgcaagttaaacctgtgtaaaggaggttataatgtggtaaggtataattttccaatatgagacaatggcttaaatttgcctttggagatggagaatattttcaacatacataattttaacaaatagttttgttgctttttgttaagcttaaaaaaaaatttggatcagaaattataggattgagctggtaccaaaagaatcctaaagtacagaatggttttccaaaagagcagacatttcaatgaaaataaaaccccaaaacattttttttatatatcatgattgcatgcttttaaaataaggaggcttatcattgaattttagttccataaaaatgaaaatacatgtttattatttagaaatggttagtgactggtattgaagtattattcacacttatgtttgtaataatttatttaaagaatgccaacagtttagcacacttttgtaatctctagaacagttctatacattaaaaataaacattaaaaataaagcagttcctttaaacaacttactatgaaactataattgttaatgaaataagatattcctatgtatacattagtatgatttaagggtatgaaaaacagtgctaaaatgtggagttaattggaatgtgtgcagctgcatactcactttctgtgtttttatatttccttacctagttttaaaaatcatcacttttcggcacttcagctagacttatttcaatattataattatgattaatgaaggagcagtcagaagtagaggtgtggtattccgtgggcagaagtcaaatgaaaaaagctatattgtttacttgtttactatatcaatgttaatattatgccttattttgataaatcaaatagtatatcttaatcattgttgataaatatacaggcaaagtttgagcatcatatgtatttttatgaagctgcttaattccaaattgcctcccaccccactatctagcatagtttaagcaacacataattttgaaagaaaagtttgtaatccctcctttcttttttttgcccatttctaaatcctgtatgcccgcagtaaagatagtttggggattttaaaagttttctctattacccatttctaaatcctgtatgtcaaagatagtttggagattataaaaattttcatgtattggtgtaggttgagtatccctaatgagaaaattcaaaatctgaaatgcttcaaaatctgaaatttttcgagcacagacatgatgctcaaaggaaatactcacagagcattttacatttgtaggttagcgatactcaacaagtaaatataatgcacatgttctaaaatatccccccaaaccccagcaatccaaaacacttctggtcctaagcattttgagtaggggatactcactcaacctgtatatttgtgctaatacatgactcattagaatgattctttgtaaacttaatattttaaaagtacagcacttctgtagtatggaaggtttcagtaataattatattcattcagtagtctcttaccattatctcccagatggaaaaagaggactaatgtggaaaccccagagggtgtccagttggaccagggagatattagacacttaacagtattttcagtctgtccatctctttattccaatgtgagaaatggaagtgtttttttttttacgtttattggctcttcatatttctctacattatttttaatgtgcagtttcttcaattggttagtatttccatactatttgcaactttatggcctttaaatataggacatattatatagcagaaattttgactttaaatcctcttgagtagtatattttgagaagaaaagctatactgctcttctggatggtttccatcctttatttaggtcttttctttttgaattcaagtgttttgtatgcttagaaagtagacatgtataatattgagatcggttatttctgagctggaaattggaaactttggaaactcaggaaattgctctgacaatgttttaactgctctcaatttaagaaaatgacgaaatgtataaaaaagacaaaaataacgtgtgctgttttttccaagtgctttttctaagtgcttttccattgtgcaatgaggtgaagtttggtaatttttcggtgtagtagttaaatattgctcaatttttatttacatgtaaagaaaacagatttaaatgtttatgtggccaaaaggtgtcatttaaaaggtaaaataagtttatgtagaatgtatgttcatggtgcttatttttaaaatgtaattcaagtttacagtattacttaatgcttctttacagaatttaatagagaaacaaggctagaacacatctacatcctgaagagccgtttataacttcatattatatgatgacaaagttcattattttccttaaagttgagcaattgacttttatggtccaatgatgaacttattattaataaatgattgagttaactgtgaggcttctcattaaaatacaatattgcagctatcagttggagaatatattataaaattttcagacagtatatcagaaaaatgtttttatttgtactgtatagaaaatgtaattttgctgttaactctgtactttttaaattgaaaatgttttataaatttgcttttaaattttcttatgaagccatttgcaaattacatacttaatttaataaaatactttagccaca

SEQ ID NO: 158163 - DNA, 724 bp, Homo sapiens
  Payload ID: 10968
  Gene Symbol: N4BP2
  Gene Name: NEDD4 binding protein 2
  ENST ID: ENST00000515550
  CDS Start-End: 204-724
gcgccggcgggaaagggctgcggacctgcggcgccgcgttgtgcgttcgacgacgcggcaccggcttcgacgccctctgcccgctccagaagcagtaagaagacatgttggataacaagaagaggtgtagagtttgcatatatcaactgtggccttaatgagcatgttgacagcatcgatgctagacagacattgaaaatgctatggattgtctattagaattatctgccactgataccaagatagaagaatcatcttcacaaagtttcgttgcttctgagaaccaagtaggtgcagcagaaagtaaaataatggaaaaacgtcctgaagaagagagtgaagattcaaaaatggattcatttttggacatgcagctaactgaagacctggattccttaatacagaatgcttttgagaaattgaactcttctcctgatgaccaagtatactcatttttgccttcacaagatgttaatagttttaatgactcaagtgagtttataaatcctgattcaagtaatatgactcccattttttctacacaaaatatgaatttgaacggtgaaaatttagagaattctggttctactttaagtttaaacccattaccttcacattcagttttgaacgagtccaagtgttttataaaggataacacattggctttggaaagtaactacccggaagattctcttctcagtagttctttaaatgtagcaagtga

SEQ ID NO: 158164 - DNA, 9747 bp, Homo sapiens
  Payload ID: 10968
  Gene Symbol: N4BP2
  Gene Name: NEDD4 binding protein 2
  ENST ID: ENST00000511480
  CDS Start-End: 330-629
gcgcggcgcgggagagcgcagtggcgccggcgggaaagggctgcggacctgcggcgccgcgttgtgcgttcgacgacgcggcaccggcttcgacgccctctgcccgctccagaagcagtaagaagacatgttggataacaagaagaggtgtagagtttgcatatatcaactgtggccttaatgagcatgttgacagcatcgatgctagacagacagtctttttactgctggattgtgcaagatatttaaccctattttgtttgaattatgacttaaatgtcaaacatcttaactaagaaaagggaaacattttagttttggaagtcagaatgccaaggagaaggaaaaatcttgggggaaatccttttcggaagactgcaaaccctaaggaagttgtcgtatccagtgttgctagtcgtgaggagccaaccactactctaccttccatgggtgagacaaaagttgatcaggaagaactcttcaccagtatctcagagatattttctgatctggatcctgatgtagtgtatttgatgctttctgaatgtgatttcaaagggaacttaattgggtgcttactaggtgccagttcttgtgcacagcactttttcatggattatctcatttaatcctcacagcaacctatgagttgaaaatgctatggattgtctattagaattatctgccactgataccaagatagaagaatcatcttcacaaagtttcgttgcttctgagaaccaagtaggtgcagcagaaagtaaaataatggaaaaacgtcctgaagaagagagtgaagattcaaaaatggattcatttttggacatgcagctaactgaagacctggattccttaatacagaatgcttttgagaaattgaactcttctcctgatgaccaagtatactcatttttgccttcacaagatgttaatagttttaatgactcaagtgagtttataaatcctgattcaagtaatatgactcccattttttctacacaaaatatgaatttgaacggtgaaaatttagagaattctggttctactttaagtttaaacccattaccttcacattcagttttgaacgagtccaagtgttttataaaggataacacattggctttggaaagtaactacccggaagattctcttctcagtagttctttaaatgtagcaagtgactccatcgcaggttgtagcagtctcaatcaaaaacagaaagaacttttagaatctgagtgcgttgaggctcaattctctgaagctcctgtagatttggatgccagtgaacctcaggcttgtttaaaccttccagggcttgatttaccaggtacaggtggggatcagaaatctactcgggtctctgatgtgtttctaccttccgaagggttcaacttcaagccacacaaacatcctgaactgccaactaaggggaaggatgtgagttactgcccggtacttgctcctctcccattgctgttgcctcctccgccacctccaccgatgtggaatccaatgattcctgcttttgacctcttccaaggaaaccatggctttgtagctcctgttgtaaccacagctgcacactggagatctgtcaactacacatttccaccctcagttatttctcacacttccccaacaaaagtatggagaaataaagatggaacaagtgcttatcaagtacaagaaaccccagtttctcaggttgtaagaaagaagacatcttacgttggactagttcttgttcttctcagaggtcttccgggatctggaaaatcttttttggcaaggactttgcaagaggataatccaagtggagtcattcttagtactgatgattatttttatataaatggacagtaccagtttgatgtaaagtacttaggagaagcacatgaatggaaccagaatcgtgcaaaagaagcatttgagaagaagatatctcctataattatagataatacaaacctacaggcatgggaaatgaaaccatatgttgctttgtctcagaaacacaaatataaagtcctttttcgggaaccagacacatggtggaagtttaaaccaaaggaacttgcaaggcgtaacattcatggggtaagcaaagaaaaaataacaagaatgttggaacattatcaacgttttgtttcagtgccaataattatgagttcttcggttccagagaaaattgaacgtattgagttgtgtgcatattcttgtgaggatagaagcactagcccaagagacgatgaagatattatctctgaaaaagaagaaaatattttatctttatctttgaagcatctagagttcactgaagagaagaatcttgatgtaaccaaagaaacaatgttacctgagaatgttgcatatctctctaatgcagatttaaacaaaagaagaaaagaaataagtgatatgaatcctagcattcaaagtgctttaattctggaaactccacacatgtatttttctgactctgaaagcaaactacaggcaacagacaaaagtgaaaacgagcaaatagaaatggtggctgtaaaagggtatagtaaaactgacacagatagttctatggagagagtatcacctagtacttgctgtagtgaaaataatcaagaagactgtgatcttgcaaatagtggaccacttcaaaatgaaaaatcctcacctggtgaaatagtggaagaaagagcaacagtaacgaaaaaagcctttgggaaacaaaaaagcaaatcgactttggaaaagttcccaagacatgagctatcaaattttgttggtgactggccagttgataagactattggtcagaggacaaaaaggaacagaaaaactgaaaaaacttcatccgtacaaagcgacaaaaagtataattaccctcagtcacacaaattagttaacagtgtatctgtgaatacagattgtgtccagcaacgaggatctccacatgaaagtgtagaggatggcagaaagtcacagtgtgatgatgcttcagagccactcaatagctataaatatgatgcttataaaaatattgacaaaaactcattcaacattatgggtgactggccttcatctgattctttagctcagagggaacacagatcaagaatgccaaagactggtttaagtgagcccaacctagaaattggaacaaatgacaaaatgaatgaaatatccttatctacagcacatgaggcctgttggggcacaagctctcaaaaactaaagacattgggtagctccaatctaggaagttctgaaatgctgctcagtgaaatgacctgtgagagtcagacttgtctaagtaaaaagagtcatgggcaacacacatcgttgcctcttacttttaccaatagtgcaccaactgtttctggagtagtagaaccacaaacgttagctgaatgtcaagagcaaatgcctaagagagaccctggaaaagaagtaggcatgtgcacccagactgaaccacaggattttgctcttttatggaaaatagaaaagaataaaattagcatttcagattctatcaaagtattaacaggaagattagatggatttaagccgaaagttttcaatattaacacaaaatcagacgttcaagaagcaattccatatagagtaatgtatgataaaagcacgtttgttgaagaaagtgagcttaccagtgcagatgaatctgaaaatcttaacattctttgtaaactgtttggatccttttcattagaagccctgaaagacttatatgagaggtgcaataaagatattatttgggccacaagccttttgttggattctgaaactaagttatgtgaggatacagagtttgagaatttccaaaaatcgtgtgatggatcacaaattgggcctttttctctggggttgaatttgaaagaaattattagccaaagaggaactttagagaattctaattctcctgtgccagagtttagccatgggattggtattagtaacgctgactcacagtctacttgtgatgcagaaagaggaaactcagagcaggcggaaatgagagctgtcactcctgaaaaccatgaatcgatgacaagtatatttcccagtgctgctgtgggtctaaagaataataatgacatacttcctaacagccaggaagaacttttatatagcagtaagcagtcctttccaggtattctaaaagctactactcctaaagatatgagtgaaacagaaaaaaacctagtagtcacagagactggagacaacatacattctccttcacatttctctgatatttttaactttgtatctagtacttcaaatcttgaattaaatgaagaaatttattttactgattctcttgaaataaagagaaatgaaaattttccaaaggattatgtgaaattttcagatgaagaagaatttatgaatgaagatgagaaggaaatgaaggaaattctaatggcaggaagtagtttatcagctggagttagtggggaagataaaaccgagatattgaatcccactccagcgatggccaaatctctgaccatagactgtctggaattggcattaccccctgaactggcttttcaacttaatgaattatttggtcctgttggtattgattcagggtctctaacagttgaagattgtgtggttcatatagatctgaatctggcgaaagtgattcatgagaaatggaaagaatctgtaatggagcgacaaagacaagaagaggtgtcttgtggcaagtttatgcaagatccttccttggttggacatactgggcttgataatcctgaacaaaaatcatctcagagaacaggcaaaaaattactgaagactttaacagcatctgaaatgctacctttattggatcattggaatactcaaactaaaaaagtatcactcagagaaataatgtcagaagaaattgccttacaggaaaaacataatttgaaaagggagacccttatgtttgaaaaagattgtgccactaaactaaaggagaagcagctctttaagatatttccagccattaaccaaaattttctggtggacattttcaaggaccacaactattcattagaacacacagtgcaatttcttaactgtgttcttgaaggggaccctgtaaaaacagttgtagcccaagagtttgttcaccaaaatgagaatgtcacatctcatactggccagaagtctaaagagaaaaagccaaagaaattaaaagagactgaagaaacaccaagtgaactgtctttccaggactttgagtacccagactatgatgactacagagcagaggctttccttcaccaacagaagaggatggagtgctacagcaaggccaaagaagcttatcggatagggaaaaaaaatgtcgccaccttttatgcccagcagggtactcttcatgagcagaagatgaaagaagccaatcaccttgctgccatagagatctttgagaaagtcaatgcttcgctgctgccacagaatgttttagacctccatgggctgcatgtggatgaagctctagaacatttgatgagagttttagagaagaagactgaagaatttaagcagaacggtgggaagccctatttgtctgtgattacggggagaggaaaccacagccagggaggagttgctcgcatcaaaccagctgtcattaagtacctcataagccatagcttcaggttctctgaaattaaaccagggtgcttgaaagtcatgctaaagtaaaataaacatccttgaattagaagtatgaaggtttgtaggttaaaattacttttatttgcagtaattcagtcaattctaccctaaagatgtgttttattataaataatattcaattatgaaacaaaaaaattatgatgtttttcaaaatgcaagtgaggtttgattttttactgaatcaaatgcaaatgttacctgttaaagatattacagagaaattttattgattacaaaatatgtaagaaaattatcagctacagttttaaagtttaaaatgctctgattgtttctcagaaaaggttacctttgtattaattgttgtatgacatttagtaatgtcctaaaagtcttttgtgagaggtatttaaagtgctttgagacctgattcatgccccccaaagggtggtattaaaagaggaaaaaggacatagtagtggtagtaaagaaaaaaaggagatctaacaaaaacacttgaatattttttattttcaaaactaaacacataaaatgcttttattttgccatatcctacaggaaggaagacatgcttttgccctttcttctgctttgtatatgaccttgatcttttaccttttgttctgttcttctgtgtgcattttatggaaagaaagttgggtctgagattatattgtaattttatactttctatagacagaaaggttttcagagaaaaagaaatggttaaatatcttccagatgttgctgccttatcgaaatgcttctagaactgtctgtataagtcgtatttcagacagtactaaatacttatattttatttttgaggcatgtaattttaaaactgcagtaggttaaaattctattaaacaaatatagaaaatattttgtttataattggcctggtgtggtggcccacgcctgtaatcccagcactttgggaggccgaggtaggtggatcgcctgaggtcagaagttcaagaccagcctggccaacatggtgaatccccgtctctattaaaaatacaaaaattagctgggtgtggtggcgtgtgcctgtaatcccagctacttgggaggctgaggcaggagaaccgcttaaacctgggaggtggaggttgcagtgacccgagatcgagatcacaccactgcactcagcctgggtgacagagcaagactccgtctccaaaaaaaaaaaagaaaaaaaagagaaaatattttggttataatcataagaagaatccttacaatttaaaatattttcacttttattttgaaaaagagccaactttctcaaaggaagctgtcattaacttctgttgtttggttagctaataaattctgttagtatgcaagttaaacctgtgtaaaggaggttataatgtggtaaggtataattttccaatatgagacaatggcttaaatttgcctttggagatggagaatattttcaacatacataattttaacaaatagttttgttgctttttgttaagcttaaaaaaaaatttggatcagaaattataggattgagctggtaccaaaagaatcctaaagtacagaatggttttccaaaagagcagacatttcaatgaaaataaaaccccaaaacattttttttatatatcatgattgcatgcttttaaaataaggaggcttatcattgaattttagttccataaaaatgaaaatacatgtttattatttagaaatggttagtgactggtattgaagtattattcacacttatgtttgtaataatttatttaaagaatgccaacagtttagcacacttttgtaatctctagaacagttctatacattaaaaataaacattaaaaataaagcagttcctttaaacaacttactatgaaactataattgttaatgaaataagatattcctatgtatacattagtatgatttaagggtatgaaaaacagtgctaaaatgtggagttaattggaatgtgtgcagctgcatactcactttctgtgtttttatatttccttacctagttttaaaaatcatcacttttcggcacttcagctagacttatttcaatattataattatgattaatgaaggagcagtcagaagtagaggtgtggtattccgtgggcagaagtcaaatgaaaaaagctatattgtttacttgtttactatatcaatgttaatattatgccttattttgataaatcaaatagtatatcttaatcattgttgataaatatacaggcaaagtttgagcatcatatgtatttttatgaagctgcttaattccaaattgcctcccaccccactatctagcatagtttaagcaacacataattttgaaagaaaagtttgtaatccctcctttcttttttttgcccatttctaaatcctgtatgcccgcagtaaagatagtttggggattttaaaagttttctctattacccatttctaaatcctgtatgtcaaagatagtttggagattataaaaattttcatgtattggtgtaggttgagtatccctaatgagaaaattcaaaatctgaaatgcttcaaaatctgaaatttttcgagcacagacatgatgctcaaaggaaatactcacagagcattttacatttgtaggttagcgatactcaacaagtaaatataatgcacatgttctaaaatatccccccaaaccccagcaatccaaaacacttctggtcctaagcattttgagtaggggatactcactcaacctgtatatttgtgctaatacatgactcattagaatgattctttgtaaacttaatattttaaaagtacagcacttctgtagtatggaaggtttcagtaataattatattcattcagtagtctcttaccattatctcccagatggaaaaagaggactaatgtggaaaccccagagggtgtccagttggaccagggagatattagacacttaacagtattttcagtctgtccatctctttattccaatgtgagaaatggaagtgtttttttttttacgtttattggctcttcatatttctctacattatttttaatgtgcagtttcttcaattggttagtatttccatactatttgcaactttatggcctttaaatataggacatattatatagcagaaattttgactttaaatcctcttgagtagtatattttgagaagaaaagctatactgctcttctggatggtttccatcctttatttaggtcttttctttttgaattcaagtgttttgtatgcttagaaagtagacatgtataatattgagatcggttatttctgagctggaaattggaaactttggaaactcaggaaattgctctgacaatgttttaactgctctcaatttaagaaaatgacgaaatgtataaaaaagacaaaaataacgtgtgctgttttttccaagtgctttttctaagtgcttttccattgtgcaatgaggtgaagtttggtaatttttcggtgtagtagttaaatattgctcaatttttatttacatgtaaagaaaacagatttaaatgtttatgtggccaaaaggtgtcatttaaaaggtaaaataagtttatgtagaatgtatgttcatggtgcttatttttaaaatgtaattcaagtttacagtattacttaatgcttctttacagaatttaatagagaaacaaggctagaacacatctacatcctgaagagccgtttataacttcatattatatgatgacaaagttcattattttccttaaagttgagcaattgacttttatggtccaatgatgaacttattattaataaatgattgagttaactgtgaggcttctcattaaaatacaatattgcagctatcagttggagaatatattataaaattttcagacagtatatcagaaaaatgtttttatttgtactgtatagaaaatgtaattttgctgttaactctgtactttttaaattgaaaatgttttataaatttgcttttaaattttcttatgaagccatttgcaaattacatacttaatttaataaaatactttagccac

SEQ ID NO: 158165 - DNA, 5361 bp, Homo sapiens
  Payload ID: 10968
  Gene Symbol: N4BP2
  Gene Name: NEDD4 binding protein 2
  ENST ID: ENST00000513269
  CDS Start-End: 1-4201
gcctcctccgccacctccaccgatgtggaatccaatgattcctgcttttgacctcttccaaggaaaccatggctttgtagctcctgttgtaaccacagctgcacactggagatctgtcaactacacatttccaccctcagttatttctcacacttccccaacaaaagtatggagaaataaagatggaacaagtgcttatcaagtacaagaaaccccagtttctcaggttgtaagaaagaagacatcttacgttggactagttcttgttcttctcagaggtcttccgggatctggaaaatcttttttggcaaggactttgcaagaggataatccaagtggagtcattcttagtactgatgattatttttatataaatggacagtaccagtttgatgtaaagtacttaggagaagcacatgaatggaaccagaatcgtgcaaaagaagcatttgagaagaagatatctcctataattatagataatacaaacctacaggcatgggaaatgaaaccatatgttgctttgtctcagaaacacaaatataaagtcctttttcgggaaccagacacatggtggaagtttaaaccaaaggaacttgcaaggcgtaacattcatggggtaagcaaagaaaaaataacaagaatgttggaacattatcaacgttttgtttcagtgccaataattatgagttcttcggttccagagaaaattgaacgtattgagttgtgtgcatattcttgtgaggatagaagcactagcccaagagacgatgaagatattatctctgaaaaagaagaaaatattttatctttatctttgaagcatctagagttcactgaagagaagaatcttgatgtaaccaaagaaacaatgttacctgagaatgttgcatatctctctaatgcagatttaaacaaaagaagaaaagaaataagtgatatgaatcctagcattcaaagtgctttaattctggaaactccacacatgtatttttctgactctgaaagcaaactacaggcaacagacaaaagtgaaaacgagcaaatagaaatggtggctgtaaaagggtatagtaaaactgacacagatagttctatggagagagtatcacctagtacttgctgtagtgaaaataatcaagaagactgtgatcttgcaaatagtggaccacttcaaaatgaaaaatcctcacctggtgaaatagtggaagaaagagcaacagtaacgaaaaaagcctttgggaaacaaaaaagcaaatcgactttggaaaagttcccaagacatgagctatcaaattttgttggtgactggccagttgataagactattggtcagaggacaaaaaggaacagaaaaactgaaaaaacttcatccgtacaaagcgacaaaaagtataattaccctcagtcacacaaattagttaacagtgtatctgtgaatacagattgtgtccagcaacgaggatctccacatgaaagtgtagaggatggcagaaagtcacagtgtgatgatgcttcagagccactcaatagctataaatatgatgcttataaaaatattgacaaaaactcattcaacattatgggtgactggccttcatctgattctttagctcagagggaacacagatcaagaatgccaaagactggtttaagtgagcccaacctagaaattggaacaaatgacaaaatgaatgaaatatccttatctacagcacatgaggcctgttggggcacaagctctcaaaaactaaagacattgggtagctccaatctaggaagttctgaaatgctgctcagtgaaatgacctgtgagagtcagacttgtctaagtaaaaagagtcatgggcaacacacatcgttgcctcttacttttaccaatagtgcaccaactgtttctggagtagtagaaccacaaacgttagctgaatgtcaagagcaaatgcctaagagagaccctggaaaagaagtaggcatgtgcacccagactgaaccacaggattttgctcttttatggaaaatagaaaagaataaaattagcatttcagattctatcaaagtattaacaggaagattagatggatttaagccgaaagttttcaatattaacacaaaatcagacgttcaagaagcaattccatatagagtaatgtatgataaaagcacgtttgttgaagaaagtgagcttaccagtgcagatgaatctgaaaatcttaacattctttgtaaactgtttggatccttttcattagaagccctgaaagacttatatgagaggtgcaataaagatattatttgggccacaagccttttgttggattctgaaactaagttatgtgaggatacagagtttgagaatttccaaaaatcgtgtgatggatcacaaattgggcctttttctctggggttgaatttgaaagaaattattagccaaagaggaactttagagaattctaattctcctgtgccagagtttagccatgggattggtattagtaacgctgactcacagtctacttgtgatgcagaaagaggaaactcagagcaggcggaaatgagagctgtcactcctgaaaaccatgaatcgatgacaagtatatttcccagtgctgctgtgggtctaaagaataataatgacatacttcctaacagccaggaagaacttttatatagcagtaagcagtcctttccaggtattctaaaagctactactcctaaagatatgagtgaaacagaaaaaaacctagtagtcacagagactggagacaacatacattctccttcacatttctctgatatttttaactttgtatctagtacttcaaatcttgaattaaatgaagaaatttattttactgattctcttgaaataaagagaaatgaaaattttccaaaggattatgtgaaattttcagatgaagaagaatttatgaatgaagatgagaaggaaatgaaggaaattctaatggcaggaagtagtttatcagctggagttagtggggaagataaaaccgagatattgaatcccactccagcgatggccaaatctctgaccatagactgtctggaattggcattaccccctgaactggcttttcaacttaatgaattatttggtcctgttggtattgattcagggtctctaacagttgaagattgtgtggttcatatagatctgaatctggcgaaagtgattcatgagaaatggaaagaatctgtaatggagcgacaaagacaagaagaggtgtcttgtggcaagtttatgcaagatccttccttggttggacatactgggcttgataatcctgaacaaaaatcatctcagagaacaggcaaaaaattactgaagactttaacagcatctgaaatgctacctttattggatcattggaatactcaaactaaaaaagtatcactcagagaaataatgtcagaagaaattgccttacaggaaaaacataatttgaaaagggagacccttatgtttgaaaaagattgtgccactaaactaaaggagaagcagctctttaagatatttccagccattaaccaaaattttctggtggacattttcaaggaccacaactattcattagaacacacagtgcaatttcttaactgtgttcttgaaggggaccctgtaaaaacagttgtagcccaagagtttgttcaccaaaatgagaatgtcacatctcatactggccagaagtctaaagagaaaaaggactttgagtacccagactatgatgactacagagcagaggctttccttcaccaacagaagaggatggagtgctacagcaaggccaaagaagcttatcggatagggaaaaaaaatgtcgccaccttttatgcccagcagggtactcttcatgagcagaagatgaaagaagccaatcaccttgctgccatagagatctttgagaaagtcaatgcttcgctgctgccacagaatgttttagacctccatgggctgcatgtggatgaagctctagaacatttgatgagagttttagagaagaagactgaagaatttaagcagaacggtgggaagccctatttgtctgtgattacggggagaggaaaccacagccagggaggagttgctcgcatcaaaccagctgtcattaagtacctcataagccatagcttcaggttctctgaaattaaaccagggtgcttgaaagtcatgctaaagtaaaataaacatccttgaattagaagtatgaaggtttgtaggttaaaattacttttatttgcagtaattcagtcaattctaccctaaagatgtgttttattataaataatattcaattatgaaacaaaaaaattatgatgtttttcaaaatgcaagtgaggtttgattttttactgaatcaaatgcaaatgttacctgttaaagatattacagagaaattttattgattacaaaatatgtaagaaaattatcagctacagttttaaagtttaaaatgctctgattgtttctcagaaaaggttacctttgtattaattgttgtatgacatttagtaatgtcctaaaagtcttttgtgagaggtatttaaagtgctttgagacctgattcatgccccccaaagggtggtattaaaagaggaaaaaggacatagtagtggtagtaaagaaaaaaaggagatctaacaaaaacacttgaatattttttattttcaaaactaaacacataaaatgcttttattttgccatatcctacaggaaggaagacatgcttttgccctttcttctgctttgtatatgaccttgatcttttaccttttgttctgttcttctgtgtgcattttatggaaagaaagttgggtctgagattatattgtaattttatactttctatagacagaaaggttttcagagaaaaagaaatggttaaatatcttccagatgttgctgccttatcgaaatgcttctagaactgtctgtataagtcgtatttcagacagtactaaatacttatattttatttttgaggcatgtaattttaaaactgcagtaggttaaaattctattaaacaaatatagaaaatattttgtttataattggcctggtgtggtggcccacgcctgtaatcccagcactttgggaggccgaggtaggtggatcgcctgaggtcagaagttcaagaccagcctggccaacatggtgaatccccgtctctattaaaaatacaaaaattagctgggtgtggtggcgtgtgcctgtaatcccagctacttgggaggctgaggcaggagaaccgcttaaacctgggaggtggaggttgcagtgacccgagatcgagatcacaccactgcactcagcctgggtgacagagcaagactccgtctcc

SEQ ID NO: 158166 - DNA, 1789 bp, Homo sapiens
  Payload ID: 10969
  Gene Symbol: N4BP2L1
  Gene Name: NEDD4 binding protein 2-like 1
  ENST ID: ENST00000343281
  CDS Start-End: 49-231
gacttcagtaaagggaacccggggctctcgcagccagccctcctgcccatggaggacagtttccttcaatcttttgggaggctgagcctccagccccagcagcagcagcagcggcagcggccgccccggccgcccccgcgggggacacctcctcgccgccacagctttaggaaacacctctacctcctgcgaggcctcccgggctccgggaaaactacactggccaggtgaaaatgtttgatgtgccggctcctttacctcatagttacagtaagaagaaatttaaaaattgggatcaaagatgcagccgccttcccatttaagcagcacagacagcccaaagtgacagttttcctgtacagttactcttctgttatctgtaactgatctatgacattttgggaaaaaacagccaaaaaaaattagtactgagatgctcagaatggagcagtggacaaaggagacaaaaatccctgccttcatggaacatgtattctatcagagaaaaaaaattctcaaggaaaaaaggcaattttagcatctgctctgctctgttctctcaaaaaataagcaaaggatttcacaggtatgccaccggaggtatatatccccaggaaatgtccacatacacacaagagtgttctaggtacttgggaatcatcagtgaacaaaacaaagatcctgcccttgtggaccttatgtgccagaggctcctgaccaccataaagatagaactggggcttaaccctcatcacttctgaagctgatggaatgacaattgcagcatgactttcccagggccctgattttcagcacggatgattttttcttcagggaagatggtgcctatgagttcaatcctgacttcctggaggaagctcatgaatggaaccaaaaaagagcaagaaaagcaatgaggaatggcatatcccccattattattgataataccaacctccacgcctgggaaatgaagccctatgcagtcatggcacttgaaaataactatgaagttatattccgagaacctgacactcgctggaaattcaacgttcaagagttagcaagaagaaacattcatggtgtctcaagagaaaaaatccaccgaatgaaagaacggtatgaacacgatgttacttttcacagtgtgcttcatgcagaaaagccaagcagaatgaacagaaaccaggacaggaataatgcattgccttccaacaatgccagatactggaattcctacacagagtttccaaaccggagggcccacggtggatttacaaatgagagctcctatcacagaaggggcggttgtcaccatggatattagaggcctatcttacagccaggcagaattttcctaagtcagtttctacttcagtttttgttattttttgttgcattttagtcagagctccaattccagtgtaaatagctgaactcaaaagtttctgagcaaagtcattatattcactttcttcaccaaaatttgttaaagtgcttctatatgcatggtctgatgctgggaattctgcagatttgagtaaacagtctctttctctagggtaagaatttgaaaccaaaacttgagaacacacccaagaatatatttacataggttcatagatgaaataaagtgtttatattatatataagcttcagtaccatttgctctgaagtgatctatttattttttcaggaaattcatctccatcggtaaagttgggaaggtggagagaagtggtgggggggcattgctacttatcaaagtgccattgctactttgataatc

SEQ ID NO: 158167 - DNA, 3046 bp, Homo sapiens
  Payload ID: 10969
  Gene Symbol: N4BP2L1
  Gene Name: NEDD4 binding protein 2-like 1
  Uniprot ID: Q5TBK1
  ENST ID: ENST00000380130
  CDS Start-End: 97-828
atcacatggccggagagtcacaaaaacaacagctttggccaagaccgtgacttcagtaaagggaacccggggctctcgcagccagccctcctgcccatggaggacagtttccttcaatcttttgggaggctgagcctccagccccagcagcagcagcagcggcagcggccgccccggccgcccccgcgggggacacctcctcgccgccacagctttaggaaacacctctacctcctgcgaggcctcccgggctccgggaaaactacactggccagacaattgcagcatgactttcccagggccctgattttcagcacggatgattttttcttcagggaagatggtgcctatgagttcaatcctgacttcctggaggaagctcatgaatggaaccaaaaaagagcaagaaaagcaatgaggaatggcatatcccccattattattgataataccaacctccacgcctgggaaatgaagccctatgcagtcatggcacttgaaaataactatgaagttatattccgagaacctgacactcgctggaaattcaacgttcaagagttagcaagaagaaacattcatggtgtctcaagagaaaaaatccaccgaatgaaagaacggtatgaacacgatgttacttttcacagtgtgcttcatgcagaaaagccaagcagaatgaacagaaaccaggacaggaataatgcattgccttccaacaatgccagatactggaattcctacacagagtttccaaaccggagggcccacggtggatttacaaatgagagctcctatcacagaaggggcggttgtcaccatggatattagaggcctatcttacagccaggcagaattttcctaagtcagtttctacttcagtttttgttattttttgttgcattttagtcagagctccaattccagtgtaaatagctgaactcaaaagtttctgagcaaagtcattatattcactttcttcaccaaaatttgttaaagtgcttctatatgcatggtctgatgctgggaattctgcagatttgagtaaacagtctctttctctagggtaagaatttgaaaccaaaacttgagaacacacccaagaatatatttacataggttcatagatgaaataaagtgtttatattatatataagcttcagtaccatttgctctgaagtgatctatttattttttcaggaaattcatctccatcggtaaagttgggaaggtggagagaagtggtgggggggcattgctacttatcaaagtgccattgctactttgataatctatgtatctaaaaatgtgagatgtgcgactcttatgatactgattttcctttaatgttaatatgccagaaagcatacatctaagggaacattgtccttcaaagtagacactttgggaagttatttctttattttaatgatgtatcattgttaaaaatgctgtcaaatccttaatagctacaggagctactgagggaaatcagtgtcattatttaaagtcacgccttgtgtttttactactttattcagcaggattaaacctgaataacttttggctgttgtgctaatagtgtaaataaaataagcctgccttcataaaacactaacttttaaaaggaataaacgacttctaaaattatgcctattaacatgtgtaattagtcggcagctcaaatgtttgggagtgcaagaaattaggcaccccaggatataggtcatacagggatatataaaagccatgctcattacaaaatgagcagttgatgttttatgtggcattaagacaatcaagtcctcacaactctggaatgtcttcttatactgatgctgaatttatgaatccaaattaatttccaacaggttggaatcagatttaatgtgagatcatgatagacaagaccacagaggacgtatgctctatttcttgttggccaacagcttctttctaatgttctgtgaaaaattattttaagtgtcttatataatggtgcttttatggttattaaaaattgtaaatggtatcacatttatatggatttgtcattggatctttttttggttcaacaataaaaaaatttaattacctaaatgccaagaaactcaacaatataccagtttttctgtatcacaggcttatttaccagtcttttttttaataaataggaatcgtaaaggtaatgacaaaagcagccttataatttagttgcttatatatttgatctgtgtacatgagactgttttaacgttatctgacactactgaaacctgctcgacatctccatgactaccaacaccatgtgtaatgttttcttcactaacattttaaaaactggtatctcctttgagtaagtttggctgacaatagtaaatcccaatgaatctaaggtgttatcagctttgctaacttctgtatctccaagcacaacataaaataatctcctaatgatctacttaataatgctcccattttccaggcccaggtagtcctgggtatcttggttgatagggtggtggcataaccagctcaatatggatggcttgactcgtctgggctggtagaggggagaaatgtcagagagctcaaagtggaaattaccatcctttgatttcacatgagcggttcaaaggaccagattcaagccctcctgacttggctggctccctgctttagggtttttggctcacttgggttaagtgagtgaccactatggagaagtggctctgggttacataacttttctagagctctaaagaatagtttcctggcctatttaatgtctcttctttccctagctgacccctgaaatatttggtttgtaaaccataaaaattgattaaatgccatcaactttatcccctgtagaagtgatctgtttttcaactcccatggcttctgatttgtgtaactctttgaacacccaatattgacttgtattgtgttcgctgtttgcatcattcatagaactggcaaatgctctttatgggcaatagggtctcattaaatgattgctgaataaataacacaaatttttaccatt

SEQ ID NO: 158168 - DNA, 903 bp, Homo sapiens
  Payload ID: 10969
  Gene Symbol: N4BP2L1
  Gene Name: NEDD4 binding protein 2-like 1
  Uniprot ID: Q5TBK1
  ENST ID: ENST00000380133
  CDS Start-End: 52-783
cgtgacttcagtaaagggaacccggggctctcgcagccagccctcctgcccatggaggacagtttccttcaatcttttgggaggctgagcctccagccccagcagcagcagcagcggcagcggccgccccggccgcccccgcgggggacacctcctcgccgccacagctttaggaaacacctctacctcctgcgaggcctcccgggctccgggaaaactacactggccagacaattgcagcatgactttcccagggccctgattttcagcacggatgattttttcttcagggaagatggtgcctatgagttcaatcctgacttcctggaggaagctcatgaatggaaccaaaaaagagcaagaaaagcaatgaggaatggcatatcccccattattattgataataccaacctccacgcctgggaaatgaagccctatgcagtcatggcacttgaaaataactatgaagttatattccgagaacctgacactcgctggaaattcaacgttcaagagttagcaagaagaaacattcatggtgtctcaagagaaaaaatccaccgaatgaaagaacggtatgaacacgatgttacttttcacagtgtgcttcatgcagaaaagccaagcagaatgaacagaaaccaggacaggaataatgcattgccttccaacaatgccagatactggaattcctacacagagtttccaaaccggagggcccacggtggatttacaaatgagagctcctatcacagaaggggcggttgtcaccatggatattagaggcctatcttacagccaggcagaattttcctaagttggaatcagatttaatgtgagatcatgatagacaagaccacagaggacgtatgctctatttcttgttggccaacagcttctttc

SEQ ID NO: 158169 - DNA, 2994 bp, Homo sapiens
  Payload ID: 10969
  Gene Symbol: N4BP2L1
  Gene Name: NEDD4 binding protein 2-like 1
  Uniprot ID: Q5TBK1
  ENST ID: ENST00000380139
  CDS Start-End: 52-573
cgtgacttcagtaaagggaacccggggctctcgcagccagccctcctgcccatggaggacagtttccttcaatcttttgggaggctgagcctccagccccagcagcagcagcagcggcagcggccgccccggccgcccccgcgggggacacctcctcgccgccacagctttaggaaacacctctacctcctgcgaggcctcccgggctccgggaaaactacactggccagacaattgcagcatgactttcccagggccctgattttcagcacggatgattttttcttcagggaagatggtgcctatgagttcaatcctgacttcctggaggaagctcatgaatggaaccaaaaaagagcaagaaaagcaatgaggaatggcatatcccccattattattgataataccaacctccacgcctgggaaatgaagccctatgcagtcatggtatttcagaccgaacaaaagaatcttttcaggctggaaatggacatggtagttttcaggccagaaatgaagaaacattcatggtgtctcaagagaaaaaatccaccgaatgaaagaacggtatgaacacgatgttacttttcacagtgtgcttcatgcagaaaagccaagcagaatgaacagaaaccaggacaggaataatgcattgccttccaacaatgccagatactggaattcctacacagagtttccaaaccggagggcccacggtggatttacaaatgagagctcctatcacagaaggggcggttgtcaccatggatattagaggcctatcttacagccaggcagaattttcctaagtcagtttctacttcagtttttgttattttttgttgcattttagtcagagctccaattccagtgtaaatagctgaactcaaaagtttctgagcaaagtcattatattcactttcttcaccaaaatttgttaaagtgcttctatatgcatggtctgatgctgggaattctgcagatttgagtaaacagtctctttctctagggtaagaatttgaaaccaaaacttgagaacacacccaagaatatatttacataggttcatagatgaaataaagtgtttatattatatataagcttcagtaccatttgctctgaagtgatctatttattttttcaggaaattcatctccatcggtaaagttgggaaggtggagagaagtggtgggggggcattgctacttatcaaagtgccattgctactttgataatctatgtatctaaaaatgtgagatgtgcgactcttatgatactgattttcctttaatgttaatatgccagaaagcatacatctaagggaacattgtccttcaaagtagacactttgggaagttatttctttattttaatgatgtatcattgttaaaaatgctgtcaaatccttaatagctacaggagctactgagggaaatcagtgtcattatttaaagtcacgccttgtgtttttactactttattcagcaggattaaacctgaataacttttggctgttgtgctaatagtgtaaataaaataagcctgccttcataaaacactaacttttaaaaggaataaacgacttctaaaattatgcctattaacatgtgtaattagtcggcagctcaaatgtttgggagtgcaagaaattaggcaccccaggatataggtcatacagggatatataaaagccatgctcattacaaaatgagcagttgatgttttatgtggcattaagacaatcaagtcctcacaactctggaatgtcttcttatactgatgctgaatttatgaatccaaattaatttccaacaggttggaatcagatttaatgtgagatcatgatagacaagaccacagaggacgtatgctctatttcttgttggccaacagcttctttctaatgttctgtgaaaaattattttaagtgtcttatataatggtgcttttatggttattaaaaattgtaaatggtatcacatttatatggatttgtcattggatctttttttggttcaacaataaaaaaatttaattacctaaatgccaagaaactcaacaatataccagtttttctgtatcacaggcttatttaccagtcttttttttaataaataggaatcgtaaaggtaatgacaaaagcagccttataatttagttgcttatatatttgatctgtgtacatgagactgttttaacgttatctgacactactgaaacctgctcgacatctccatgactaccaacaccatgtgtaatgttttcttcactaacattttaaaaactggtatctcctttgagtaagtttggctgacaatagtaaatcccaatgaatctaaggtgttatcagctttgctaacttctgtatctccaagcacaacataaaataatctcctaatgatctacttaataatgctcccattttccaggcccaggtagtcctgggtatcttggttgatagggtggtggcataaccagctcaatatggatggcttgactcgtctgggctggtagaggggagaaatgtcagagagctcaaagtggaaattaccatcctttgatttcacatgagcggttcaaaggaccagattcaagccctcctgacttggctggctccctgctttagggtttttggctcacttgggttaagtgagtgaccactatggagaagtggctctgggttacataacttttctagagctctaaagaatagtttcctggcctatttaatgtctcttctttccctagctgacccctgaaatatttggtttgtaaaccataaaaattgattaaatgccatcaactttatcccctgtagaagtgatctgtttttcaactcccatggcttctgatttgtgtaactctttgaacacccaatattgacttgtattgtgttcgctgtttgcatcattcatagaactggcaaatgctctttatgggcaatagggtctcattaaatgattgctgaataaataacacaaatttttaccatta

SEQ ID NO: 158170 - DNA, 1897 bp, Homo sapiens
  Payload ID: 10969
  Gene Symbol: N4BP2L1
  Gene Name: NEDD4 binding protein 2-like 1
  ENST ID: ENST00000530622
  CDS Start-End: 219-632
ccctaatgcatgaggctcctgaccaccataaagatagaactggggcttaaccctcatcacttctgaagctgatggaatgacaattgcagcatgactttcccagggccctgattttcagcacggatgattttttcttcagggaagatggtgcctatgagttcaatcctgacttcctggaggaagctcatgaatggaaccaaaaaagagcaagaaaagcaatgaggaatggcatatcccccattattattgataataccaacctccacgcctgggaaatgaagccctatgcagtcatggcacttgaaaataactatgaagttatattccgagaacctgacactcgctggaaattcaacgttcaagagttagcaagaagaaacattcatggtgtctcaagagaaaaaatccaccgaatgaaagaacggtatgaacacgatgttacttttcacagtgtgcttcatgcagaaaagccaagcagaatgaacagaaaccaggacaggaataatgcattgccttccaacaatgccagatactggaattcctacacagagtttccaaaccggagggcccacggtggatttacaaatgagagctcctatcacagaaggggcggttgtcaccatggatattagaggcctatcttacagccaggcagaattttcctaagtcagtttctacttcagtttttgttattttttgttgcattttagtcagagctccaattccagtgtaaatagctgaactcaaaagtttctgagcaaagtcattatattcactttcttcaccaaaatttgttaaagtgcttctatatgcatggtctgatgctgggaattctgcagatttgagtaaacagtctctttctctagggtaagaatttgaaaccaaaacttgagaacacacccaagaatatatttacataggttcatagatgaaataaagtgtttatattatatataagcttcagtaccatttgctctgaagtgatctatttattttttcaggaaattcatctccatcggtaaagttgggaaggtggagagaagtggtgggggggcattgctacttatcaaagtgccattgctactttgataatctatgtatctaaaaatgtgagatgtgcgactcttatgatactgattttcctttaatgttaatatgccagaaagcatacatctaagggaacattgtccttcaaagtagacactttgggaagttatttctttattttaatgatgtatcattgttaaaaatgctgtcaaatccttaatagctacaggagctactgagggaaatcagtgtcattatttaaagtcacgccttgtgtttttactactttattcagcaggattaaacctgaataacttttggctgttgtgctaatagtgtaaataaaataagcctgccttcataaaacactaacttttaaaaggaataaacgacttctaaaattatgcctattaacatgtgtaattagtcggcagctcaaatgtttgggagtgcaagaaattaggcaccccaggatataggtcatacagggatatataaaagccatgctcattacaaaatgagcagttgatgttttatgtggcattaagacaatcaagtcctcacaactctggaatgtcttcttatactgatgctgaatttatgaatccaaattaatttccaacaggttggaatcagatttaatgtgagatcatgatagacaagaccacagaggacgtatgctctatttcttgttggccaacagcttctttctaatgttctgtgaaaaattattttaagtgtcttatataatggtgcttttatggttattaaaaattgtaaatggtatcacatttatatggatttgtcattggatctttttttggttcaacaataaaaaaatttaattacc

SEQ ID NO: 158171 - DNA, 541 bp, Homo sapiens
  Payload ID: 10969
  Gene Symbol: N4BP2L1
  Gene Name: NEDD4 binding protein 2-like 1
  ENST ID: ENST00000495479
  CDS Start-End: 1-478
gcggccgccccggccgcccccgcgggggacacctcctcgccgccacagctttaggaaacacctctacctcctgcgaggcctcccgggctccgggaaaactacactggccagacaattgcagcatgactttcccagggccctgattttcagcacggatgattttttcttcagggaagatggtgcctatgagttcaatcctgacttcctggaggaagctcatgaatggaaccaaaaaagagcaagaaaagcaatgaggaatggcatatcccccattattattgataataccaacctccacgcctgggaaatgaagccctatgcagtcatggcacttgaaaataactatgaagttatattccgagaacctgacactcgctggaaattcaacgttcaagagttagcaagaagaaacattcatggtgtctcaagagaaaaaatccaccgaatgaaagaacggttggaatcagatttaatgtgagatcatgatagacaagaccacagaggacgtatgctctatttcttgttggccaacagcttcttt

SEQ ID NO: 158172 - DNA, 1145 bp, Homo sapiens
  Payload ID: 10969
  Gene Symbol: N4BP2L1
  Gene Name: NEDD4 binding protein 2-like 1
  ENST ID: ENST00000464470
  CDS Start-End: 1-238
gcggccgccccggccgcccccgcgggggacacctcctcgccgccacagctttaggaaacacctctacctcctgcgaggcctcccgggctccgggaaaactacactggccagggacgactggagtgagcactggcctgggagtctgaagattgtgccttcagacctacttcgtcacttactagctggcgactttggtcagtcatctagtttttccgggccttatgttccttacatgtgactactaaaaggctactagattataggatttattaaagatccttctgactcttaatttccagtggtcagattaaaaatagtttgctaataatggctatgttaaagagctctgaccttggagtcaatttatggctccacatccaagctctaccattcactagttttgcttttcacccaacccctctgtgcctcggtttccttttctgttaaatggggatatctgttctgtttgcctctgagggttttgtgaacattaaatgtgtgtgggaggactttttaaacttaaagtgctatatacattttaagaggtgttagttactgctccgttgttggtcagctgagataaatcttcagtgttccctggatcctggctctggagtgaagaaggtagcttggcagttgactttgagtcctcccgtttcgctgggcattggcagttctgggagcagagcagccttggcatgccatggggtggattgtgtgtttatagaaaagtctgggacgtaagcgaggaaatgggccacagctcagcggaagggaggccggtggtgaggatggaatggtggagaggcaggctcaggtgtggcccaccaggagctgccttccccacttttttgggaggtagggtggggaagaagaaaagagcaaattgtttaaaaatacacatgtatatagaaaatagtaaaactgtaaggttatctgtgtgttgttggattctgggaaattcacattttctctattctctgtattttccaaattttctataacgaatatgtatttcttagaataaaaatttttttcttcaaaatttggaggaaatcgctttttacaaatgtgggttcatctttttctgcttaaccttttttctcatttgattaaagaactaataaaaatgtttttgaaattaa

SEQ ID NO: 158173 - DNA, 2032 bp, Homo sapiens
  Payload ID: 10969
  Gene Symbol: N4BP2L1
  Gene Name: NEDD4 binding protein 2-like 1
  Uniprot ID: Q5TBK1
  ENST ID: ENST00000613078
  CDS Start-End: 97-618
atcacatggccggagagtcacaaaaacaacagctttggccaagaccgtgacttcagtaaagggaacccggggctctcgcagccagccctcctgcccatggaggacagtttccttcaatcttttgggaggctgagcctccagccccagcagcagcagcagcggcagcggccgccccggccgcccccgcgggggacacctcctcgccgccacagctttaggaaacacctctacctcctgcgaggcctcccgggctccgggaaaactacactggccagacaattgcagcatgactttcccagggccctgattttcagcacggatgattttttcttcagggaagatggtgcctatgagttcaatcctgacttcctggaggaagctcatgaatggaaccaaaaaagagcaagaaaagcaatgaggaatggcatatcccccattattattgataataccaacctccacgcctgggaaatgaagccctatgcagtcatggtatttcagaccgaacaaaagaatcttttcaggctggaaatggacatggtagttttcaggccagaaatgaagaaacattcatggtgtctcaagagaaaaaatccaccgaatgaaagaacggtatgaacacgatgttacttttcacagtgtgcttcatgcagaaaagccaagcagaatgaacagaaaccaggacaggaataatgcattgccttccaacaatgccagatactggaattcctacacagagtttccaaaccggagggcccacggtggatttacaaatgagagctcctatcacagaaggggcggttgtcaccatggatattagaggcctatcttacagccaggcagaattttcctaagttggaatcagatttaatgtgagatcatgatagacaagaccacagaggacgtatgctctatttcttgttggccaacagcttctttctaatgttctgtgaaaaattattttaagtgtcttatataatggtgcttttatggttattaaaaattgtaaatggtatcacatttatatggatttgtcattggatctttttttggttcaacaataaaaaaatttaattacctaaatgccaagaaactcaacaatataccagtttttctgtatcacaggcttatttaccagtcttttttttaataaataggaatcgtaaaggtaatgacaaaagcagccttataatttagttgcttatatatttgatctgtgtacatgagactgttttaacgttatctgacactactgaaacctgctcgacatctccatgactaccaacaccatgtgtaatgttttcttcactaacattttaaaaactggtatctcctttgagtaagtttggctgacaatagtaaatcccaatgaatctaaggtgttatcagctttgctaacttctgtatctccaagcacaacataaaataatctcctaatgatctacttaataatgctcccattttccaggcccaggtagtcctgggtatcttggttgatagggtggtggcataaccagctcaatatggatggcttgactcgtctgggctggtagaggggagaaatgtcagagagctcaaagtggaaattaccatcctttgatttcacatgagcggttcaaaggaccagattcaagccctcctgacttggctggctccctgctttagggtttttggctcacttgggttaagtgagtgaccactatggagaagtggctctgggttacataacttttctagagctctaaagaatagtttcctggcctatttaatgtctcttctttccctagctgacccctgaaatatttggtttgtaaaccataaaaattgattaaatgccatcaactttatcccctgtagaagtgatctgtttttcaactcccatggcttctgatttgtgtaactctttgaacacccaatattgacttgtattgtgttcgctgtttgcatcattcatagaactggcaaatgctctttatgggcaatagggtctcattaaatgattgctgaataaataacacaaatttttaccatt

SEQ ID NO: 158174 - DNA, 2519 bp, Homo sapiens
  Payload ID: 10969
  Gene Symbol: N4BP2L1
  Gene Name: NEDD4 binding protein 2-like 1
  ENST ID: ENST00000459716
  CDS Start-End: 230-640
cgtcacccttgttttccgggctgtgagtctcccagcgtccccagctttccaggtagggacgccccctcccacgcagcacggttccggcgggtggaaaggaggggctgggctcccagcgcccgcccctctatccatcacatggccggagagtcacaaaaacaacagctttggccaagaccgtgacttcagtaaagggaacccggggctctcgcagccagccctcctgcccatggaggacagtttccttcaatcttttgggaggctgagcctccagccccagcagcagcagcagcggcagcggccgccccggccgcccccgcgggggacacctcctcgccgccacagctttaggaaacacctctacctcctgcgaggcctcccgggctccgggaaaactacactggccagatgctcagaatggagcagtggacaaaggagacaaaaatccctgccttcatggaacatgtattctatcagagaaaaaaaattctcaaggaaaaaaggcaattttagcatctgctctgctctgttctctcaaaaaataagcaaaggatttcacagtgttctaggtacttgggaatcatcagtgaacaaaacaaagatcctgcccttgtggaccttatgtgccagaggctcctgaccaccataaagatagaactggggcttaaccctcatcacttctgaagctgatggaatgacaattgcagcatgactttcccagggccctgattttcagcacggatgattttttcttcagggaagatggtgcctatgagttcaatcctgacttcctggaggaagctcatgaatggaaccaaaaaagagcaagaaaagcaatgaggaatggcatatcccccattattattgataataccaacctccacgcctgggaaatgaagccctatgcagtcatggcacttgaaaataactatgaagttatattccgagaacctgacactcgctggaaattcaacgttcaagagttagcaagaagaaacattcatggtgtctcaagagaaaaaatccaccgaatgaaagaacggtatgaacacgatgttacttttcacagtgtgcttcatgcagaaaagccaagcagaatgaacagaaaccaggacaggaataatgcattgccttccaacaatgccagatactggaattcctacacagagtttccaaaccggagggcccacggtggatttacaaatgagagctcctatcacagaaggggcggttgtcaccatggatattagaggcctatcttacagccaggcagaattttcctaagtcagtttctacttcagtttttgttattttttgttgcattttagtcagagctccaattccagtgtaaatagctgaactcaaaagtttctgagcaaagtcattatattcactttcttcaccaaaatttgttaaagtgcttctatatgcatggtctgatgctgggaattctgcagatttgagtaaacagtctctttctctagggtaagaatttgaaaccaaaacttgagaacacacccaagaatatatttacataggttcatagatgaaataaagtgtttatattatatataagcttcagtaccatttgctctgaagtgatctatttattttttcaggaaattcatctccatcggtaaagttgggaaggtggagagaagtggtgggggggcattgctacttatcaaagtgccattgctactttgataatctatgtatctaaaaatgtgagatgtgcgactcttatgatactgattttcctttaatgttaatatgccagaaagcatacatctaagggaacattgtccttcaaagtagacactttgggaagttatttctttattttaatgatgtatcattgttaaaaatgctgtcaaatccttaatagctacaggagctactgagggaaatcagtgtcattatttaaagtcacgccttgtgtttttactactttattcagcaggattaaacctgaataacttttggctgttgtgctaatagtgtaaataaaataagcctgccttcataaaacactaacttttaaaaggaataaacgacttctaaaattatgcctattaacatgtgtaattagtcggcagctcaaatgtttgggagtgcaagaaattaggcaccccaggatataggtcatacagggatatataaaagccatgctcattacaaaatgagcagttgatgttttatgtggcattaagacaatcaagtcctcacaactctggaatgtcttcttatactgatgctgaatttatgaatccaaattaatttccaacaggttggaatcagatttaatgtgagatcatgatagacaagaccacagaggacgtatgctctatttcttgttggccaacagcttctttctaatgttctgtgaaaaattattttaagtgtcttatataatggtgcttttatggttattaaaaattgtaaatggtatcacatttatatggatttgtcattggatctttttttggttcaacaataaaaaaatttaattacctaaa

SEQ ID NO: 158175 - DNA, 2009 bp, Homo sapiens
  Payload ID: 10969
  Gene Symbol: N4BP2L1
  Gene Name: NEDD4 binding protein 2-like 1
  ENST ID: ENST00000635178
  CDS Start-End: 49-330
gacttcagtaaagggaacccggggctctcgcagccagccctcctgcccatggaggacagtttccttcaatcttttgggaggctgagcctccagccccagcagcagcagcagcggcagcggccgccccggccgcccccgcgggggacacctcctcgccgccacagctttaggaaacacctctacctcctgcgaggcctcccgggctccgggaaaactacactggccagtgttctaggtacttgggaatcatcagtgaacaaaacaaagatcctgcccttgtggaccttatgtgccagagacaattgcagcatgactttcccagggccctgattttcagcacggatgattttttcttcagggaagatggtgcctatgagttcaatcctgacttcctggaggaagctcatgaatggaaccaaaaaagagcaagaaaagcaatgaggaatggcatatcccccattattattgataataccaacctccacgcctgggaaatgaagccctatgcagtcatggcacttgaaaataactatgaagttatattccgagaacctgacactcgctggaaattcaacgttcaagagttagcaagaagaaacattcatggtgtctcaagagaaaaaatccaccgaatgaaagaacggtatgaacacgatgttacttttcacagtgtgcttcatgcagaaaagccaagcagaatgaacagaaaccaggacaggaataatgcattgccttccaacaatgccagatactggaattcctacacagagtttccaaaccggagggcccacggtggatttacaaatgagagctcctatcacagaaggggcggttgtcaccatggatattagaggcctatcttacagccaggcagaattttcctaagtcagtttctacttcagtttttgttattttttgttgcattttagtcagagctccaattccagtgtaaatagctgaactcaaaagtttctgagcaaagtcattatattcactttcttcaccaaaatttgttaaagtgcttctatatgcatggtctgatgctgggaattctgcagatttgagtaaacagtctctttctctagggtaagaatttgaaaccaaaacttgagaacacacccaagaatatatttacataggttcatagatgaaataaagtgtttatattatatataagcttcagtaccatttgctctgaagtgatctatttattttttcaggaaattcatctccatcggtaaagttgggaaggtggagagaagtggtgggggggcattgctacttatcaaagtgccattgctactttgataatctatgtatctaaaaatgtgagatgtgcgactcttatgatactgattttcctttaatgttaatatgccagaaagcatacatctaagggaacattgtccttcaaagtagacactttgggaagttatttctttattttaatgatgtatcattgttaaaaatgctgtcaaatccttaatagctacaggagctactgagggaaatcagtgtcattatttaaagtcacgccttgtgtttttactactttattcagcaggattaaacctgaataacttttggctgttgtgctaatagtgtaaataaaataagcctgccttcataaaacactaacttttaaaaggaataaacgacttctaaaattatgcctattaacatgtgtaattagtcggcagctcaaatgtttgggagtgcaagaaattaggcaccccaggatataggtcatacagggatatataaaagccatgctcattacaaaatgagcagttgatgttttatgtggcattaagacaatcaagtcctcacaactctggaatgtcttcttatactgatgctgaatttatgaatccaaattaatttccaacaggttggaatcagatttaatgtgagatcatgatagacaagaccacagaggacgtatgctctatttcttgttggccaacagcttctttctaatgttctgtgaaaaattattttaagtgtct

SEQ ID NO: 158176 - DNA, 2959 bp, Homo sapiens
  Payload ID: 10969
  Gene Symbol: N4BP2L1
  Gene Name: NEDD4 binding protein 2-like 1
  ENST ID: ENST00000635608
  CDS Start-End: 1-499
gcggccgccccggccgcccccgcgggggacacctcctcgccgccacagctttaggaaacacctctacctcctgcgaggcctcccgggctccgggaaaactacactggccagacaattgcagcatgactttcccagggccctgattttcagcacggatgattttttcttcagggaagatggtgcctatgagttcaatcctgacttcctggaggaagctcatgaatggaaccaaaaaagagcaagaaaagcaatgaggaatggcatatcccccattattattgataataccaacctccacgcctgggaaatgaagccctatgcagtcatggcacttgaaaataactatgaagttatattccgagaacctgacactcgctggaaattcaacgttcaagagttagcaaggcagatagtgtcttcaaagtggatctgtggactactccatcagaattgcctcaggtggctattaaaatccgagttcatggaccccattcagtagttggaatctctgaagaaacattcatggtgtctcaagagaaaaaatccaccgaatgaaagaacggtatgaacacgatgttacttttcacagtgtgcttcatgcagaaaagccaagcagaatgaacagaaaccaggacaggaataatgcattgccttccaacaatgccagatactggaattcctacacagagtttccaaaccggagggcccacggtggatttacaaatgagagctcctatcacagaaggggcggttgtcaccatggatattagaggcctatcttacagccaggcagaattttcctaagtcagtttctacttcagtttttgttattttttgttgcattttagtcagagctccaattccagtgtaaatagctgaactcaaaagtttctgagcaaagtcattatattcactttcttcaccaaaatttgttaaagtgcttctatatgcatggtctgatgctgggaattctgcagatttgagtaaacagtctctttctctagggtaagaatttgaaaccaaaacttgagaacacacccaagaatatatttacataggttcatagatgaaataaagtgtttatattatatataagcttcagtaccatttgctctgaagtgatctatttattttttcaggaaattcatctccatcggtaaagttgggaaggtggagagaagtggtgggggggcattgctacttatcaaagtgccattgctactttgataatctatgtatctaaaaatgtgagatgtgcgactcttatgatactgattttcctttaatgttaatatgccagaaagcatacatctaagggaacattgtccttcaaagtagacactttgggaagttatttctttattttaatgatgtatcattgttaaaaatgctgtcaaatccttaatagctacaggagctactgagggaaatcagtgtcattatttaaagtcacgccttgtgtttttactactttattcagcaggattaaacctgaataacttttggctgttgtgctaatagtgtaaataaaataagcctgccttcataaaacactaacttttaaaaggaataaacgacttctaaaattatgcctattaacatgtgtaattagtcggcagctcaaatgtttgggagtgcaagaaattaggcaccccaggatataggtcatacagggatatataaaagccatgctcattacaaaatgagcagttgatgttttatgtggcattaagacaatcaagtcctcacaactctggaatgtcttcttatactgatgctgaatttatgaatccaaattaatttccaacaggttggaatcagatttaatgtgagatcatgatagacaagaccacagaggacgtatgctctatttcttgttggccaacagcttctttctaatgttctgtgaaaaattattttaagtgtcttatataatggtgcttttatggttattaaaaattgtaaatggtatcacatttatatggatttgtcattggatctttttttggttcaacaataaaaaaatttaattacctaaatgccaagaaactcaacaatataccagtttttctgtatcacaggcttatttaccagtcttttttttaataaataggaatcgtaaaggtaatgacaaaagcagccttataatttagttgcttatatatttgatctgtgtacatgagactgttttaacgttatctgacactactgaaacctgctcgacatctccatgactaccaacaccatgtgtaatgttttcttcactaacattttaaaaactggtatctcctttgagtaagtttggctgacaatagtaaatcccaatgaatctaaggtgttatcagctttgctaacttctgtatctccaagcacaacataaaataatctcctaatgatctacttaataatgctcccattttccaggcccaggtagtcctgggtatcttggttgatagggtggtggcataaccagctcaatatggatggcttgactcgtctgggctggtagaggggagaaatgtcagagagctcaaagtggaaattaccatcctttgatttcacatgagcggttcaaaggaccagattcaagccctcctgacttggctggctccctgctttagggtttttggctcacttgggttaagtgagtgaccactatggagaagtggctctgggttacataacttttctagagctctaaagaatagtttcctggcctatttaatgtctcttctttccctagctgacccctgaaatatttggtttgtaaaccataaaaattgattaaatgccatcaactttatcccctgtagaagtgatctgtttttcaactcccatggcttctgatttgtgtaactctttgaacacccaatattgacttgtattgtgttcgctgtttgcatcattcatagaactggcaaatgctctttatgggcaatagggtctcattaaatgattg

SEQ ID NO: 158177 - DNA, 9427 bp, Homo sapiens
  Payload ID: 10970
  Gene Symbol: N4BP2L2
  Gene Name: NEDD4 binding protein 2-like 2
  Uniprot ID: Q92802
  ENST ID: ENST00000267068
  CDS Start-End: 166-1917
cggaggtgaggtttgttaccgcgattctgagaggtgggcttttagtccctccagacctcggctttagtgctgtctccgcttttctttcaccttcacagaggttcgtgtcttcctaaaagaaggttttattgggaggtaaaggtcaatgcgtaggggtagagtaagatgtcttatggtgaaattgaaggtaaattcttgggacctagagaagaagtaacgagtgagccacgctgtaaaaaattgaagtcaaccacagagtcgtatgtttttcacaatcatagtaatgctgattttcacagaatccaagagaaaactggaaatgattgggtccctgtgaccatcattgatgtcagaggacatagttatttgcaggagaacaaaatcaaaactacagatttgcatagacctttgcatgatgagatgcctggtaatagaccagatgttattgaatccattgattcacaggttttacaggaagcacgtcctccattagtatccgcagacgatgagatatatagcacaagtaaagcatttataggacccatttacaaaccccctgagaaaaagaaacgtaatgaagggaggaatgaggcacatgttctaaatggtataaatgacagaggaggacaaaaagagaaacagaaatttaactctgaaaaatcagagattgacaatgaattattccagttttacaaagaaattgaagagcttgaaaaggaaaaagatggttttgagaacagttgtaaagaatctgaaccttctcaggaacaatttgttccattttatgagggtcataataatggtctcttaaaacctgatgaagaaaagaaagatcttagtaataaagctatgccatcacattgtgattatcagcagaacttggggaatgagccagacaaatatccctgtaatggacaagtaatacctacattttgtgacacttcatttacttctttcaggcctgaatggcagtcagtatatccttttatagtgccctatggtccccctcttcccagtttgaactatcatttaaacattcagagattcagtggtccaccaaatccaccatcaaatattttccaagcccaagatgactctcagatacaaaatggatattatgtaaataattgtcatgttaactggaattgcatgacttttgatcagaacaatgaatatactgactgtagtgagaataggagtagtgttcatccctctggaaatggctgcagtatgcaagatcgatatgtgagtaatggtttctgtgaagtcagagaaagatgctggaaagatcattgtatggacaagcataatggaacagacaggtttgtgaaccagcagtttcaagaggaaaagttaaataaattgcagaagttacttattcttttaagaggtctgcctggttctgggaaaacaacattgtctcgaattctgcttggtcagaatcgtgatggcattgtgttcagcactgatgactattttcaccatcaagatgggtacaggtataatgttaatcaacttggtgatgcccatgactggaaccagaacagagcaaaacaagctatcgatcagggaagatctccagttataatagataacactaatatacaagcttgggaaatgaagccatatgtggaagtggccataggaaaaggatacagagtagagtttcatgaacctgaaacttggtggaaatttgatcctgaagaattagaaaagaggaataaacatggtgtgtctcgaaagaagattgctcagatgttggatcgttatgaatatcaaatgtccatttctattgtaatgaattcagtggaaccatcacacaaaagcacacaaagacctcctcctccacaggggagacagaggtggggaggctctcttggctcacataatcgtgtctgtgtcacaaataatcattaaattagctattttcagctaacacatttgttgttgcacttgaaaaagagttagtgagcctgtcttggagtttaagtagtttcaaataaaaaaaggctacagtgcctcacaaaggatgttcccagcaagttgtttaaattcccagcaagttgttaaagtgtaaataaaaatatatgaaattgtattttaaatgtttttatattctcttgttgtaatactcttggctgttatggaagcacctgagtaatagagtggtgggtaggagctaggatgtttttctacaatcgaattttaaactaatttatctattttatagacactattgaacagttttttaatagttcatatctaaatctaacttttcataaaactttacggtttttccttcactaccttaaatatgcaagaaatactgacttggtatagggtaccttagttttctctattcattagacaggtaaaattatatttcagctgattgatctgtgtgacaaaattatttcttagctataatcagcacatcacttagttcaaacaaaattccccagcaaatgttagatagtaggtatatcagtcacctggggagttttcttcataatatgcatattcatcttgtaatgcatacatagttatcatcctccttctcaacccatctccctaaccccacatgcttgccagttcttgaagggataaagtgattctaataatgttttacttctctctgttcaatttaatgtgatataattctagtataaaaatattttggacagttgcttaacatggtcataagaggatttgtactatagaatatcttctagtactaatttttctgtagagcaaattatatttctctcactggatagtttttagatgtgtttcttcatataaaattaaaaactgagatggaattcatttcagaggtcttgtcattcatcccctgccttcaaaccaagctttacctagactaacctagataattaagcatttctctttgcaacatgaggaaaaaaacactactacttctcttaataccattgttaccaatgtcttctgaagaatatttcttcaacagttttgatttacttttttgatttactctttttaggggaaaaaaaacccagctaattacaatgctgtcttaaaaattaagcattatgattctttatatgttttacataatattttgtggcctttaagctttctcctaaaccagcacatcttgaatcccatagtatttctttgttttaaaaccttttgctattcctttcaactttagatattctctcacatctttatattactttttaagttgtcaggccaaaaactagattcactgctatcaacaaggtctttgttacattgcctttagtgaaataagaatatgattttatttgtactattcagtgctgttaacatttgaatgaatattacctttatcttgtttaatacgtgtgtttgtatatatttgttcatcttaactacgatgtaagaatatgctaattcatgttttgtgtgtaaatgtatattgtatacatatacacatcttcatctatgttttcatatattcttttatttcagagtaatacttgttggtgtttggacttgtgtttctaagtattttattctgtagattagcgcagtttgaaaattgtacaaaaggatttcattttgggacaggtgaaacaactcttaggtagactatatgtccctttctttctgtctgtcttcataaacttaggagtaatagtactataaatttagctttttggccgggcacggtggctaacacctgtaatcccagcactttgggaggccgaggtgggcagatcacctgaggtcaggagtttgagaccagcctgtctgacacagtgaaaccacatctctacttaaaatacaaaaatcagctgggtgtggtggtgtgtgcctgtaatcccagctacttgggaggctgaggggggagaatcgcttgaacctgggaggcagagtttgcagtaagcagagattgcgccacttgcactccagcctgtgagacagagtgagactccttctcaaaaaaaaaaattagtttttttaaaataacttttacatttatttttggaaagtagagtattacctttgggagaaacagattatgaggaaatatgttcatattaagtttattttaatttccagattttattatagacttgtcttcatctcctagttctgactactaaataataatcagttagagatcattcgtcattaccaattaattttttacattataatgttagccaactactgttgcatcacagagtccaaataaataaataaatcttactgaggctggaaagctaacattcttactcagaattaaacaaacaaggtcttgtcctgctacgtgggctggatggagtgtggtggcgtgatcatagcttgctgaaaccttgaactcctaggctcaagaggtcctcctttctcagcatcccaagtagctgggacttcaagcatgcactgccacacctggcttattttgcattaaaaaaatttttttgtagagatggggtcttgccttgtttcccaaactggtcttgtactcctggcctcaagtgatcctcccaaagtgctgagattacaggcatgagccactgcaccagctttagtgatttttttttttttttttgagacagagtctttctctggatcacccaagctggagtacagtggcatgatgtcagctcactgcaacctccacctcccaggttcaagcgattctcctgcctcagcctcccgagtagctgggattagaggcactcgccaccatacctggataatttttgtatttttagtagagacagtgtttcaccatgttggccaggcaggtctcgaactcctgaccccaggtgatccgcctgccttggcctcccaaagtgctgggtgggattacaggcatgagccaccacaccaggcctagttggtttttttaaagtggaaaaacagttgttttcctaaacattgtggctaattttaattaaaaacagaatggaggaatgaatatgcagtggaaatactaaaatcactgtttaaagtcattgcttggtgtttaaaaatctataaaaatgtgaaatttacaatttttcatcaaaattctattcagacagtcttttttgggggttggggttaagagatgaggtctctttctgttgtatagactggacttgaactggtctcaagtgatcctcctgcctcagcctacctggtagctgggattacaggcacccagccaggtataatgttagtggaatagacccctgctgctatgccctattctaaccatctccatcacaaataattaaagtggatattaatcatatttacctaagatggagtacatcttagttaagtagaatacaacttctagtttggttcagtaagattaaattgtatttatttttttgtttgttccataggtttagtgcagaagttacttttttgtggtaaatgaatttatgattttttatgtttcataattttagtgaaaattcttgtgtggtaattaatttgaacttttgatactgctttttaaccaggtaatctttattttcagtatttatctttgtaaaagataatgttagcttttttatatttttgtctgttttaaaagtaagattatttacaaaagactgaatttttttaattgttggagtgggtgatttaagtatttgaactttgcttatctcttgtctaattaatacagattctggaattttccagttttacgtatagataagttttgaaagtatgatttaagaggatatgaaatgtttgtattggctatacttgaatttttttattgcaaaaatgtctgattttctgagactggttttctaactatttataaagaaaattggttgtggtctctttggaaaatgtagaagaaatgtagttgtgtgttctagtgccttggccagataggcttgctagtctttattgaagtttaatgtattctgacatgaatacaataactaataagggctaaagttgtattgttgttgctttttttttcttaacatttgcaatccacattgaacagtgttttataacaaaatcttagcttatgattcagaataaataattcagaacattcagaataaataatttggtggcagcagcaggagttaagttagtgattttttagagttaagttttaggagctacaatttataaattaaaaattttcctattaaagttaccagctgtgtcttcgtgaattttctgaggagagattgtattaagggattaatgaatgtttggtgataagactggcatacaaatctttatttttaaaaggtatcattaaaacagttggcttccctgtatgtatactgtatttccttcttacacagtccttaggctggtaagaagtagtagtaaatttcttgaaatagaccctaaaaatatagggattagtgattgtcttatgtgtcattttgattccttttttactttgcaaagcagtatttagattgattcaatttagttgatttaaattgccaaatatgttaagcctaagttttcacttttgcatggtttgtaagtttcagagcaaaccttgaaaagctaatgattatgattattggcaactaagttcagaaaacatgtaaaagaatggctacaatttactctcaataatttagactacattgagtggtgtaatttttgtaatagaatatacatgtatgtaagcagtaatttggaagatctcctacagaaattcttttttttttttttgagacggagtctcgctctgttgcccaggctggagtccagtggcgcgatcttggctcactgcaagctctgcctcccgggttcacgccattctcctgcctcagcctcctgagtagctgggactacaggcgcccgccaccatgcccgggtaatttttttgtgtttttaatagagacggggtttcaccttgttagccaggatggtgttgatctcctgacctcgtgatccacccgcctcggcctcccaaagtgctgggattactggcatgagccactgcgcctggccagaaattcttaatgtattatcactctatgcacaagaacaagaagaaggagtagcacaaataactttggaaagagagtctcaacagtaaatagttattctagaagctaagctgtatgtattgaaaagttttgactttttgtatatccaatagaaatttatttaatcattcataatctctttttcttccttctccttctgacaaattctgttctctgaaaaataaccctgttacattccagttgtggtaattgtaataattacacattataattcacttcccagaatggaatatgttaacttcagtaagttctcttaaatttcagtgtggaaaaaaatagatgatttttctgtaggatggacacaggcacagtctgatccctaatctcaaaactagacacaattgcattagcaattggtgagtaactgaagacttcacattgaagtcttggtttggtttttaatatttccatttcctttttttttgtaattgaactactttttgtaaattaatgggaagattgaaatactttgagaggagctattgggtttgcctctcagttttgctagtaactaagggaaaaagaataatgtggtttttcatggttgaaattgtgttttagtagagtccattgaaatatactttattatttggattattttcttattttccagttttaactgttttcagatggtacatgtaaagttaaagttttattcttggtgttaattttcagttggtaattataataattatacagctttcagaatatctcttcattctgaaagaaattctgaagagtaattctgaactcttcagttttttagtgtaacaaaatgaaagaaaatttactcaggaagggattgtgggttctttgttttcctttttttttcttccgtttttcttaatcttagaaatcatatttctttttctttcatagtcttttcttgtgtacgtgttttctttcactctattcattttttgctcagctatcctcctgtaacctcataacattcttaatgaagatgatgggatggtaagtgtctggcaaagcgggagataatatctttttccctcctgtattctactgaactcattgttccttctcagccttacttaatcaagttaaacttatacaccacagctctgcatttagtttcctgaccctgtgggttaggtagaatttagatacgaaaatggctggaaagatttataaaaatctattatgttaatcattggtggggaatccataacatggcatagaacttgaatgtatggatttgagaaaaaatatttacattaacttaattatatgatgatggatgctaattgataagcagtaggttgaaattcactgttacataattcactattatgtcatggttgctggttgcccttaactgaatgattttgaaggaaagctgataactattttgagttaaatttttacaagtggttccttatatggtgcaatgccgctgcaacaaacagtaggaattttgtagcaaaaagtcttaatagtatccatttaaataactgctgcttatttaatgcccatcagtgctaggcccccatctaaatgtgattgttacagtcattaattttcacaattctacaatggctttagaaagaggaaacaaaaatttaggttaaacgacttacctaacatgatttctctagtaagagataaaactgtgattcaaatctatgttagacatgtatctactgtaaccctgtattatttttttttaaccacatagttatcttttttttttttaatttggtgtttttccaaggttaaaaagaaattccagtgaagagttgattccatctttatggtatctttattttttaaggttataaggtatgttgatttatcaggaaagttaaatgaagaaatcttcaagaggccatttataattctgtttttaaaagtcaaaattgaaaagagttgggccaggtgcagtggctcacgcctgtaatcccagcattttcggaggccgggtgggtagatcacctgaggtgaggcgttggagaccagcctggccaacgtggtgaaaccctgtctttactaaagatacaaaaattagctgggcgtggtggcatgtgcctgtaatcctagctactcaggaggctgaggtaggagaatcgcttgaacctgggtggcagaggttgcagtgagccaagatggtgccatgcactccagcctgagcaacagagtgagactccatctcaaaaaaaaaaaaaaaaaaaattgatagagtttatactatttaatgtttaaatgttttctgtaaattaaacatcaatagacttgataatcatattttaggaacatttttttccattgaattatttacatatactgttgtactgtaaggctttaaattaattttaatattttattattttaattagcatttgaaatgtatagtgttcaataaatggattgctaaatta

SEQ ID NO: 158178 - DNA, 2917 bp, Homo sapiens
  Payload ID: 10970
  Gene Symbol: N4BP2L2
  Gene Name: NEDD4 binding protein 2-like 2
  ENST ID: ENST00000357505
  CDS Start-End: 199-2412
gtttacggagccggtgtgaacgtcggacttcaattcccacaatgcctggcgcaaacgcctagttttggcctgggtaaccgagaggtgaccgccatcttgcgtacggagaggttcgtgtcttcctaaaagaaggttttattgggaggtaaaggtcaatgcgtaggggtagagtaagaattctgcttggtcagaatcgtgatggcattgtgttcagcactgatgactattttcaccatcaagatgggtacagcaaaacaagctatcgatcagggaagatctccagttataatagataacactaatatacaagcttgggaaatgaagccatatgtggaagtggccataggaaaaggatacagagtagagtttcatgaacctgaaacttggtggaaatttgatcctgaagaattagaaaagaggaataaacatggtgtgtctcgaaagaagattgctcagatgttggatcgttatgaatatcaaatgtccatttctattgtaatgaattcagtggaaccatcacacaaaagcacacaaagacctcctcctccacaggggagacagagagaaagagttttgaagaaaactgggcataggctcagcaaaaccaaacagaagaggaacagaaaaagaaacaaaaagcagaacagtcagaatagaatcatggaggaaaactcattagaattcttaagtgatcttacaccgggagatcaggacccatctcagagtgaagaggaagacattgaaaagaccagaagagaatcagaatatcccttcattgatggtctacaaaatgaagtcggagattttgtgactggatataaagaaaaaagatggaaaaataaagatcctaaagacagtttccaaaacgttatgtctatagttgaattagacaacacaccaaagaattacctctctaaggaaggtgataacttgtttgtaagtttgttactgaggccaaatgaaatctccgttacttgtccaatactgactcaaaacctttcctgtgtaacaactgatgactgctctggcatgaaggtagaaaagcatattagaaataggcataccatagcattagacacccaggacctttctgcggaaacttcatgcttatttatgaagaagagagaaatagtagataaaaatctctcacatgaacccattctgtgccatcaacatggaatcagaatgtcagataaagttttaagagaggaacaagtgtatacaactaaaatcaatcactgggcttttttcacaaccaatttatctgatgaagatttacagctgggctctgacagacagccctattttggtagctggcctgcaggacctcataagtttatatgtgaacagagaccaaagaaagatagagcatgtaagttggctggtcctgacagcagggggcaatggattcaaatgatcttcacttcggtggcagcatcagaaccaggaaacaatccagaaatattgacagacaaactactgataggaaatgaagatttttcacctccacctgaaactatggattcattcatagaaacaaacctcttcagaagctgcttacctcaaccggatataccaaagaatgccttagaatcaacaaaaaataagaaaaggaggaagaaaaggattttcaatttggtaccaaattttgacttattaggacagagtcgtatcggtgtaaaagaaagggagaaatgtgacctgttaacaaaaaaccatggactaaaaattactttgggagaagaaaaagatagaatttcagaaaggaacagtgaagaggagaataaacaaaaacttatgacctttgatcatcatccattgtggttttaccttgatattatcaaagctacccctttaaatattgatggacagcgttattctcattgcctgtcatttaacagactaaggtgctctgcatctttatacaaaaattatattccttcttttgtgctacataatttatctagtatttggaagccatcttttacaaacaagaaactgtttttgactttcgaatctcagacaagagtaggtaataaactaaatgatgcagggtttatttctccagaaattttacatagtcatcctgatacttcgtgctctttgggagtcacttctgattttcactttttaaatgaaaggtttgatagaaagctgaaaagatgggaagaacctaaggaattaccagctgaggacagccaagacttaacaagcactgactaccgttcccttgagctaccattatcacaagggtttgcctttcaattagtaaagctttttggatctccaggcgttccaatggaatccttgttgcctgatgactatgtggttccccttgactggaagacactaaagatgatctacttgcaatggaagatgtcagtggagaaaagacagaagaagattggttgaaaaatgaaaattccttgaactttgagttctgctgtcttcatggtactgctgaagatcatgatcacggagaaaagtcagagtgctcagtgccaacccaagggattctttccagagacgtacccgttggataccaaaattagtttggataatctgttcaaccattcttgataagttatctgaataataaaaaaactcaacagaggaggtaacaatttgaacattttattgtctaatttgaagatgtatgccatactttgtttgatagaagaaagtaaggcacagaaaacttgagtaccttatttttaaaactgcattaggattaaaaggttagcccctatatccaagtattggtctgagatcccatttctagaattctgaaatccaaaaagctctgaaaatcaatagttatttttccaaatgtattcattgtggtaaaatacaccaatataaaatttaccatcttaaccacttttaagtgtgttataaatacattcatgctaccatc

SEQ ID NO: 158179 - DNA, 2872 bp, Homo sapiens
  Payload ID: 10970
  Gene Symbol: N4BP2L2
  Gene Name: NEDD4 binding protein 2-like 2
  Uniprot ID: Q92802
  ENST ID: ENST00000399396
  CDS Start-End: 109-2367
gtttacggagccggtgtgaacgtcggacttcaattcccacaatgcctggcgcaaacgcctagttttggcctgggtaaccgagaggtgaccgccatcttgcgtacggagatgtcttatggtgaaattgaagaattctgcttggtcagaatcgtgatggcattgtgttcagcactgatgactattttcaccatcaagatgggtacagcaaaacaagctatcgatcagggaagatctccagttataatagataacactaatatacaagcttgggaaatgaagccatatgtggaagtggccataggaaaaggatacagagtagagtttcatgaacctgaaacttggtggaaatttgatcctgaagaattagaaaagaggaataaacatggtgtgtctcgaaagaagattgctcagatgttggatcgttatgaatatcaaatgtccatttctattgtaatgaattcagtggaaccatcacacaaaagcacacaaagacctcctcctccacaggggagacagagagaaagagttttgaagaaaactgggcataggctcagcaaaaccaaacagaagaggaacagaaaaagaaacaaaaagcagaacagtcagaatagaatcatggaggaaaactcattagaattcttaagtgatcttacaccgggagatcaggacccatctcagagtgaagaggaagacattgaaaagaccagaagagaatcagaatatcccttcattgatggtctacaaaatgaagtcggagattttgtgactggatataaagaaaaaagatggaaaaataaagatcctaaagacagtttccaaaacgttatgtctatagttgaattagacaacacaccaaagaattacctctctaaggaaggtgataacttgtttgtaagtttgttactgaggccaaatgaaatctccgttacttgtccaatactgactcaaaacctttcctgtgtaacaactgatgactgctctggcatgaaggtagaaaagcatattagaaataggcataccatagcattagacacccaggacctttctgcggaaacttcatgcttatttatgaagaagagagaaatagtagataaaaatctctcacatgaacccattctgtgccatcaacatggaatcagaatgtcagataaagttttaagagaggaacaagtgtatacaactaaaatcaatcactgggcttttttcacaaccaatttatctgatgaagatttacagctgggctctgacagacagccctattttggtagctggcctgcaggacctcataagtttatatgtgaacagagaccaaagaaagatagagcatgtaagttggctggtcctgacagcagggggcaatggattcaaatgatcttcacttcggtggcagcatcagaaccaggaaacaatccagaaatattgacagacaaactactgataggaaatgaagatttttcacctccacctgaaactatggattcattcatagaaacaaacctcttcagaagctgcttacctcaaccggatataccaaagaatgccttagaatcaacaaaaaataagaaaaggaggaagaaaaggattttcaatttggtaccaaattttgacttattaggacagagtcgtatcggtgtaaaagaaagggagaaatgtgacctgttaacaaaaaaccatggactaaaaattactttgggagaagaaaaagatagaatttcagaaaggaacagtgaagaggagaataaacaaaaacttatgacctttgatcatcatccattgtggttttaccttgatattatcaaagctacccctttaaatattgatggacagcgttattctcattgcctgtcatttaacagactaaggtgctctgcatctttatacaaaaattatattccttcttttgtgctacataatttatctagtatttggaagccatcttttacaaacaagaaactgtttttgactttcgaatctcagacaagagtaggtaataaactaaatgatgcagggtttatttctccagaaattttacatagtcatcctgatacttcgtgctctttgggagtcacttctgattttcactttttaaatgaaaggtttgatagaaagctgaaaagatgggaagaacctaaggaattaccagctgaggacagccaagacttaacaagcactgactaccgttcccttgagctaccattatcacaagggtttgcctttcaattagtaaagctttttggatctccaggcgttccaatggaatccttgttgcctgatgactatgtggttccccttgactggaagacactaaagatgatctacttgcaatggaagatgtcagtggagaaaagacagaagaagattggttgaaaaatgaaaattccttgaactttgagttctgctgtcttcatggtactgctgaagatcatgatcacggagaaaagtcagagtgctcagtgccaacccaagggattctttccagagacgtacccgttggataccaaaattagtttggataatctgttcaaccattcttgataagttatctgaataataaaaaaactcaacagaggaggtaacaatttgaacattttattgtctaatttgaagatgtatgccatactttgtttgatagaagaaagtaaggcacagaaaacttgagtaccttatttttaaaactgcattaggattaaaaggttagcccctatatccaagtattggtctgagatcccatttctagaattctgaaatccaaaaagctctgaaaatcaatagttatttttccaaatgtattcattgtggtaaaatacaccaatataaaatttaccatcttaaccacttttaagtgtgttataaatacattcatgctaccatc

SEQ ID NO: 158180 - DNA, 2071 bp, Homo sapiens
  Payload ID: 10970
  Gene Symbol: N4BP2L2
  Gene Name: NEDD4 binding protein 2-like 2
  Uniprot ID: Q92802
  ENST ID: ENST00000446957
  CDS Start-End: 1-1968
atgtcttatggtgaaattgaaggtaaattcttgggacctagagaagaagtaacgagtgagccacgctgtaaaaaattgaagtcaaccacagagtcgtatgtttttcacaatcatagtaatgctgattttcacagaatccaagagaaaactggaaatgattgggtccctgtgaccatcattgatgtcagaggacatagttatttgcaggagaacaaaatcaaaactacagatttgcatagacctttgcatgatgagatgcctggtaatagaccagatgttattgaatccattgattcacaggttttacaggaagcacgtcctccattagtatccgcagacgatgagatatatagcacaagtaaagcatttataggacccatttacaaaccccctgagaaaaagaaacgtaatgaagggaggaatgaggcacatgttctaaatggtataaatgacagaggaggacaaaaagagaaacagaaatttaactctgaaaaatcagagattgacaatgaattattccagttttacaaagaaattgaagagcttgaaaaggaaaaagatggttttgagaacagttgtaaagaatctgaaccttctcaggaacaatttgttccattttatgagggtcataataatggtctcttaaaacctgatgaagaaaagaaagatcttagtaataaagctatgccatcacattgtgattatcagcagaacttggggaatgagccagacaaatatccctgtaatggacaagtaatacctacattttgtgacacttcatttacttctttcaggcctgaatggcagtcagtatatccttttatagtgccctatggtccccctcttcccagtttgaactatcatttaaacattcagagattcagtggtccaccaaatccaccatcaaatattttccaagcccaagatgactctcagatacaaaatggatattatgtaaataattgtcatgttaactggaattgcatgacttttgatcagaacaatgaatatactgactgtagtgagaataggagtagtgttcatccctctggaaatggctgcagtatgcaagatcgatatgtgagtaatggtttctgtgaagtcagagaaagatgctggaaagatcattgtatggacaagcataatggaacagacaggtttgtgaaccagcagtttcaagaggaaaagttaaataaattgcagaagttacttattcttttaagaggtctgcctggttctgggaaaacaacattgtctcgaattctgcttggtcagaatcgtgatggcattgtgttcagcactgatgactattttcaccatcaagatgggtacaggtataatgttaatcaacttggtgatgcccatgactggaaccagaacagagcaaaacaagctatcgatcagggaagatctccagttataatagataacactaatatacaagcttgggaaatgaagccatatgtggaagtggccataggaaaaggatacagagtagagtttcatgaacctgaaacttggtggaaatttgatcctgaagaattagaaaagaggaataaacatggtgtgtctcgaaagaagattgctcagatgttggatcgttatgaatatcaaatgtccatttctattgtaatgaattcagtggaaccatcacacaaaagcacacaaagacctcctcctccacaggggagacagaggtttgatagaaagctgaaaagatgggaagaacctaaggaattaccagctgaggacagccaagacttaacaagcactgactaccgttcccttgagctaccattatcacaagggtttgcctttcaattagtaaagctttttggatctccaggcgttccaatggaatccttgttgcctgatgactatgtggttccccttgactggaagacactaaagatgatctacttgcaatggaagatgtcagtggagaaaagacagaagaagattggttgaaaaatgaaaattccttgaactttgagttctgctgtcttcatggtactgctgaagatcatgatcacggagaaaagtcagagtgctcagtgccaacccaagggat

SEQ ID NO: 158181 - DNA, 2343 bp, Homo sapiens
  Payload ID: 10970
  Gene Symbol: N4BP2L2
  Gene Name: NEDD4 binding protein 2-like 2
  ENST ID: ENST00000505213
  CDS Start-End: 217-2343
aaacgcctagttttggcctgggtaaccgagaggtgaccgccatcttgcgtacggaggtgaggtttgttaccgcgattctgagaggtgggcttttagtccctccagacctcggctttagtgctgtctccgcttttctttcaccttcacagaggttcgtgtcttcctaaaagaaggttttattgggaggtaaaggtcaatgcgtaggggtagagtaagatgtcttatggtgaaattgaaggtaaattcttgggacctagagaagaagtaacgagtgagccacgctgtaaaaaattgaagtcaaccacagagtcgtatgtttttcacaatcatagtaatgctgattttcacagaatccaagagaaaactggaaatgattgggtccctgtgaccatcattgatgtcagaggacatagttatttgcaggagaacaaaatcaaaactacagatttgcatagacctttgcatgatgagatgcctggtaatagaccagatgttattgaatccattgattcacaggttttacaggaagcacgtcctccattagtatccgcagacgatgagatatatagcacaagtaaagcatttataggacccatttacaaaccccctgagaaaaagaaacgtaatgaagggaggaatgaggcacatgttctaaatggtataaatgacagaggaggacaaaaagagaaacagaaatttaactctgaaaaatcagagattgacaatgaattattccagttttacaaagaaattgaagagcttgaaaaggaaaaagatggttttgagaacagttgtaaagaatctgaaccttctcaggaacaatttgttccattttatgagggtcataataatggtctcttaaaacctgatgaagaaaagaaagatcttagtaataaagctatgccatcacattgtgattatcagcagaacttggggaatgagccagacaaatatccctgtaatggacaagtaatacctacattttgtgacacttcatttacttctttcaggcctgaatggcagtcagtatatccttttatagtgccctatggtccccctcttcccagtttgaactatcatttaaacattcagagattcagtggtccaccaaatccaccatcaaatattttccaagcccaagatgactctcagatacaaaatggatattatgtaaataattgtcatgttaactggaattgcatgacttttgatcagaacaatgaatatactgactgtagtgagaataggagtagtgttcatccctctggaaatggctgcagtatgcaagatcgatatgtgagtaatggtttctgtgaagtcagagaaagatgctggaaagatcattgtatggacaagcataatggaacagacaggtttgtgaaccagcagtttcaagaggaaaagttaaataaattgcagaagttacttattcttttaagaggtctgcctggttctgggaaaacaacattgtctcgaattctgcttggtcagaatcgtgatggcattgtgttcagcactgatgactattttcaccatcaagatgggtacaggtataatgttaatcaacttggtgatgcccatgactggaaccagaacagagcaaaacaagctatcgatcagggaagatctccagttataatagataacactaatatacaagcttgggaaatgaagccatatgtggaagtggccataggaaaaggatacagagtagagtttcatgaacctgaaacttggtggaaatttgatcctgaagaattagaaaagaggaataaacatggtgtgtctcgaaagaagattgctcagatgttggatcgttatgaatatcaaatgtccatttctattgtaatgaattcagtggaaccatcacacaaaagcacacaaagacctcctcctccacaggggagacagagagaaagagttttgaagaaaactgggcataggctcagcaaaaccaaacagaagaggaacagaaaaagaaacaaaaagcagaacagtcagaatagaatcatggaggaaaactcattagaattcttaagtgatcttacaccgggagatcaggacccatctcagagtgaagaggaagacattgaaaagaccagaagagaatcagaatatcccttcattgatggtctacaaaatgaagtcggagattttgtgactggatataaagaaaaaagatggaaaaataaagatcctaaagacagtttccaaaacgttatgtctatagttgaattagacaacacaccaaagaattacctctctaaggaaggtgataacttgtttgtaagtttgttactgaggccaaatgaaatctccgttacttgtccaatactgactcaa

SEQ ID NO: 158182 - DNA, 2513 bp, Homo sapiens
  Payload ID: 10970
  Gene Symbol: N4BP2L2
  Gene Name: NEDD4 binding protein 2-like 2
  ENST ID: ENST00000504114
  CDS Start-End: 93-2306
agaggttcgtgtcttcctaaaagaaggttttattgggaggtaaaggtcaatgcgtaggggtagagtaagaattctgcttggtcagaatcgtgatggcattgtgttcagcactgatgactattttcaccatcaagatgggtacagcaaaacaagctatcgatcagggaagatctccagttataatagataacactaatatacaagcttgggaaatgaagccatatgtggaagtggccataggaaaaggatacagagtagagtttcatgaacctgaaacttggtggaaatttgatcctgaagaattagaaaagaggaataaacatggtgtgtctcgaaagaagattgctcagatgttggatcgttatgaatatcaaatgtccatttctattgtaatgaattcagtggaaccatcacacaaaagcacacaaagacctcctcctccacaggggagacagagagaaagagttttgaagaaaactgggcataggctcagcaaaaccaaacagaagaggaacagaaaaagaaacaaaaagcagaacagtcagaatagaatcatggaggaaaactcattagaattcttaagtgatcttacaccgggagatcaggacccatctcagagtgaagaggaagacattgaaaagaccagaagagaatcagaatatcccttcattgatggtctacaaaatgaagtcggagattttgtgactggatataaagaaaaaagatggaaaaataaagatcctaaagacagtttccaaaacgttatgtctatagttgaattagacaacacaccaaagaattacctctctaaggaaggtgataacttgtttgtaagtttgttactgaggccaaatgaaatctccgttacttgtccaatactgactcaaaacctttcctgtgtaacaactgatgactgctctggcatgaaggtagaaaagcatattagaaataggcataccatagcattagacacccaggacctttctgcggaaacttcatgcttatttatgaagaagagagaaatagtagataaaaatctctcacatgaacccattctgtgccatcaacatggaatcagaatgtcagataaagttttaagagaggaacaagtgtatacaactaaaatcaatcactgggcttttttcacaaccaatttatctgatgaagatttacagctgggctctgacagacagccctattttggtagctggcctgcaggacctcataagtttatatgtgaacagagaccaaagaaagatagagcatgtaagttggctggtcctgacagcagggggcaatggattcaaatgatcttcacttcggtggcagcatcagaaccaggaaacaatccagaaatattgacagacaaactactgataggaaatgaagatttttcacctccacctgaaactatggattcattcatagaaacaaacctcttcagaagctgcttacctcaaccggatataccaaagaatgccttagaatcaacaaaaaataagaaaaggaggaagaaaaggattttcaatttggtaccaaattttgacttattaggacagagtcgtatcggtgtaaaagaaagggagaaatgtgacctgttaacaaaaaaccatggactaaaaattactttgggagaagaaaaagatagaatttcagaaaggaacagtgaagaggagaataaacaaaaacttatgacctttgatcatcatccattgtggttttaccttgatattatcaaagctacccctttaaatattgatggacagcgttattctcattgcctgtcatttaacagactaaggtgctctgcatctttatacaaaaattatattccttcttttgtgctacataatttatctagtatttggaagccatcttttacaaacaagaaactgtttttgactttcgaatctcagacaagagtaggtaataaactaaatgatgcagggtttatttctccagaaattttacatagtcatcctgatacttcgtgctctttgggagtcacttctgattttcactttttaaatgaaaggtttgatagaaagctgaaaagatgggaagaacctaaggaattaccagctgaggacagccaagacttaacaagcactgactaccgttcccttgagctaccattatcacaagggtttgcctttcaattagtaaagctttttggatctccaggcgttccaatggaatccttgttgcctgatgactatgtggttccccttgactggaagacactaaagatgatctacttgcaatggaagatgtcagtggagaaaagacagaagaagattggttgaaaaatgaaaattccttgaactttgagttctgctgtcttcatggtactgctgaagatcatgatcacggagaaaagtcagagtgctcagtgccaacccaagggattctttccagagacgtacccgttggataccaaaattagtttggataatctgttcaaccattcttgataagttatctgaataataaaaaaactcaacagaggaggt

SEQ ID NO: 158183 - DNA, 6080 bp, Homo sapiens
  Payload ID: 10971
  Gene Symbol: N4BP3
  Gene Name: NEDD4 binding protein 3
  Uniprot ID: O15049
  ENST ID: ENST00000274605
  CDS Start-End: 360-1994
ggttggctcgcgggtaggcggccccgccccccacatccgggggccggggccgggctgtgggcttgccgcgcgccggtgagtcaggccgggttttccctccgcctttggggcaggcgatcgagcgccgcggagcgcgtccctccctcgccaatccggctccggcgccggcgcccgcccgcgttttcccggcgcctgccgctccgccgctccgacccggcacgcagtcccggcccgagccgacgccttgcaggagggttcaaatccgcgcgggggagctgcgacgcgcaagggctgcggagccgcgggccggcgagcgcgtcgccaccatgaagcagctgcctgtaccctgttgaaacttcatggccacagccccaggccctgctggcattgccatgggcagcgtgggcagcctgttggaacggcaggacttctcccctgaagagctgcgggcggcacttgccgggtctcggggctcccgccagcctgatgggctcctccggaagggcttgggccagcgtgagttcctcagctacctgcacctccccaagaaggacagcaagagcaccaagaacaccaagcgggcccctcggaacgagcctgccgactatgccaccctctactaccgggaacattctcgcgcgggtgacttcagcaagacctcgctgccagaacggggtcgctttgacaagtgccgcattcgcccctcagtgttcaagcctacggcgggcaacgggaaaggcttcctatccatgcaaagtctggcgtcccacaaaggccagaagctgtggcgcagcaatggcagcctgcacacgctggcctgccacccgcccctgagccccgggccccgggccagccaggcccgggcacagctgctgcacgccctcagcctagatgagggcggccctgagcccgagcccagcctgtccgactcctccagtgggggtagttttggtcgcagtcctggtactggccctagccccttcagctcctcccttggccaccttaaccacctcgggggctccctggaccgggcctctcaaggacccaaggaggctgggccaccagctgtgctgagctgcctgcccgagccaccacccccctacgagttctcctgctcctctgccgaggaaatgggagccgtgctgcccgagacctgtgaggagctcaagaggggccttggcgatgaggacggctccaaccccttcacgcaggtgctggaggagcgccagcggctgtggctggctgagctgaagcgcctgtatgtggagcggctgcacgaggtgacccagaaggctgagcgcagcgagcgcaacctccagctgcagctgtttatggctcagcaggagcagcggcgcctgcgcaaggagctgcgggctcagcagggcctggctccggagcctcgggcccccggcaccctcccagaggctgaccccagtgcacgaccagaggaggaagcccgatgggaggtgtgccagaagacagcagagattagcctcttgaagcagcagctgcgtgaagcccaggcggaactggcccagaagctggcggagatcttcagtctgaagacacaacttcggggcagccgggcacaagcccaggctcaggacgcagagctggtccggctgcgcgaggctgtgcgcagcctgcaggagcaggcccctcgggaggaagccccaggcagctgtgagactgatgactgcaagagcaggggcctgctaggggaggcaggaggcagcgaggccagagacagtgctgagcagctgcgggctgagctgctgcaggagcgacttcggggccaggagcaggcgctgcgctttgagcaggagcggcggacttggcaggaggagaaggagcgcgtgctgcgctaccagcgggagatccagggagggtacatggacatgtaccgccgcaaccaggcactggagcaggaactgcgggcactgcgggagccccccacaccctggagtccccggctcgagtcctccaagatctgaggccagcagagcgagctgacagcagcaacactgtcagaaggtgccctgagacggccggctcagccttcccttgcactggttggggtggaacctgcagaggccagcccggggctggggaggcgcaaggagaggagggatccagtggggccgtgggctgggtagggtgccttggcaggagccaggacaaggccctcctggcagaggagcacctaggcagggcccagccctgcttcctggagtggatgtggcccagagaaggaggctgggggatcaccagccccaaggtcccgaagggcaggtcagagggagagaggctggagacctgggctggggccttcctccagggaaggaggctggggtgggaacactggcctcccccagaataaaaccatgttttctaccagaggctcagaatacgctgagcctgtgaccagaggatgatggatggtcgggattgaggctgttgacctgggcagtagctcctcccatggccagtggtcagtgggagggtgtgccctgcgcctgtctgcatggccactgggcatgtgtgttgggagcagaggagtcctactccttgcctcagccccacacggttccttagctgccgtgtgggctgaaattcctttctttagcaccagtggagttttcagaaggaacaacaccagggaatgccaaaaaaacaaagggcaagtcaaccaaggcattttgagaacatgaaatgtcttcttggtgggaaggctgggccccaggagtatccacaggctcaggccatgcccctccccgcacccacctcctgtctccctccctccctccataggagtggggggcccctagaagtgctctgcctcattccctgttcgtaggaaggtgcaggagaggaggtgggcaagcttatgggtttcttggtaaagagcctttaccacagcaaggaatgggaacatttccccatcagcaacggggctctagggcattattaagtaggggtgaaatatgattgatttgcattctggaaagctctcccaggaggaagcattccccaccccaccttgcctctgtcctgcgctgggctccaggacggtcagtcctcccggatccctgctctcagctaaggctggtccctaaaacccacacctgcctttggtctctcagaggcctggcttgccctctgggcctttgctcccccgctgggtgcccggcctggaacacaggttctgtctggctgtgtgagtggcgtctctcccttcctttgagggaagctcagctttcttacgcgctcatcgttggacgggctgccatgcattgcgtgcttactgggcgccaggtgctgtgctgggcccttgtgagtgtgggggcacaggctgaattagatgagctcctgccgcagggggccctgcacactgatgtcagctcaccagtctcttccctgacagggcagctcagggaacttctgagaagttatctgcagagagccccacctcactccctttggctaccctggccgtgcctggcagcccctcaggccccacaggtgggtcctggttgtgaagtggagttagtgcacatggatgtcaggggacgggtgtgaggcatgagctgggggggccccctttttcagggcagagaatgaggcgtgtgcactgtctgctgtggggatggtgtgtttatggccatgtaagtggcaggtgtgtgtaaagatgtgcttgtgggtggtgggtgtgtctgagggggtgtgtttgggagcctggcctccaaaagccagtgtctgggttggagacagtgcaggccccttcttggccccaccctctaccccattccttcctgtcagccccagtctgtcttggcactggccaggcttgggtggagcctgtgtcccagacagatcccctaggcctatctgagacccatacaggcccacacctgagctcctgtctgcctgaggagggaaagggggagtggccaggtcaggcaggccagtcgtctacacacccccttggtacccattcccatttcacaaactcctccaaaccccaaaccccaaacggaaatctctgggacaatggctcctccagagggcccctcagagccaggtgctggccagatgccttgatcacagcctccatggccaggggcctgtcaagccaggggcccacacacctggtgccagggtccaccttggtataccagctcggcagaacagttccccacccagcgattagggagctgggctggccagtacagccagtggggagtgggtgggaggcaccaaaacttggcagctgtgccagaaaccaaagccaggcccagatgtagggggagggcacgagagctgaacctgagcctggggcgtctcggagctggatccccgtcagctcatccaggctggacaaaccagttcctgggtcccccagccggctgggtggctctggggccaaccgaccacaggtgtcactgatcacaggtgtcaccgtagtggctaccacctcagggcagcccctccctccagctggcggggcctcagcttcccagctgccctggcttagccttccctgcagcccctccccaacaggcttggtccgggcagcctgctctgcggaaggtggcagcctcctggtgctgggctccctgcctctggggcctccagtccttcactcagtgtcatcccttccagcagctccctgggcctcttggtccatcccttcaggcttctgacacactagtggcctcgagtcactgatagtggtgcctcctccttaccttggcaagcccttgtagccctctgagccctcatcctgcaggcagagcccctcagtgctctgagaaacctgccctgaactcaccgcctcccctgcctgggcactccctcctccctgcgcccacagcccccatgccaatctccgtcagctctttctgtgctgctgtaattgttggtttgcctgtctcctttgagctgtgggcattgccggggtagggtggtgtcttcaccacagctccagaaggcactggtgggatgtggagtcaggagcaaccagagaccccccaatactagaatgggtttgagcttggggtggggtggatggggaagacttactctgaatgttcgttcaccatccgtgggcaccaggtctgtgccaagcacagggactccaggggcagctgccattcgttccagtgatgtatttggggccttctcaggtgaggaagccaaggtggccaaggccctcggtcccctgccctgatagggcttacctgtgggtgggggagggagaccacacatgtcagaggtagtgaaggccgctccaaatagtgactggggccaggcaggcggaaaagagaacagaagagaatccagaagtgttcagacagaactagggacaacagaggggcctccatggtggcatgggtcagcagagcatggagcaggcagaggaagcctatctgtggggctgggtacatttctctgagactcacggaatgtaagtgttgaggtttctgcaaagagggcgcaggccctgcagtgacggttcagatattgataacccatcccccttggcaggtgggggcttaggcatccatattggattcagaaaagaaaaagaatgatgcttcttgcaacaaaaacaaaagtgattatgtcacgagaggagaggctggagggccatgggagttcccagctggctcactcatccgtccaggaggtgggtctcatggtttcattttgctttgggcttacttagagttttggcaaatgcagagttatgtaacgaacccaacaatgaagatacagttctgtcacccccccagcattctcctgtggccctctagtccaccccccgccccaccccagcccctggcaaccactgatctgctttcacaataaccgtatggggttttttctctttccttttttgtgagcggtatttaattcctttgctctaatatgtaatattagaacatattacaaagtagcaagaaaaatacgacattggtgtaaaaataatctacacctcatggaaagaatgaagagccagaaatagattctattctgtagaaaatcttacacaataaaggacttcaaaataagggtaa

SEQ ID NO: 158184 - DNA, 3851 bp, Homo sapiens
  Payload ID: 10972
  Gene Symbol: NDFIP1
  Gene Name: Nedd4 family interacting protein 1
  Uniprot ID: Q9BT67
  ENST ID: ENST00000253814
  CDS Start-End: 471-1136
gggcacgtaggtgaagctcagtgcttggcacgaggtgctcatcagcagcatcgcccttgctttgggctggcctgttagtaattcgtttttagtggaatcgaatacaacacttgagcctcggaggctcaggtcgtcggagcaactacaccagggccggtgcacctcggggcggcggcgcaggactaggctaggccgggccgggccgggcagggcggcgcgagtcgggggtggggcggcggcgcagcgccgtcgtcgtagtccccgcctcttccccaggggccgcgtcggagcctcggcggcggcggcggtgcttacagcctgagaagagcgtctcgcccgggagcggcggcggccatcgagacccacccaaggcgcgtccccctcggcctcccagcgctcccaagccgcagcggccgcgccccttcagctagctcgctcgctcgctctgcttccctgctgccggctgcgccatggcgttggcgttggcggcgctggcggcggtcgagccggcctgcggcagccggtaccagcagttgcagaatgaagaagagtctggagaacctgaacaggctgcaggtgatgctcctccaccttacagcagcatttctgcagagagcgcagcatattttgactacaaggatgagtctgggtttccaaagcccccatcttacaatgtagctacaacactgcccagttatgatgaagcggagaggaccaaggctgaagctactatccctttggttcctgggagagatgaggattttgtgggtcgggatgattttgatgatgctgaccagctgaggataggaaatgatgggattttcatgttaacttttttcatggcattcctctttaactggattgggtttttcctgtctttttgcctgaccacttcagctgcaggaaggtatggggccatttcaggatttggtctctctctaattaaatggatcctgattgtcaggttttccacctatttccctggatattttgatggtcagtactggctctggtgggtgttccttgttttaggctttctcctgtttctcagaggatttatcaattatgcaaaagttcggaagatgccagaaactttctcaaatctccccaggaccagagttctctttatttattaaagatgttttctggcaaaggccttcctgcatttatgaattctctctcaagaagcaagagaacacctgcaggaagtgaatcaagatgcagaacacagaggaataatcacctgctttaaaaaaataaagtactgttgaaaagatcatttctctctatttgttcctaggtgtaaaattttaatagttaatgcagaattctgtaatcattgaatcattagtggttaatgtttgaaaaagctcttgcaatcaagtctgtgatgtattaataatgccttatatattgtttgtagtcattttaagtagcatgagccatgtccctgtagtcggtagggggcagtcttgctttattcatcctccatctcaaaatgaacttggaattaaatattgtaagatatgtataatgctggccattttaaaggggttttctcaaaagttaaacttttgctatgactgtgtttttgcacataatccatatttgctgttcaagttaatctagaaatttattcaattctgtatgaacacctggaagcaaaatcatagtgcaaaaatacatttaaggtgtggtcaaaaataagtctttaattggtaaataataagcattaattttttatagcctgtattcacaattctgcggtaccttattgtacctaagggattctaaaggtgttgtcactgtataaaacagaaagcactaggatacaaatgaagcttaattactaaaatgtaattcttgacactctttctataattagcgttcttcacccccacccccacccccaccccccttattttccttttgtctcctggtgattaggccaaagtctgggagtaaggagaggattaggtacttaggagcaaagaaagaagtagcttggaacttttgagatgatccctaacatactgtactacttgcttttacaatgtgttagcagaaaccagtgggttataatgtagaatgatgtgctttctgcccaagtggtaattcatcttggtttgctatgttaaaactgtaaatacaacagaacattaataaatatctcttgtgtagcaccttttactgtagattagtgcttaatttcttggcttgcatttgttgattgctaaggcaattttttctaatcttagggaatcattcagtagatgcgattaaaaaactaatgttgggtcaatttttttcttcattttcagcacaagaagtcctcttatatcctactaaatacattcctaaaaatgtatttgaacattggttctgtaaaagataatggactaaaaaagtagagaggagttgtagagatcttaaatcattctggaattcctaattatgcttcaatttttagacataattttagataatttatttccagtgttttctgcatgttctcatttgttctttttctcagttgaatgcaccaactggtttgagtcctgtgagcattcagtcagttgaaattaaagattcctcatttctcctgatttctattcttgtctcaatcttaaatttagagaccagttgtttttatgatatcagccatttgatttttttcattttctatttaagaaatatgaagaaaaaatacaccaagatggtcaaattactacacaaatcagcaccagcacagtctgatagctgcaaatgtccattcatctgctgtgtatgtatatccagaatcagcataggaagtcgttcaggatatcagtatataatgcacagaagtgtgggttgtttgaaagccaaacaggaaaattaggagcctcctggattgacatttcaatgatccctctaaccagtttatggattattatgaataatagtgtagtgtgttctttttcagaagttatatttgataatagagaagggagttttatggaagtttctttgaagatttttttttttccatttcgaatcagattatagcaacaatggagtttggaagtttgtatggcctataatgttctaagttccagaatgaaaagatctgtaacaatctgaatagatgtggacacatatagcagagagaactatgtaaattatcttgcagaacaaaatagaagggtcctaaatcacgttaactcaaacattgtagactagctttgtgtttattcttcaggtccttgcgccttatttggttttgtatattcaacgaactgaaatatttggaattcctatttctacgtatttggtggtccataagactttgtcaaatgtaaacctacagtttgatacgctttaaaatacctagttaagaggatgatttctctttaatcgtttaaatgttctgaaaattaaaatcttttgaggcacatgaagtgggcaccatatatcatctagagtccttactggtattcaggatgaaaatgttcacgctgcattaattgtcatttttctctcccatgttctttctcactttgatacgttaatactgataatggataaagagtgagtttttataataaatggttttggaaaggtattcataggaaccgcggttatttacttaaggttatggagtaaactagcttggaccttgggctgcaggacgactaggattcacccataacgacacagtgccctatgtttcttaacttcttgttgccatttgaaactctgtactcttatgtttaaagggttctgtatagccattttttttttcagaaagttacattgctttgtatagaaataaaaggcattattaaaatttgcttgttaaaaaatgataa

SEQ ID NO: 158185 - DNA, 4625 bp, Homo sapiens
  Payload ID: 10973
  Gene Symbol: NDFIP2
  Gene Name: Nedd4 family interacting protein 2
  Uniprot ID: Q9NV92
  ENST ID: ENST00000218652
  CDS Start-End: 53-1063
cttacttttccatctcctcccacccagctataccctcccactggcggcgcggatggcacgccggcggagccagcgagtctgcgcgagcggtccgagcatgctcaatagcgcgcgcggcgccccggagcttctccgcggaaccgcgaccaacgcggaggtctcggcggccgctgcgggagccacaggaagtgaagagcttccgccgggagaccgcggctgcaggaacggaggcggaaggggccctgcggcgacgacgtcgtcgacgggggtggccgtgggagctgagcacggagaagactccctctctcggaagccggatcccgagccgggcaggatggatcaccaccagccggggactgggcgctaccaggtgcttcttaatgaagaggataactcagaatcatcggctatagagcagccacctacttcaaacccagcaccgcagattgtgcaggctgcgtcttcagcaccagcacttgaaactgactcttcccctccaccatatagtagtattactgtggaagtacctacaacttcagatacagaagtttacggtgagttttatcccgtgccacctccctatagcgttgctacctctcttcctacatacgatgaagctgagaaggctaaagctgctgcaatggcagctgcagcagcagaaacatctcaaagaattcaggaggaagagtgtccaccaagagatgacttcagtgatgcagaccagctcagagtggggaatgatggcattttcatgctggcatttttcatggcatttattttcaactggcttggattttgtttatccttctgtatcaccaataccatagctggaaggtatggtgctatctgcggatttggcctttccttgatcaaatggatccttattgtcaggttttctgattattttactggatatttcaatggacagtattggctttggtggatatttcttgtacttggcctgctccttttcttcagaggatttgttaattatctaaaagtcagaaacatgtctgaaagtatggcagctgctcatagaacaaggtatttcttcttattgtagagactgcatcaacccgacattcctttcttataccaatgtgaaatttccagatcatctgtaaacctacaactttaatagaagactactaataacagaagacaaattagtgaagaaaagacggagtttcgaaattgaatggcagggtggtttttgcttacaagccatttctgttcattctttaagtatctatatttcatttgttttgcacatatgcatatgtgcccatttaagatatttgcatatacttgatagaaaccataaagttgtagcagttaagtccagtcacatttggttaatcagtgtttgatataattgaaagagttgagtggataaacagtcttccagcttgtaaatgccattgacttctgacctgacatttagtataataaaaatgaaattcttaaccatgtcaaatgatttagtttctggctcttagactcatctggcagttctacacatgaaacatcttttgttatataaggtgtattgaaacctgcagtgctgattattagaaaggatttgtcagatttttgaacatgatatttacattattatttaggaaaactcttcctgtaaataaccatgcataacttactttctgcaatgttttcttagaaattgtgtccagatagctttcactaattttaaattaagtgaactaaatatatatgtgtatatgtatacacatatatatacacacacacatatatatatttagaaacgtgagtgttaaagatagaatttgttttaggacaaattttaagaaaatgtgggaataccaaatgtcctttataagaaaaataaattttattttaagggacatactagttttagggattttcagatgggaagctgcatttttaggattgcccatcttaagagatcttgcaggaagagattgtattagatattatatttatttcatttaagataattttcaaagttaattttctaaataagataattctcatttgtgtttgtcttttaaaaggccaataaaatatctttcagtatcattgtaataattttttagagtttaatttgtaaagcttagcaaataaaatcttgtactatgaatagcttcttgctttatgactttaggattaacttgtaaaaaacatatcctgaactgagatatgcaaaatactcattttcaagttatggaaatgtgtttgtggcatataggactgtggggtctgtgtgtgtagtgagagtgtgtagccactattataactggaatttaatttacattcataaactactatatttcccatcttgcaaatcattttatgtctcatctgtttttcctttcggttatatctttggttttgaataccaacatttaaaatgatggtattttatcttttaaacttaaaaattatttaatacagctatatggaccttataaaattgatttcttatttattattagacattactactaaaaggtacatctaactattcagggacatttttccatttccaaaaaataaaatttattatgctttataacctcttctgtattttctaattttttcattgtctttgataaataaaacagttttgttttgctaatatagcctattttttgttttgtctcattcagtttactttcctgcgtagaatttttattgttatattaaaatttttattgttgtattaaagtacctgtgttacaccccttgaagtaagacagtagcatggggtaaagaaaaaatatttagtttagttgcctaatttggaagttaattaaaattaaactgtactaataacatattcaaactcatgctggatctctttcatattaatttcttatagacctgtactttattctttcaataatttttaaatgaaattaagctttgctacatggtaattaaataattactaggaagcttagctatcaaacatcgacttactaaaatttcattttagcttttatggtatatgtgcttgttttctgaatatggatacatgttacttttgatccagcatcaaaacttcactttttgttttgacttttccccccaaatctgtaaggttcaagtatacatattactgaatcctctataattggcataattcaatggtagccttaaatctcatcatgtaagcaggggaatcagaatgttattttcaagaacttaatgttcccttcagatatataaaatcctgcatacttcatttcctgtgagcttgaacagctgctgttgtgttttggggatgcttgatcatctttgcactctgccttaaagattgaaaaatcaaaactcttgttagggtatctaaacatttttgagtgtgaactggggattggaagttaatacaaaaaaatttcaaattatttctattgtaaatgaataagctagtcatggctaggataatccattttcatgtatttatgcaataaactgaattttaaggcaaaaacaacacttttctatatagtgtatgcaggacagattttagaaacttagattaaaatacaaatcccattacatttggttaaaatgaaaatctctgcttaatggaaaaaatactaatctttagcctattttgagtctataagatatatttcattttagacatgccttctaagttgttcacagatttttacctgctaaaacaatattatttccagtaaaacctctcctaacaggaaaagtggagttcaaaatatccaattggagaaaaattcagagttccttcattaaatataatttttttcatctagtatgtactatttcaagaagtgcaaaaagtaatgatagtgaatgtgataccatacttaactaaggtaatatatatccttagtttgctcaaaagagtcctggttattcctgttttctcagcttaatagtgcctcatcgtactctcaaaagtgttctaatttggaggataagttatatgatcatcctgtgtataattgtagactgtaccaagaagcaactaccttagctccactgccctttgagggatggaactggggtaagggcaggagccagttattattgccacagtgttttctaatgaaccatttggcctgtagaagaggaatagtattttttttaatagttgtatttgaatgattccagcttatcgtaaatactaaactgaatggcttttatatttttaactgctgttaaatgttattttagcatttattagttgtttattatttaattcttcaaatagtcatatgaaaacatatatttgataaaggtcaattgttagatgataatgtgccattcattatcataggaatgtccttgcccatatataaaacatgctggcatgtattttacttgttaataaagttgtatagatgtggaagtgtgaacctgtgatgcatccttttcaaaatcagtttaagattcgcatattatcatgactgtgacctcactaaactgtttatgtgacaaacctttcaagattggagatgaaaacaacacttgtgaaattaggttggggttgcaacatcttttaacttctcagttatttgtatgtcaggagacagattgtggtttaattttaataaacaaaatatcatctttttgaaaat

SEQ ID NO: 158186 - DNA, 1384 bp, Homo sapiens
  Payload ID: 10973
  Gene Symbol: NDFIP2
  Gene Name: Nedd4 family interacting protein 2
  ENST ID: ENST00000487865
  CDS Start-End: 34-702
ctctctcggaagccggatcccgagccgggcaggatggatcaccaccagccggggactgggcgctaccaggtgcttcttaatgaagaggataactcagaatcatcggctatagagcagccacctacttcaaacccagcaccgcagattgtgcaggctgcgtcttcagcaccagcacttgaaactgactcttcccctccaccatatagtagtattactgtggaagtacctacaacttcagatacagaagtttacggtgagttttatcccgtgccacctccctatagcgttgctacctctcttcctacatacgatgaagctgagaaggctaaagctgctgcaatggcagctgcagcagcagaaacatctcaaagaattcaggaggaagagtgtccaccaagagatgacttcagtgatgcagaccagctcagagtggggaatgatggcattttcatgctggcatttttcactggaaggtatggtgctatctgcggatttggcctttccttgatcaaatggatccttattgtcaggttttctgattattttactggatatttcaatggacagtattggctttggtggatatttcttgtacttggcctgctccttttcttcagaggatttgttaattatctaaaagtcagaaacatgtctgaaagtatggcagctgctcatagaacaaggtatttcttcttattgtagagactgcatcaacccgacattcctttcttataccaatgtgaaatttccagatcatctgtaaacctacaactttaatagaagactactaataacagaagacaaattagtgaagaaaagacggagtttcgaaattgaatggcagggtggtttttgcttacaagccatttctgttcattctttaagtatctatatttcatttgttttgcacatatgcatatgtgcccatttaagatatttgcatatacttgatagaaaccataaagttgtagcagttaagtccagtcacatttggttaatcagtgtttgatataattgaaagagttgagtggataaacagtcttccagcttgtaaatgccattgacttctgacctgacatttagtataataaaaatgaaattcttaaccatgtcaaatgatttagtttctggctcttagactcatctggcagttctacacatgaaacatcttttgttatataaggtgtattgaaacctgcagtgctgattattagaaaggatttgtcagatttttgaacatgatatttacattattatttaggaaaactcttcctgtaaataaccatgcataacttactttctgcaatgttttcttagaaattgtgtccagatagctttcactaattttaaattaagtgaactaaatatatatgtgtatatgtat

SEQ ID NO: 158187 - DNA, 698 bp, Homo sapiens
  Payload ID: 10973
  Gene Symbol: NDFIP2
  Gene Name: Nedd4 family interacting protein 2
  ENST ID: ENST00000465762
  CDS Start-End: 30-470
ctcggaagccggatcccgagccgggcaggatggatcaccaccagccggggactgggcgctaccaggtgcttcttaatgaagaggataactcagaatcatcggctatagagcagccacctacttcaaacccagcaccgcagattgtgcaggctgcgtcttcagcaccagcacttgaaactgactcttcccctccaccatatagtagtattactgtggaagtacctacaacttcagatacagaagtttacggtgagttttatcccgtgccacctccctatagcgttgctacctctcttcctacatacgatgaagctgagaaggctaaagctgctgcaatggcagctgcagcagcagaaacatctcaaagaattcaggaggaagagtgtccaccaagagatgacttcagtgatgcagaccagctcagagtggggaatgatggcattttcatgctggcatttttcattttctgattattttactggatatttcaatggacagtattggctttggtggatatttcttgtacttggcctgctccttttcttcagaggatttgttaattatctaaaagtcagaaacatgtctgaaagtatggcagctgctcatagaacaaggtatttcttcttattgtagagactgcatcaacccgacattcctttcttataccaatgtgaaatttccagatcatctgtaaacct

SEQ ID NO: 158188 - DNA, 4648 bp, Homo sapiens
  Payload ID: 10973
  Gene Symbol: NDFIP2
  Gene Name: Nedd4 family interacting protein 2
  Uniprot ID: Q9NV92
  ENST ID: ENST00000612570
  CDS Start-End: 81-1091
acaacctagacagctcccccggacttgccttacttttccatctcctcccacccagctataccctcccactggcggcgcggatggcacgccggcggagccagcgagtctgcgcgagcggtccgagcatgctcaatagcgcgcgcggcgccccggagcttctccgcggaaccgcgaccaacgcggaggtctcggcggccgctgcgggagccacaggaagtgaagagcttccgccgggagaccgcggctgcaggaacggaggcggaaggggccctgcggcgacgacgtcgtcgacgggggtggccgtgggagctgagcacggagaagactccctctctcggaagccggatcccgagccgggcaggatggatcaccaccagccggggactgggcgctaccaggtgcttcttaatgaagaggataactcagaatcatcggctatagagcagccacctacttcaaacccagcaccgcagattgtgcaggctgcgtcttcagcaccagcacttgaaactgactcttcccctccaccatatagtagtattactgtggaagtacctacaacttcagatacagaagtttacggtgagttttatcccgtgccacctccctatagcgttgctacctctcttcctacatacgatgaagctgagaaggctaaagctgctgcaatggcagctgcagcagcagaaacatctcaaagaattcaggaggaagagtgtccaccaagagatgacttcagtgatgcagaccagctcagagtggggaatgatggcattttcatgctggcatttttcatggcatttattttcaactggcttggattttgtttatccttctgtatcaccaataccatagctggaaggtatggtgctatctgcggatttggcctttccttgatcaaatggatccttattgtcaggttttctgattattttactggatatttcaatggacagtattggctttggtggatatttcttgtacttggcctgctccttttcttcagaggatttgttaattatctaaaagtcagaaacatgtctgaaagtatggcagctgctcatagaacaaggtatttcttcttattgtagagactgcatcaacccgacattcctttcttataccaatgtgaaatttccagatcatctgtaaacctacaactttaatagaagactactaataacagaagacaaattagtgaagaaaagacggagtttcgaaattgaatggcagggtggtttttgcttacaagccatttctgttcattctttaagtatctatatttcatttgttttgcacatatgcatatgtgcccatttaagatatttgcatatacttgatagaaaccataaagttgtagcagttaagtccagtcacatttggttaatcagtgtttgatataattgaaagagttgagtggataaacagtcttccagcttgtaaatgccattgacttctgacctgacatttagtataataaaaatgaaattcttaaccatgtcaaatgatttagtttctggctcttagactcatctggcagttctacacatgaaacatcttttgttatataaggtgtattgaaacctgcagtgctgattattagaaaggatttgtcagatttttgaacatgatatttacattattatttaggaaaactcttcctgtaaataaccatgcataacttactttctgcaatgttttcttagaaattgtgtccagatagctttcactaattttaaattaagtgaactaaatatatatgtgtatatgtatacacatatatatacacacacacatatatatatttagaaacgtgagtgttaaagatagaatttgttttaggacaaattttaagaaaatgtgggaataccaaatgtcctttataagaaaaataaattttattttaagggacatactagttttagggattttcagatgggaagctgcatttttaggattgcccatcttaagagatcttgcaggaagagattgtattagatattatatttatttcatttaagataattttcaaagttaattttctaaataagataattctcatttgtgtttgtcttttaaaaggccaataaaatatctttcagtatcattgtaataattttttagagtttaatttgtaaagcttagcaaataaaatcttgtactatgaatagcttcttgctttatgactttaggattaacttgtaaaaaacatatcctgaactgagatatgcaaaatactcattttcaagttatggaaatgtgtttgtggcatataggactgtggggtctgtgtgtgtagtgagagtgtgtagccactattataactggaatttaatttacattcataaactactatatttcccatcttgcaaatcattttatgtctcatctgtttttcctttcggttatatctttggttttgaataccaacatttaaaatgatggtattttatcttttaaacttaaaaattatttaatacagctatatggaccttataaaattgatttcttatttattattagacattactactaaaaggtacatctaactattcagggacatttttccatttccaaaaaataaaatttattatgctttataacctcttctgtattttctaattttttcattgtctttgataaataaaacagttttgttttgctaatatagcctattttttgttttgtctcattcagtttactttcctgcgtagaatttttattgttatattaaaatttttattgttgtattaaagtacctgtgttacaccccttgaagtaagacagtagcatggggtaaagaaaaaatatttagtttagttgcctaatttggaagttaattaaaattaaactgtactaataacatattcaaactcatgctggatctctttcatattaatttcttatagacctgtactttattctttcaataatttttaaatgaaattaagctttgctacatggtaattaaataattactaggaagcttagctatcaaacatcgacttactaaaatttcattttagcttttatggtatatgtgcttgttttctgaatatggatacatgttacttttgatccagcatcaaaacttcactttttgttttgacttttccccccaaatctgtaaggttcaagtatacatattactgaatcctctataattggcataattcaatggtagccttaaatctcatcatgtaagcaggggaatcagaatgttattttcaagaacttaatgttcccttcagatatataaaatcctgcatacttcatttcctgtgagcttgaacagctgctgttgtgttttggggatgcttgatcatctttgcactctgccttaaagattgaaaaatcaaaactcttgttagggtatctaaacatttttgagtgtgaactggggattggaagttaatacaaaaaaatttcaaattatttctattgtaaatgaataagctagtcatggctaggataatccattttcatgtatttatgcaataaactgaattttaaggcaaaaacaacacttttctatatagtgtatgcaggacagattttagaaacttagattaaaatacaaatcccattacatttggttaaaatgaaaatctctgcttaatggaaaaaatactaatctttagcctattttgagtctataagatatatttcattttagacatgccttctaagttgttcacagatttttacctgctaaaacaatattatttccagtaaaacctctcctaacaggaaaagtggagttcaaaatatccaattggagaaaaattcagagttccttcattaaatataatttttttcatctagtatgtactatttcaagaagtgcaaaaagtaatgatagtgaatgtgataccatacttaactaaggtaatatatatccttagtttgctcaaaagagtcctggttattcctgttttctcagcttaatagtgcctcatcgtactctcaaaagtgttctaatttggaggataagttatatgatcatcctgtgtataattgtagactgtaccaagaagcaactaccttagctccactgccctttgagggatggaactggggtaagggcaggagccagttattattgccacagtgttttctaatgaaccatttggcctgtagaagaggaatagtattttttttaatagttgtatttgaatgattccagcttatcgtaaatactaaactgaatggcttttatatttttaactgctgttaaatgttattttagcatttattagttgtttattatttaattcttcaaatagtcatatgaaaacatatatttgataaaggtcaattgttagatgataatgtgccattcattatcataggaatgtccttgcccatatataaaacatgctggcatgtattttacttgttaataaagttgtatagatgtggaagtgtgaacctgtgatgcatccttttcaaaatcagtttaagattcgcatattatcatgactgtgacctcactaaactgtttatgtgacaaacctttcaagattggagatgaaaacaacacttgtgaaattaggttggggttgcaacatcttttaacttctcagttatttgtatgtcaggagacagattgtggtttaattttaataaacaaaatatcatctttttg

SEQ ID NO: 158189 - DNA, 2324 bp, Homo sapiens
  Payload ID: 10973
  Gene Symbol: NDFIP2
  Gene Name: Nedd4 family interacting protein 2
  ENST ID: ENST00000620924
  CDS Start-End: 13-741
gagccgggcaggatggatcaccaccagccggggactgggcgctaccaggtgcttcttaatgaagaggataactcagaatcatcggctatagagcagccacctacttcaaacccagcaccgcagattgtgcaggctgcgtcttcagcaccagcacttgaaactgactcttcccctccaccatatagtagtattactgtggaagtacctacaacttcagatacagaagtttacggtgagttttatcccgtgccacctccctatagcgttgctacctctcttcctacatacgatgaagctgagaaggctaaagctgctgcaatggcagctgcagcagcagaaacatctcaaagaattcaggaggaagagtgtccaccaagagatgacttcagtgatgcagaccagctcagagtggggaatgatggcattttcatgctggcatttttcatggcatttattttcaactggcttggattttgtttatccttctgtatcaccaataccatagctggaaggtatggtgctatctgcggatttggcctttccttgatcaaatggatccttattgtcaggttttctgattattttactggatatttcaatggacagtattggctttggtggatatttcttgtacttggcctgctccttttcttcagaggatttgttaattatctaaaagtcagaaacatgtctgaaagtatggcagctgctcatagaacaaggtatttcttcttattgtagagactgcatcaacccgacattcctttcttataccaatgtgaaatttccagatcatctgtaaacctacaactttaatagaagactactaataacagaagacaaattagtgaagaaaagacggagtttcgaaattgaatggcagggtggtttttgcttacaagccatttctgttcattctttaagtatctatatttcatttgttttgcacatatgcatatgtgcccatttaagatatttgcatatacttgatagaaaccataaagttgtagcagttaagtccagtcacatttggttaatcagtgtttgatataattgaaagagttgagtggataaacagtcttccagcttgtaaatgccattgacttctgacctgacatttagtataataaaaatgaaattcttaaccatgtcaaatgatttagtttctggctcttagactcatctggcagttctacacatgaaacatcttttgttatataaggtgtattgaaacctgcagtgctgattattagaaaggatttgtcagatttttgaacatgatatttacattattatttaggaaaactcttcctgtaaataaccatgcataacttactttctgcaatgttttcttagaaattgtgtccagatagctttcactaattttaaattaagtgaactaaatatatatgtgtatatgtatacacatatatatacacacacacatatatatatttagaaacgtgagtgttaaagatagaatttgttttaggacaaattttaagaaaatgtgggaataccaaatgtcctttataagaaaaataaattttattttaagggacatactagttttagggattttcagatgggaagctgcatttttaggattgcccatcttaagagatcttgcaggaagagattgtattagatattatatttatttcatttaagataattttcaaagttaattttctaaataagataattctcatttgtgtttgtcttttaaaaggccaataaaatatctttcagtatcattgtaataattttttagagtttaatttgtaaagcttagcaaataaaatcttgtactatgaatagcttcttgctttatgactttaggattaacttgtaaaaaacatatcctgaactgagatatgcaaaatactcattttcaagttatggaaatgtgtttgtggcatataggactgtggggtctgtgtgtgtagtgagagtgtgtagccactattataactggaatttaatttacattcataaactactatatttcccatcttgcaaatcattttatgtctcatctgtttttcctttcggttatatctttggttttgaataccaacatttaaaatgatggtattttatcttttaaacttaaaaattatttaatacagctatatggaccttataaaattgatttcttatttattattagacattactactaaaaggtacatctaactattcagggacatttttccatttccaaaaaataaaatttattatgctttataacctcttctgtattttctaattttttcattgtctttgataaataaaacagttttgttttgctaatatagcct

SEQ ID NO: 158190 - DNA, 1837 bp, Homo sapiens
  Payload ID: 10974
  Gene Symbol: NAE1
  Gene Name: NEDD8 activating enzyme E1 subunit 1
  Uniprot ID: Q13564
  ENST ID: ENST00000290810
  CDS Start-End: 99-1703
ggtagcggcgaaggggcgctcagtgcgcctgcgcgcttgtggagctggtggcggcgctccgcaggggctcggctgttttccgcgcggcaggcgcggccatggcgcagctgggaaagctgctcaaggagcagaagtacgaccggcagctgaggttgtggggtgatcatgggcaagaggctttagaatctgctcatgtttgcctaataaatgcaacagccacaggaactgaaattcttaaaaacttggtactaccaggtattggttcgtttacaattattgatggaaatcaggtcagcggagaagatgctggaaacaatttcttccttcaaagaagcagtatcggcaagaaccgagctgaagctgccatggaattcttacaagaattaaatagcgatgtctctggaagttttgtggaagagagtccagaaaaccttctagacaatgatccctcatttttctgtaggtttactgttgtagttgcaactcagcttcctgaaagcacttcactacgcttagcagatgtcctctggaattcccagattcctcttttgatctgtaggacatatggactagttggttatatgaggatcattataaaagaacatccagtaatagaatctcatccagataatgcattagaggatctacgactagataagccatttcctgaactgagagaacattttcagtcctatgatttggatcatatggaaaaaaaggaccacagtcatactccatggattgtgatcatagctaaatatttagcacagtggtatagtgaaacaaatggacgaatacctaaaacgtataaagaaaaagaggacttcagagatttgattagacaaggaattctaaaaaatgaaaatggggctccagaagatgaagagaattttgaagaagctattaaaaatgtgaacacagcactaaatacaactcagatcccaagcagtattgaagatatatttaatgatgatcgctgcataaatatcaccaaacagactccatcattttggattttagctcgtgccttaaaggaatttgtggccaaagagggtcaaggaaatttacctgttcgaggcacaattcctgatatgattgcagattcaggcaaatatataaaactgcaaaacgtttaccgtgaaaaagcaaagaaagatgctgccgctgtgggtaatcatgttgccaaattgctgcagtccattggccaggcaccagagtccatttcagagaaagaattaaaattactctgcagcaattctgcatttcttcgagtggtaagatgtcgatccttagctgaagaatatggtttggatacaattaacaaggatgaaattatttctagcatggacaatccagataatgaaatagtgttgtacttaatgttacgggctgttgatagatttcataaacaacagggtagatatccaggagtatctaactatcaagttgaagaagatataggaaagttgaagtcttgtctcactggcttccttcaggaatatggtttatctgtaatggtgaaagatgattatgtccacgaattttgccgatatggagctgctgagccacataccattgctgcattcttggggggagctgctgctcaagaggtcatcaaaataatcaccaaacaatttgtaatttttaataatacttacatttacagtggcatgtcacaaacttcagcaactttccagttgtagagtaagcaagcaccttaagtagtgtgttaatgattgaaactgtaattgccttcgggttgtgctttagtctgtaaaattctaaaggagagctgctaaattgttttcttaataaacatttttctcatttgtaataa

SEQ ID NO: 158191 - DNA, 1825 bp, Homo sapiens
  Payload ID: 10974
  Gene Symbol: NAE1
  Gene Name: NEDD8 activating enzyme E1 subunit 1
  Uniprot ID: Q13564
  ENST ID: ENST00000359087
  CDS Start-End: 78-1691
agtgcgcctgcgcgcttgtggagctggtggcggcgctccgcaggggctcggctgttttccgcgcggcaggcgcggccatggcgcagctgggaaagctgctcaaggagcagaagtacgaccggcagctgaggttgtggggtgatcatgggcaagaggctttagaatctgctcatgtttgcctaataaatgcaacagccacaggaactgaaattcttaaaaacttggtactaccaggtaacgtaggtattggttcgtttacaattattgatggaaatcaggtcagcggagaagatgctggaaacaatttcttccttcaaagaagcagtatcggcaagaaccgagctgaagctgccatggaattcttacaagaattaaatagcgatgtctctggaagttttgtggaagagagtccagaaaaccttctagacaatgatccctcatttttctgtaggtttactgttgtagttgcaactcagcttcctgaaagcacttcactacgcttagcagatgtcctctggaattcccagattcctcttttgatctgtaggacatatggactagttggttatatgaggatcattataaaagaacatccagtaatagaatctcatccagataatgcattagaggatctacgactagataagccatttcctgaactgagagaacattttcagtcctatgatttggatcatatggaaaaaaaggaccacagtcatactccatggattgtgatcatagctaaatatttagcacagtggtatagtgaaacaaatggacgaatacctaaaacgtataaagaaaaagaggacttcagagatttgattagacaaggaattctaaaaaatgaaaatggggctccagaagatgaagagaattttgaagaagctattaaaaatgtgaacacagcactaaatacaactcagatcccaagcagtattgaagatatatttaatgatgatcgctgcataaatatcaccaaacagactccatcattttggattttagctcgtgccttaaaggaatttgtggccaaagagggtcaaggaaatttacctgttcgaggcacaattcctgatatgattgcagattcaggcaaatatataaaactgcaaaacgtttaccgtgaaaaagcaaagaaagatgctgccgctgtgggtaatcatgttgccaaattgctgcagtccattggccaggcaccagagtccatttcagagaaagaattaaaattactctgcagcaattctgcatttcttcgagtggtaagatgtcgatccttagctgaagaatatggtttggatacaattaacaaggatgaaattatttctagcatggacaatccagataatgaaatagtgttgtacttaatgttacgggctgttgatagatttcataaacaacagggtagatatccaggagtatctaactatcaagttgaagaagatataggaaagttgaagtcttgtctcactggcttccttcaggaatatggtttatctgtaatggtgaaagatgattatgtccacgaattttgccgatatggagctgctgagccacataccattgctgcattcttggggggagctgctgctcaagaggtcatcaaaataatcaccaaacaatttgtaatttttaataatacttacatttacagtggcatgtcacaaacttcagcaactttccagttgtagagtaagcaagcaccttaagtagtgtgttaatgattgaaactgtaattgccttcgggttgtgctttagtctgtaaaattctaaaggagagctgctaaattgttttcttaataaacatttttctcatttgtaataa

SEQ ID NO: 158192 - DNA, 1909 bp, Homo sapiens
  Payload ID: 10974
  Gene Symbol: NAE1
  Gene Name: NEDD8 activating enzyme E1 subunit 1
  Uniprot ID: Q13564
  ENST ID: ENST00000379463
  CDS Start-End: 194-1780
agtgcgcctgcgcgcttgtggagctggtggcggcgctccgcaggggctcggctgttttccgcgcggcaggcgcggccatggcgcagctgggaaagctgctcaaggagcagaagtacgaccggcagctgaggcgattcctccatacatttgacagctgtctgggcccttatggagcatacagtggagtggaaagatggatgctcagcaaacaaaaacaaatgaagccaggttgtggggtgatcatgggcaagaggctttagaatctgctcatgtttgcctaataaatgcaacagccacaggaactgaaattcttaaaaacttggtactaccaggtattggttcgtttacaattattgatggaaatcaggtcagcggagaagatgctggaaacaatttcttccttcaaagaagcagtatcggcaagaaccgagctgaagctgccatggaattcttacaagaattaaatagcgatgtctctggaagttttgtggaagagagtccagaaaaccttctagacaatgatccctcatttttctgtaggtttactgttgtagttgcaactcagcttcctgaaagcacttcactacgcttagcagatgtcctctggaattcccagattcctcttttgatctgtaggacatatggactagttggttatatgaggatcattataaaagaacatccagtaatagaatctcatccagataatgcattagaggatctacgactagataagccatttcctgaactgagagaacattttcagtcctatgatttggatcatatggaaaaaaaggaccacagtcatactccatggattgtgatcatagctaaatatttagcacagtggtatagtgaaacaaatggacgaatacctaaaacgtataaagaaaaagaggacttcagagatttgattagacaaggaattctaaaaaatgaaaatggggctccagaagatgaagagaattttgaagaagctattaaaaatgtgaacacagcactaaatacaactcagatcccaagcagtattgaagatatatttaatgatgatcgctgcataaatatcaccaaacagactccatcattttggattttagctcgtgccttaaaggaatttgtggccaaagagggtcaaggaaatttacctgttcgaggcacaattcctgatatgattgcagattcaggcaaatatataaaactgcaaaacgtttaccgtgaaaaagcaaagaaagatgctgccgctgtgggtaatcatgttgccaaattgctgcagtccattggccaggcaccagagtccatttcagagaaagaattaaaattactctgcagcaattctgcatttcttcgagtggtaagatgtcgatccttagctgaagaatatggtttggatacaattaacaaggatgaaattatttctagcatggacaatccagataatgaaatagtgttgtacttaatgttacgggctgttgatagatttcataaacaacagggtagatatccaggagtatctaactatcaagttgaagaagatataggaaagttgaagtcttgtctcactggcttccttcaggaatatggtttatctgtaatggtgaaagatgattatgtccacgaattttgccgatatggagctgctgagccacataccattgctgcattcttggggggagctgctgctcaagaggtcatcaaaataatcaccaaacaatttgtaatttttaataatacttacatttacagtggcatgtcacaaacttcagcaactttccagttgtagagtaagcaagcaccttaagtagtgtgttaatgattgaaactgtaattgccttcgggttgtgctttagtctgtaaaattctaaaggagagctgctaaattgttttcttaataaacatttttctcatttgt

SEQ ID NO: 158193 - DNA, 1654 bp, Homo sapiens
  Payload ID: 10974
  Gene Symbol: NAE1
  Gene Name: NEDD8 activating enzyme E1 subunit 1
  Uniprot ID: Q13564
  ENST ID: ENST00000394074
  CDS Start-End: 220-1557
agctggtggcggcgctccgcaggggctcggctgttttccgcgcggcaggcgcggccatggcgcagctgggaaagctgctcaaggagcagaagtacgaccggcagctgaggtattggttcgtttacaattattgatggaaatcaggtcagcggagaagatgctggaaacaatttcttccttcaaagaagcagtatcggcaagaaccgagctgaagctgccatggaattcttacaagaattaaatagcgatgtctctggaagttttgtggaagagagtccagaaaaccttctagacaatgatccctcatttttctgtaggtttactgttgtagttgcaactcagcttcctgaaagcacttcactacgcttagcagatgtcctctggaattcccagattcctcttttgatctgtaggacatatggactagttggttatatgaggatcattataaaagaacatccagtaatagaatctcatccagataatgcattagaggatctacgactagataagccatttcctgaactgagagaacattttcagtcctatgatttggatcatatggaaaaaaaggaccacagtcatactccatggattgtgatcatagctaaatatttagcacagtggtatagtgaaacaaatggacgaatacctaaaacgtataaagaaaaagaggacttcagagatttgattagacaaggaattctaaaaaatgaaaatggggctccagaagatgaagagaattttgaagaagctattaaaaatgtgaacacagcactaaatacaactcagatcccaagcagtattgaagatatatttaatgatgatcgctgcataaatatcaccaaacagactccatcattttggattttagctcgtgccttaaaggaatttgtggccaaagagggtcaaggaaatttacctgttcgaggcacaattcctgatatgattgcagattcaggcaaatatataaaactgcaaaacgtttaccgtgaaaaagcaaagaaagatgctgccgctgtgggtaatcatgttgccaaattgctgcagtccattggccaggcaccagagtccatttcagagaaagaattaaaattactctgcagcaattctgcatttcttcgagtggtaagatgtcgatccttagctgaagaatatggtttggatacaattaacaaggatgaaattatttctagcatggacaatccagataatgaaatagtgttgtacttaatgttacgggctgttgatagatttcataaacaacagggtagatatccaggagtatctaactatcaagttgaagaagatataggaaagttgaagtcttgtctcactggcttccttcaggaatatggtttatctgtaatggtgaaagatgattatgtccacgaattttgccgatatggagctgctgagccacataccattgctgcattcttggggggagctgctgctcaagaggtcatcaaaataatcaccaaacaatttgtaatttttaataatacttacatttacagtggcatgtcacaaacttcagcaactttccagttgtagagtaagcaagcaccttaagtagtgtgttaatgattgaaactgtaattgccttcgggttgtgctttagtctgtaaaattctaaaggagagctgctaaa

SEQ ID NO: 158194 - DNA, 566 bp, Homo sapiens
  Payload ID: 10974
  Gene Symbol: NAE1
  Gene Name: NEDD8 activating enzyme E1 subunit 1
  ENST ID: ENST00000563253
  CDS Start-End: 61-132
gtggagctggtggcggcgctccgcaggggctcggctgttttccgcgcggcaggcgcggccatggcgcagctgggaaagctgctcaaggagcagaagtacgaccggcagctgagagtccagaaaaccttctagacaatgatccctcatttttctgtaggtttactgttgtagttgcaactcagcttcctgaaagcacttcactacgcttagcagatgtcctctggaattcccagattcctcttttgatctgtaggacatatggactagttggttatatgaggatcattataaaagaacatccagtaatagaatctcatccagataatgcattagaggatctacgactagataagccatttcctgaactgagagaacattttcagtcctatgatttggatcatatggaaaaaaaggaccacagtcatactccatggattgtgatcatagctaaatatttagcacagtggtatagtgaaacaaatggacgaatacctaaaacgtataaagaaaaagaggacttcagagatttgattagacaaggaattctaaaaaatgaaaatggggct

SEQ ID NO: 158195 - DNA, 401 bp, Homo sapiens
  Payload ID: 10974
  Gene Symbol: NAE1
  Gene Name: NEDD8 activating enzyme E1 subunit 1
  ENST ID: ENST00000563185
  CDS Start-End: 75-401
gcgcctgcgcgcttgtggagctggtggcggcgctccgcaggggctcggctgttttccgcgcggcaggcgcggccatggcgcagctgggaaagctgctcaaggagcagaagtacgaccggcagctgagcacttcactacgcttagcagatgtcctctggaattcccagattcctcttttgatctgtaggacatatggactagttggttatatgaggatcattataaaagaacatccagtaatagaatctcatccagataatgcattagaggatctacgactagataagccatttcctgaactgagagaacattttcagtcctatgatttggatcatatggaaaaaaaggaccacagtcatactccatggattgtgatcatagctaaatatttagcacagtgg

SEQ ID NO: 158196 - DNA, 1460 bp, Homo sapiens
  Payload ID: 10974
  Gene Symbol: NAE1
  Gene Name: NEDD8 activating enzyme E1 subunit 1
  ENST ID: ENST00000567743
  CDS Start-End: 70-147
tgcgcgcttgtggagctggtggcggcgctccgcaggggctcggctgttttccgcgcggcaggcgcggccatggcgcagctgggaaagctgctcaaggagcagaagtacgaccggcagctgaggtattggttcgtttacaattattgatggaaatcaggtcagcggagaagatgctggaaacaatttcttccttcaaagaagcagtatcggcaagaaccgagctgaagctgccatggaattcttacaagaattaaatagcgatgtctctggaagttttgtggaagagagtccagaaaaccttctagacaatgatccctcatttttctgtaggtttactgttgtagttgcaactcagcttcctgaaagcacttcactacgcttagcagatgtcctctggaattcccagattcctcttttgatctgtaggacatatggactagttggttatatgaggatcattataaaagaacatccagtaatagaatctcatccagataatgcattagaggatctacgactagataagccatttcctgaactgagagaacattttcagtcctatgatttggatcatatggaaaaaaaggaccacagtcatactccatggattgtgatcatagctaaatatttagcacagtggtatagtgaagtatgtccttttttaaaaaaaatttcatatgcaactgtattttcagtttcttacaaaggatttccttgatggggaatgggagattaattttttttccttatggagttgtatggtagggcaaatggatgcttttaaatttaaatctagcagttcctcttttgatcctgataattttaattaaaatgaaattcaataaatgtcattatgaaactggcagggggaatgaatgtagataaatggtcacagtgtctgttttctatcaagtgagcctctgatttcacagagaaatatatttgttgatgaaatcttatgtagagaatgggggacactttagactttcaatttctgtattttgaattttaataactagatttttaaaatttttaaccaatttagacaaatggacgaatacctaaaacgtataaagaaaaagaggacttcagagatttgattagacaaggtaatatgggatatgattaaatactgtataaagcttgaaaagcaaattgctagaggcaggtacttattggatttctgttaacacctttgtcagatgatagcatcatgagcttttattttccttctggagaagttaagaagccacgccttgtatagttttaaggactaatgataagccgtatttcttcttaagatttaatattctgcaggatctgacaaggttatttttataatgggggaacagaagagtgaaaagaaaagggctgtttgctaacaatttcccattacaataggaattctaaaaaatgaaaatggggctccagaagatgaagagaattttgaagaagctatt

SEQ ID NO: 158197 - DNA, 580 bp, Homo sapiens
  Payload ID: 10974
  Gene Symbol: NAE1
  Gene Name: NEDD8 activating enzyme E1 subunit 1
  ENST ID: ENST00000565535
  CDS Start-End: 78-580
agtgcgcctgcgcgcttgtggagctggtggcggcgctccgcaggggctcggctgttttccgcgcggcaggcgcggccatggcgcagctgggaaagctgctcaaggagcagaagtacgaccggcagctgagacggagtctcgctctgtcgcccaggctggagtgcagtggcgcaatctcggctcacttcaagctccgcctcctgggttcacgccattcttctgcctcagcctccgagttgtggggtgatcatgggcaagaggctttagaatctgctcatgtttgcctaataaatgcaacagccacaggaactgaaattcttaaaaacttggtactaccaggtattggttcgtttacaattattgatggaaatcaggtcagcggagaagatgctggaaacaatttcttccttcaaagaagcagtatcggcaagaaccgagctgaagctgccatggaattcttacaagaattaaatagcgatgtctctggaagttttgtggaagagagtccagaaaaccttctagacaatgatccctcatttttctgtaggtttactgttgtagttgcaactcagcttcctga

SEQ ID NO: 158198 - DNA, 567 bp, Homo sapiens
  Payload ID: 10974
  Gene Symbol: NAE1
  Gene Name: NEDD8 activating enzyme E1 subunit 1
  ENST ID: ENST00000569348
  CDS Start-End: 78-272
agtgcgcctgcgcgcttgtggagctggtggcggcgctccgcaggggctcggctgttttccgcgcggcaggcgcggccatggcgcagctgggaaagctgctcaaggagcagaagtacgaccggcagctgaggcgattcctccatacatttgacagctgtctgggcccttatggagcatacagtggagtggaaagatggatgctcagcaaacaaaaacaaatgaagccaggtacagtggcttgtgcctgtagtcccagcaactctagaggctgaggttgtggggtgatcatgggcaagaggctttagaatctgctcatgtttgcctaataaatgcaacagccacaggaactgaaattcttaaaaacttggtactaccaggtattggttcgtttacaattattgatggaaatcaggtcagcggagaagatgctggaaacaatttcttccttcaaagaagcagtatcggcaagaaccgagctgaagctgccatggaattcttacaagaattaaatagcgatgtctctggaagttttgtggaagagagtccagaaaaccttctagacaatga

SEQ ID NO: 158199 - DNA, 562 bp, Homo sapiens
  Payload ID: 10974
  Gene Symbol: NAE1
  Gene Name: NEDD8 activating enzyme E1 subunit 1
  ENST ID: ENST00000569388
  CDS Start-End: 79-336
cagtgcgcctgcgcgcttgtggagctggtggcggcgctccgcaggggctcggctgttttccgcgcggcaggcgcggccatggcgcagctgggaaagctgctcaaggagcagaagtacgaccggcagctgaggttgtggggtgatcatgggcaagaggctttagaatctgctcatgtttgcctaataaatgcaacagccacaggaactgaaattcttaaaaacttggtactaccaggtattggttcgtttacaattattgatggaaatcaggtcagcggagaagatgctggaaacaaaaccgagctgaagctgccatggaattcttacaagaattaaatagcgatgtctctggaagttttgtggaagagagtccagaaaaccttctagacaatgatccctcatttttctgtaggtttactgttgtagttgcaactcagcttcctgaaagcacttcactacgcttagcagatgtcctctggaattcccagattcctcttttgatctgtaggacatatggactagttggttatatgaggatcattataaaagaacatccaggtaa

SEQ ID NO: 158200 - DNA, 686 bp, Homo sapiens
  Payload ID: 10974
  Gene Symbol: NAE1
  Gene Name: NEDD8 activating enzyme E1 subunit 1
  ENST ID: ENST00000566336
  CDS Start-End: 200-686
cgcgcggcaggcgcggccatggcgcagctgggaaagctgctcaaggagcagaagtacgaccggcagctgaggtgtcttctacgtgccatactttgatggagaaaacaggcgtttacggtccatctggttcttctaggcgattcctccatacatttgacagctgtctgggcccttatggagcatacagtggagtggaaagatggatgctcagcaaacaaaaacaaatgaagccaggttgtggggtgatcatgggcaagaggctttagaatctgctcatgtttgcctaataaatgcaacagccacaggaactgaaattcttaaaaacttggtactaccaggtattggttcgtttacaattattgatggaaatcaggtcagcggagaagatgctggaaacaatttcttccttcaaagaagcagtatcggcaagaaccgagctgaagctgccatggaattcttacaagaattaaatagcgatgtctctggaagttttgtggaagagagtccagaaaaccttctagacaatgatccctcatttttctgtaggtttactgttgtagttgcaactcagcttcctgaaagcacttcactacgcttagcagatgtcctctggaattcccagattcctcttttgatctgtaggacatatggactagttggttatatgaggatcattataaaagaac

SEQ ID NO: 158201 - DNA, 576 bp, Homo sapiens
  Payload ID: 10974
  Gene Symbol: NAE1
  Gene Name: NEDD8 activating enzyme E1 subunit 1
  ENST ID: ENST00000566663
  CDS Start-End: 1-390
gcaccagagtccatttcagagaaagaattaaaattactctgcagcaattctgcatttcttcgagtggtaagatgtcgatccttagctgaagaatatggtttggatacaattaacaaggatgaaattatttctagcatggacaatccagataatgaaatagtgttgtacttaatgttacgggctgttgatagatttcataaacaacagggtagatatccaggagtatctaactatcaagttgaagaagatataggaaagttgaagtcttgtctcactggcttccttcaggaatatggtttatctgtaatggtgaaagatgattatgtccacgaattgagctgctgctcaagaggtcatcaaaataatcaccaaacaatttgtaatttttaataatacttacatttacagtggcatgtcacaaacttcagcaactttccagttgtagagtaagcaagcaccttaagtagtgtgttaatgattgaaactgtaattgccttcgggttgtgctttagtctgtaaaattctaaaggagagctgctaaattgttttcttaataaacatttttctcatttgtaa

SEQ ID NO: 158202 - DNA, 473 bp, Homo sapiens
  Payload ID: 10974
  Gene Symbol: NAE1
  Gene Name: NEDD8 activating enzyme E1 subunit 1
  ENST ID: ENST00000562428
  CDS Start-End: 1-339
tttcataaacaacagggtagatatccaggagtatctaactatcaagttgaagaagatataggaaagttgaagtcttgtctcactggcttccttcaggaatatggtttatctgtaatggtgaaagatgattatgtccacgaattgctaatcaaaattcatgtctctgtggtctcctttagttgccgatatggagctgctgagccacataccattgctgcattcttggggggagctgctgctcaagaggtcatcaaaataatcaccaaacaatttgtaatttttaataatacttacatttacagtggcatgtcacaaacttcagcaactttccagttgtagagtaagcaagcaccttaagtagtgtgttaatgattgaaactgtaattgccttcgggttgtgctttagtctgtaaaattctaaaggagagctgctaaattgttttcttaataaacatttttctcatttgtaataa

SEQ ID NO: 158203 - DNA, 728 bp, Homo sapiens
  Payload ID: 10974
  Gene Symbol: NAE1
  Gene Name: NEDD8 activating enzyme E1 subunit 1
  ENST ID: ENST00000561579
  CDS Start-End: 357-728
cgcagagtcggctgcgtcagcaggcaatggccttggagcaccggcctgagctacccagggagacggtggatctccaggaaaccgcgagtgcctaggagcccctccccaccttttccggggaagccctggtcggagcgagccggttgtggggtgatcatgggcaagaggctttagaatctgctcatgtttgcctaataaatgcaacagccacaggaactgaaattcttaaaaacttggtactaccaggtattggttcgtttacaattattgatggaaatcaggtcagcggagaagatgctggaaacaatttcttccttcaaagaagcagtatcggcaagaaccgagctgaagctgccatggaattcttacaagaattaaatagcgatgtctctggaagttttgtggaagagagtccagaaaaccttctagacaatgatccctcatttttctgtaggtttactgttgtagttgcaactcagcttcctgaaagcacttcactacgcttagcagatgtcctctggaattcccagattcctcttttgatctgtaggacatatggactagttggttatatgaggatcattataaaagaacatccagtaatagaatctcatccagataatgcattagaggatctacgactagataagccatttcctgaactgagagaacattttcagtcctatgatttggatcatatggaaaaaaaggaccacagtcatactcca

SEQ ID NO: 158204 - DNA, 595 bp, Homo sapiens
  Payload ID: 10975
  Gene Symbol: NEDD8-MDP1
  Gene Name: NEDD8-MDP1 readthrough
  ENST ID: ENST00000534348
  CDS Start-End: 86-595
aggcaagagtgctggagggcggcagcggcgaccggagcggtaggagcagcaatttatccgtgtgcagccccaaactggaaagaagatgctaattaaagtgaagacgctgaccggaaaggagattgagattgacattgaacctacagacaaggtggagcgaatcaaggagcgtgtggaggagaaagagggaatccccccacaacagcagaggctcatctacagtggcaagcagattgatggaactgtacgagataggcggggccaagacgtccgactgtacccagaggtgcctgaggtcctaaaacgattgcagagccttggggtgcccggtgcggctgcttcaaggacaagtgagatagaaggggccaaccagctactggagctctttgacctcttcaggtactttgttcatcgggaaatctatccaggcagcaagatcacacactttgagaggttgcagcagaagactggaattcctttctcccagatgatcttctttgatgatgagaggcggaatattgtagacgtcagcaaactgggtgttacctgcattcacatccagaatggaatgaatcttcaaactctaagtcaaggg

SEQ ID NO: 158205 - DNA, 471 bp, Homo sapiens
  Payload ID: 10975
  Gene Symbol: NEDD8-MDP1
  Gene Name: NEDD8-MDP1 readthrough
  ENST ID: ENST00000530579
  CDS Start-End: 19-222
ccccaaactggaaagaagatgctaattaaagtgaagacgctgaccggaaaggagattgagattgacattgaacctacagacaaggtggagcgaatcaaggagcgtgtggaggagaaagagggaatccccccacaacagcagaggctcatctacagtggcaagcagatattacactctctggcctttctgggtcgacacgcacgtagaccctccgttccataagagcagtgatggaactgtacgagataggcggggccaagacgtccgactgtacccagaggtgcctgaggtcctaaaacgattgcagagccttggggtgcccggtgcggctgcttcaaggacaagtgagatagaaggggccaaccagctactggagctctttgacctcttcaggtactttgttcatcgggaaatctatccaggcagcaagatcacacactttgagaggttgcagcagaagactggaattcc

SEQ ID NO: 158206 - DNA, 758 bp, Homo sapiens
  Payload ID: 10975
  Gene Symbol: NEDD8-MDP1
  Gene Name: NEDD8-MDP1 readthrough
  ENST ID: ENST00000605847
  CDS Start-End: 70-324
gggcggcagcggcgaccggagcggtaggagcagcaatttatccgtgtgcagccccaaactggaaagaagatgctaattaaagtgaagacgctgaccggaaaggagattgagattgacattgaacctacagacaaggtggagcgaatcaaggagcgtgtggaggagaaagagggaatccccccacaacagcagaggctcatctacagtggcaagcagatgaatgatgagaagacagcagctgattacaagattttagtgatggaactgtacgagataggcggggccaagacgtccgactgtacccagaggtgcctgaggtcctaaaacgattgcagagccttggggtgcccggtgcggctgcttcaaggacaagtgagatagaaggggccaaccagctactggagctctttgacctcttcaggtactttgttcatcgggaaatctatccaggcagcaagatcacacactttgagaggttgcagcagaagactggaattcctttctcccagatgatcttctttgatgatgagaggcggaatattgtagacgtcagcaaactgggtgttacctgcattcacatccagaatggaatgaatcttcaaactctaagtcaagggttagagacatttgcgaaggcccaaactgggcctttgaggtccagccttgaggagagcccatttgaggcctaaactgaaaggaaatcaagaaggcattttcaggtgcatttgtaatttattaaagttcatctgtgtgtgaca

SEQ ID NO: 158207 - DNA, 2228 bp, Homo sapiens
  Payload ID: 10976
  Gene Symbol: NELFA
  Gene Name: negative elongation factor complex member A
  ENST ID: ENST00000333877
  CDS Start-End: 225-485
ggctctcggctttgccacaaagcttcccgaagacgcggccgctacccggagacgcggtcgccacccagaagcgctctcccgggaagccccgctcgtgggaccgcgccacctgcgccgcctctgcggcccgcagcccgacgggcgccgccatgttggggtcctagcgagggacgcgtaggtgtcttcataagatgccggggcagcggcgcgcgctttcccccaagatggcgtccatgcgggagagcgacacgggcctgtggctgcacaacaagctgggggccacggacgagctgtgggcgccgcccagcatcgcgtccctgctcacggccgcggtcatcgacaacatccgtctctgcttccatggcctctcgtcggcagtgaagctcaagttgctactcgggacgctgcacctcccgcgccgcacggtggacgagtgggtgagtgtgaagcgtctgccatgctgccactggagtgccagtacttgaacaaaaacgccctgacgaccctcgcgggacccctcactcccccggtgaagcattttcagttaaagcggaaacccaagagcgccacgctgcgggcggagctgctgcagaagtccacggagaccgcccagcagttgaagcggagcgccggggtgcccttccacgccaagggccgggggctgctgcggaagatggacaccaccaccccactcaaaggcatcccgaagcaggcgcccttcagaagccccacggcgcccagcgtcttcagccccacagggaaccggacccccatcccgccttccaggacgctgctgcggaaggaacgaggtgtgaagctgctggacatctctgagctggatatggttggcgctggccgagaggcgaagcggagaaggaagactctcgatgcggaggtggtggagaagccggccaaggaggaaacggtggtggagaacgccaccccggactacgcagccggcctggtgtccacgcagaaacttgggtccctgaacaatgagcctgcgctgccctccacgagctaccttccctccacgcccagcgtggttcccgcctcctcctacatccccagctccgagacgcccccagccccatcttcccgggaagccagccgcccaccagaggagcccagcgccccgagccccacgttgccagcgcagttcaagcagcgggcgcccatgtacaacagcggcctgagccctgccacacccacgcctgcggcgcccacctcgcctctgacacccaccacacctccggctgtcgcccctaccactcagacacccccggttgccatggtggccccgcagacccaggcccctgctcagcagcagcctaagaagaacctgtccctcacgagagagcagatgttcgctgcccaggagatgttcaagacggccaacaaagtcacgcggcccgagaaggccctcatcctgggcttcatggccggctcccgagagaacccgtgccaggagcagggggacgtgatccagatcaagctgagcgagcacacggaggacctgcccaaggcggacggccagggtagcacaaccatgctggtggacacagtgtttgagatgaactatgccacgggccagtggacgcgcttcaagaagtacaagcccatgaccaatgtgtcctagaaccacctgcctcacagctggccgtcacttgtgggggtccacgggacgatggctttgccagcttaaagtaaccggatggcggacacctggcccccgaggtcccccggccgccgccctgctgctgacccagcctgttttaagttctggatgcatttctctggggtatttggggcttatttttaaaattttaatatgggttcttttttgtgtgatttaagacactttttggactcaacgttacatttttgaatgtagtaagtaaattaaccaaaaaagttacaacttcctaattttagtgacagctctgcctgttagactcttactttttaaaatcttttctattttccctcgctggggcagtgccctcctacccccagggttgaggggaccaaggtggcacggtggtactgggggtgcggcagggacacccgaccacaccagagcgtgggagacggtgggccttgtcccctgcctgtgcctgcctgggagttttgtattcatcttttgtatagttgtggacatttaagacagtctttgggtacctattttcattgtaaaactatctgaaccattaaagtcgagcttttct

SEQ ID NO: 158208 - DNA, 3343 bp, Homo sapiens
  Payload ID: 10976
  Gene Symbol: NELFA
  Gene Name: negative elongation factor complex member A
  ENST ID: ENST00000382882
  CDS Start-End: 1119-2738
gtgacttccgcaggactgccaagttcaagccgccagggccagggcactgctagcagctgggctgagccctgttctcccggcgttcccaccgcccagtggcaatagctgtgaacggcggcaggagcatggcagtggaacaataaggaaaagatcttttaaaaaaaagatataatacagaagccaagcaaggcggccccgacctgtaaccccagcactctgggaggcagaggcgggcgggcggatcgcttgagcccaggagtttgagaccagcctggccaacataggaaggcctcgtcaaaaagacaaaagggtaaaacgaatttaataaaatgaagtttaacttttactcatgtttgtatctaatgacaagcttttaaaactgaaaagttcactactggctcctgcctggcggctccagcccgactgggggccggggcctccctgcactgtggggtcacgagtgcccctggacagctcccgagcgccctccgacccgcatgctcagcgcagccccgtcggcggcgcgccacgggcagagcgggctcagcgggggacggaagctcagcgctgcgaccgggatcccgcaggctcgctccgcagggccgcggctcctctccgtgcaggtgctgggcccgcgggggcggggcgtccacacggtccgcgccgagacccaagcggggaaaaagcgaagagcggacagcggggcaggtgccacagggagcctccgccccaccgcgcgagcagcaagtctgcggcgcttgacacctgcactgcgaatgccaggccgcagcccgggctcccaagacgcgaatacgcgcgcctgctcgtgacgtcattttttgcggtcttcccgagagccagcagagggcgccgccatgatgttttacggaagccgatagtccttgctcagcggcaccccgtccttccggctctcggctttgccacaaagcttcccgaagacgcggccgctacccggagacgcggtcgccacccagaagcgctctcccgggaagccccgctcgtgggaccgcgccacctgcgccgcctctgcggcccgcagcccgacgggcgccgccatgttggggtcctagcgagggacgcgtaggtgtcttcataagatgccggggcagcggcgcgcgctttcccccaagatggcgtccatgcgggagagcgacacgggcctgtggctgcacaacaagctgggggccacggacgagctgtgggcgccgcccagcatcgcgtccctgctcacggccgcggtcatcgacaacatccgtctctgcttccatggcctctcgtcggcagtgaagctcaagttgctactcgggacgctgcacctcccgcgccgcacggtggacgagatgaagggcgccctaatggagatcatccagctcgccagcctcgactcggacccctgggtgctcatggtcgccgacatcttgaagtcctttccggacacaggctcgcttaacctggagctggaggagcagaatcccaacgttcaggatattttgggagaacttagagaaaaggtgggtgagtgtgaagcgtctgccatgctgccactggagtgccagtacttgaacaaaaacgccctgacgaccctcgcgggacccctcactcccccggtgaagcattttcagttaaagcggaaacccaagagcgccacgctgcgggcggagctgctgcagaagtccacggagaccgcccagcagttgaagcggagcgccggggtgcccttccacgccaagggccgggggctgctgcggaagatggacaccaccaccccactcaaaggcatcccgaagcaggcgcccttcagaagccccacggcgcccagcgtcttcagccccacagggaaccggacccccatcccgccttccaggacgctgctgcggaaggaacgaggtgtgaagctgctggacatctctgagctggatatggttggcgctggccgagaggcgaagcggagaaggaagactctcgatgcggaggtggtggagaagccggccaaggaggaaacggtggtggagaacgccaccccggactacgcagccggcctggtgtccacgcagaaacttgggtccctgaacaatgagcctgcgctgccctccacgagctaccttccctccacgcccagcgtggttcccgcctcctcctacatccccagctccgagacgcccccagccccatcttcccgggaagccagccgcccaccagaggagcccagcgccccgagccccacgttgccagcgcagttcaagcagcgggcgcccatgtacaacagcggcctgagccctgccacacccacgcctgcggcgcccacctcgcctctgacacccaccacacctccggctgtcgcccctaccactcagacacccccggttgccatggtggccccgcagacccaggcccctgctcagcagcagcctaagaagaacctgtccctcacgagagagcagatgttcgctgcccaggagatgttcaagacggccaacaaagtcacgcggcccgagaaggccctcatcctgggcttcatggccggctcccgagagaacccgtgccaggagcagggggacgtgatccagatcaagctgagcgagcacacggaggacctgcccaaggcggacggccagggtagcacaaccatgctggtggacacagtgtttgagatgaactatgccacgggccagtggacgcgcttcaagaagtacaagcccatgaccaatgtgtcctagaaccacctgcctcacagctggccgtcacttgtgggggtccacgggacgatggctttgccagcttaaagtaaccggatggcggacacctggcccccgaggtcccccggccgccgccctgctgctgacccagcctgttttaagttctggatgcatttctctggggtatttggggcttatttttaaaattttaatatgggttcttttttgtgtgatttaagacactttttggactcaacgttacatttttgaatgtagtaagtaaattaaccaaaaaagttacaacttcctaattttagtgacagctctgcctgttagactcttactttttaaaatcttttctattttccctcgctggggcagtgccctcctacccccagggttgaggggaccaaggtggcacggtggtactgggggtgcggcagggacacccgaccacaccagagcgtgggagacggtgggccttgtcccctgcctgtgcctgcctgggagttttgtattcatcttttgtatagttgtggacatttaagacagtctttgggtacctattttcattgtaaaactatctgaaccattaaagtcgagcttttctaaagaaagccaccata

SEQ ID NO: 158209 - DNA, 2188 bp, Homo sapiens
  Payload ID: 10976
  Gene Symbol: NELFA
  Gene Name: negative elongation factor complex member A
  ENST ID: ENST00000416258
  CDS Start-End: 1-1599
aggaaggcctggggctggggtttcagccccggcgtctggacagggcagggcgctgttgttcacccccagcgccagccagcccagctgtctcacactgtgagcagcccagtgggcgcatggcagaggcacaggcacgccatggcctggctctctgcgtttcctcgtgggagggggtttatgtggccgaagcaggccctggtgtggatggatctggcctcccagatgaagggcgccctaatggagatcatccagctcgccagcctcgactcggacccctgggtgctcatggtcgccgacatcttgaagtcctttccggacacaggctcgcttaacctggagctggaggagcagaatcccaacgttcaggatattttgggagaacttagagaaaaggtgggtgagtgtgaagcgtctgccatgctgccactggagtgccagtacttgaacaaaaacgccctgacgaccctcgcgggacccctcactcccccggtgaagcattttcagttaaagcggaaacccaagagcgccacgctgcgggcggagctgctgcagaagtccacggagaccgcccagcagttgaagcggagcgccggggtgcccttccacgccaagggccgggggctgctgcggaagatggacaccaccaccccactcaaaggcatcccgaagcaggcgcccttcagaagccccacggcgcccagcgtcttcagccccacagggaaccggacccccatcccgccttccaggacgctgctgcggaaggaacgaggtgtgaagctgctggacatctctgagctggatatggttggcgctggccgagaggcgaagcggagaaggaagactctcgatgcggaggtggtggagaagccggccaaggaggaaacggtggtggagaacgccaccccggactacgcagccggcctggtgtccacgcagaaacttgggtccctgaacaatgagcctgcgctgccctccacgagctaccttccctccacgcccagcgtggttcccgcctcctcctacatccccagctccgagacgcccccagccccatcttcccgggaagccagccgcccaccagaggagcccagcgccccgagccccacgttgccagcgcagttcaagcagcgggcgcccatgtacaacagcggcctgagccctgccacacccacgcctgcggcgcccacctcgcctctgacacccaccacacctccggctgtcgcccctaccactcagacacccccggttgccatggtggccccgcagacccaggcccctgctcagcagcagcctaagaagaacctgtccctcacgagagagcagatgttcgctgcccaggagatgttcaagacggccaacaaagtcacgcggcccgagaaggccctcatcctgggcttcatggccggctcccgagagaacccgtgccaggagcagggggacgtgatccagatcaagctgagcgagcacacggaggacctgcccaaggcggacggccagggtagcacaaccatgctggtggacacagtgtttgagatgaactatgccacgggccagtggacgcgcttcaagaagtacaagcccatgaccaatgtgtcctagaaccacctgcctcacagctggccgtcacttgtgggggtccacgggacgatggctttgccagcttaaagtaaccggatggcggacacctggcccccgaggtcccccggccgccgccctgctgctgacccagcctgttttaagttctggatgcatttctctggggtatttggggcttatttttaaaattttaatatgggttcttttttgtgtgatttaagacactttttggactcaacgttacatttttgaatgtagtaagtaaattaaccaaaaaagttacaacttcctaattttagtgacagctctgcctgttagactcttactttttaaaatcttttctattttccctcgctggggcagtgccctcctacccccagggttgaggggaccaaggtggcacggtggtactgggggtgcggcagggacacccgaccacaccagagcgtgggagacggtgggccttgtcccctgcctgtgcctgcctgggagttttgtattcatcttttgtatagttgtggacatttaagacagtctttgggtacctattttcattgtaaaactatctgaaccattaaagtcgagcttttct

SEQ ID NO: 158210 - DNA, 553 bp, Homo sapiens
  Payload ID: 10976
  Gene Symbol: NELFA
  Gene Name: negative elongation factor complex member A
  ENST ID: ENST00000443203
  CDS Start-End: 14-322
gctttcccccaagatggcgtccatgcgggagagcgacacgggcctgtggctgcacaacaagctgggggccacggacgagctgtgggcgccgcccagcatcgcgtccctgctcacggccgcggtcatcgacaacatccgtctctgcttccatggcctctcgtcggcagtgaagctcaagttgctactcgggacgctgcacctcccgcgccgcacggtggacgagggtctggcgctgtcaaccaggctggagtgcagtggcaccatcgtgactcactgcagccttgacctcctcacctcagatcttcccatctcagcctcctgagtagctgggactacagggtttcaccatgctgcccaggctggtcttgaactcctgacctcaagcaatctgcttgcctcagcctcctgaagggctgggattacagatgaagggcgccctaatggagatcatccagctcgccagcctcgactcggacccctgggtgctcatggtcgccgacatcttgaagtcctttccggacacaggctcgcttaacctggagctggaggagca

SEQ ID NO: 158211 - DNA, 888 bp, Homo sapiens
  Payload ID: 10976
  Gene Symbol: NELFA
  Gene Name: negative elongation factor complex member A
  ENST ID: ENST00000431323
  CDS Start-End: 6-888
ataagatgccggggcagcggcgcgcgctttcccccaagatggcgtccatgcgggagagcgacacgggcctgtggctgcacaacaagctgggggccacggacgagctgtgggcgccgcccagcatcgcgtccctgctcacggccgcggtcatcgacaacatccgtctctgcttccatggcctctcgtcggcagtgaagctcaagttgctactcgggacgctgcacctcccgcgccgcacggtggacgagcatcctattttgcagatgaagggcgccctaatggagatcatccagctcgccagcctcgactcggacccctgggtgctcatggtcgccgacatcttgaagtcctttccggacacaggctcgcttaacctggagctggaggagcagaatcccaacgttcaggatattttgggagaacttagagaaaaggtgggtgagtgtgaagcgtctgccatgctgccactggagtgccagtacttgaacaaaaacgccctgacgaccctcgcgggacccctcactcccccggtgaagcattttcagttaaagcggaaacccaagagcgccacgctgcgggcggagctgctgcagaagtccacggagaccgcccagcagttgaagcggagcgccggggtgcccttccacgccaagggccgggggctgctgcggaagatggacaccaccaccccactcaaaggcatcccgaagcaggcgcccttcagaagccccacggcgcccagcgtcttcagccccacagggaaccggacccccatcccgccttccaggacgctgctgcggaaggaacgaggtgtgaagctgctggacatctctgagctggatatggttggcgctggccgagaggcgaagcggagaaggaagactctcg

SEQ ID NO: 158212 - DNA, 561 bp, Homo sapiens
  Payload ID: 10976
  Gene Symbol: NELFA
  Gene Name: negative elongation factor complex member A
  ENST ID: ENST00000411649
  CDS Start-End: 1-561
gtctctgcttccatggcctctcgtcggcagtgaagctcaagttgctactcgggacgctgcacctcccgcgccgcacggtggacgagaccccggccgtccggagcgctctgtgtccgttttactcttttctacacgccgttttgcgtcattccaataagtggatgaagggcgccctaatggagatcatccagctcgccagcctcgactcggacccctgggtgctcatggtcgccgacatcttgaagtcctttccggacacaggctcgcttaacctggagctggaggagcagaatcccaacgttcaggatattttgggagaacttagagaaaaggtgggtgagtgtgaagcgtctgccatgctgccactggagtgccagtacttgaacaaaaacgccctgacgaccctcgcgggacccctcactcccccggtgaagcattttcagttaaagcggaaacccaagagcgccacgctgcgggcggagctgctgcagaagtccacggagaccgcccagcagttgaagcggagcgccggggtgcccttccacgccaagggccgggggc

SEQ ID NO: 158213 - DNA, 2199 bp, Homo sapiens
  Payload ID: 10976
  Gene Symbol: NELFA
  Gene Name: negative elongation factor complex member A
  Uniprot ID: Q9H3P2
  ENST ID: ENST00000411638
  CDS Start-End: 17-1603
cgcgctttcccccaagatggcgtccatgcgggagagcgacacgggcctgtggctgcacaacaagctgggggccacggacgagctgtgggcgccgcccagcatcgcgtccctgctcacggccgcggtcatcgacaacatccgtctctgcttccatggcctctcgtcggcagtgaagctcaagttgctactcgggacgctgcacctcccgcgccgcacggtggacgagatgaagggcgccctaatggagatcatccagctcgccagcctcgactcggacccctgggtgctcatggtcgccgacatcttgaagtcctttccggacacaggctcgcttaacctggagctggaggagcagaatcccaacgttcaggatattttgggagaacttagagaaaaggtgggtgagtgtgaagcgtctgccatgctgccactggagtgccagtacttgaacaaaaacgccctgacgaccctcgcgggacccctcactcccccggtgaagcattttcagttaaagcggaaacccaagagcgccacgctgcgggcggagctgctgcagaagtccacggagaccgcccagcagttgaagcggagcgccggggtgcccttccacgccaagggccgggggctgctgcggaagatggacaccaccaccccactcaaaggcatcccgaagcaggcgcccttcagaagccccacggcgcccagcgtcttcagccccacagggaaccggacccccatcccgccttccaggacgctgctgcggaaggaacgaggtgtgaagctgctggacatctctgagctggatatggttggcgctggccgagaggcgaagcggagaaggaagactctcgatgcggaggtggtggagaagccggccaaggaggaaacggtggtggagaacgccaccccggactacgcagccggcctggtgtccacgcagaaacttgggtccctgaacaatgagcctgcgctgccctccacgagctaccttccctccacgcccagcgtggttcccgcctcctcctacatccccagctccgagacgcccccagccccatcttcccgggaagccagccgcccaccagaggagcccagcgccccgagccccacgttgccagcgcagttcaagcagcgggcgcccatgtacaacagcggcctgagccctgccacacccacgcctgcggcgcccacctcgcctctgacacccaccacacctccggctgtcgcccctaccactcagacacccccggttgccatggtggccccgcagacccaggcccctgctcagcagcagcctaagaagaacctgtccctcacgagagagcagatgttcgctgcccaggagatgttcaagacggccaacaaagtcacgcggcccgagaaggccctcatcctgggcttcatggccggctcccgagagaacccgtgccaggagcagggggacgtgatccagatcaagctgagcgagcacacggaggacctgcccaaggcggacggccagggtagcacaaccatgctggtggacacagtgtttgagatgaactatgccacgggccagtggacgcgcttcaagaagtacaagcccatgaccaatgtgtcctagaaccacctgcctcacagctggccgtcacttgtgggggtccacgggacgatggctttgccagcttaaagtaaccggatggcggacacctggcccccgaggtcccccggccgccgccctgctgctgacccagcctgttttaagttctggatgcatttctctggggtatttggggcttatttttaaaattttaatatgggttcttttttgtgtgatttaagacactttttggactcaacgttacatttttgaatgtagtaagtaaattaaccaaaaaagttacaacttcctaattttagtgacagctctgcctgttagactcttactttttaaaatcttttctattttccctcgctggggcagtgccctcctacccccagggttgaggggaccaaggtggcacggtggtactgggggtgcggcagggacacccgaccacaccagagcgtgggagacggtgggccttgtcccctgcctgtgcctgcctgggagttttgtattcatcttttgtatagttgtggacatttaagacagtctttgggtacctattttcattgtaaaactatctgaaccattaaagtcgagcttttctaaagaaa

SEQ ID NO: 158214 - DNA, 738 bp, Homo sapiens
  Payload ID: 10976
  Gene Symbol: NELFA
  Gene Name: negative elongation factor complex member A
  ENST ID: ENST00000453740
  CDS Start-End: 1-738
cccgttcgtgtctcaggagtgtcccgcgggcaggaaggctgaggccggtgaactctcatgtgcctgcctgtgctttttctccagtgggtgagtgtgaagcgtctgccatgctgccactggagtgccagtacttgaacaaaaacgccctgacgaccctcgcgggacccctcactcccccggtgaagcattttcagttaaagcggaaacccaagagcgccacgctgcgggcggagctgctgcagaagtccacggagaccgcccagcagttgaagcggagcgccggggtgcccttccacgccaagggccgggggctgctgcggaagatggacaccaccaccccactcaaaggcatcccgaagcaggcgcccttcagaagccccacggcgcccagcgtcttcagccccacagggaaccggacccccatcccgccttccaggacgctgctgcggaaggaacgaggtgtgaagctgctggacatctctgagctggatatggttggcgctggccgagaggcgaagcggagaaggaagactctcgatgcggaggtggtggagaagccggccaaggaggaaacggtggtggagaacgccaccccggactacgcagccggcctggtgtccacgcagaaacttgggtccctgaacaatgagcctgcgctgccctccacgagctaccttccctccacgcccagcgtggttcccgcctcctcctacatccccagctccgagacgcccccag

SEQ ID NO: 158215 - DNA, 792 bp, Homo sapiens
  Payload ID: 10976
  Gene Symbol: NELFA
  Gene Name: negative elongation factor complex member A
  ENST ID: ENST00000458616
  CDS Start-End: 1-376
gagcgacacgggcctgtggctgcacaacaagctgggggccacggacgagctgtgggcgccgcccagcatcgcgtccctgctcacggccgcggtcatcgacaacatccgtctctgcttccatggcctctcgtcggcagtgaagctcaagttgctactcgggacgctgcacctcccgcgccgcacggtggacgagaccccggccgtccggagcgctctgtgtccgttttactcttttctacacgccgttttgcgtcattccaataagtgggtgtgtgagggtctggcgctgtcaaccaggctggagtgcagtggcaccatcgtgactcactgcagccttgacctcctcacctcagatcttcccatctcagcctcctgagtagctgggactacagggtttcaccatgctgcccaggctggtcttgaactcctgacctcaagcaatctgcttgcctcagcctcctgaagggctgggattacagagtcttgccctgtcgccaggctggagtgcagtggcgcgatctcggctcaccacaacctgcgcctcccaggttcaagggattctcctgcctcagcctcccgagtagctgggactagagacacgcgccaccatgcccagctaattagctaatttttgtatttttagtggagacggggtttcaccgtgttggccaggatggtctccatctcttgaccttgtgatccacctgccttggcctcccaaagtgctgggattacaggcatgagccactgctcccggcctttatttcttctttaaaaaaaaaaaaaaaaaaa

SEQ ID NO: 158216 - DNA, 1022 bp, Homo sapiens
  Payload ID: 10976
  Gene Symbol: NELFA
  Gene Name: negative elongation factor complex member A
  ENST ID: ENST00000455762
  CDS Start-End: 399-1022
ggacgctccaggaatcgggtgtgcctggccctggccgggggctgcccccgggagcagcgtccaggcccatggcggatgcagtctagaggactgcctggaggaggcggcgccggggcgagacctccagagcgcaaggccggcgggagaaaagctgaggaagtgggaaatctgtggctggagctcagcagattgcaacacttctacatcaagaaaatgtggcaataaggctgccaaaccctcctgtcttctgaaccgaatccttgtagattctggatatcgcaccttcataggaatattctgagaatattttctcctattcgcttccaggagccgtcgtagcagccgattaggactggctgctggtgtggtgatgacctagagggcttctcccaggtaagatgaagggcgccctaatggagatcatccagctcgccagcctcgactcggacccctgggtgctcatggtcgccgacatcttgaagtcctttccggacacaggctcgcttaacctggagctggaggagcagaatcccaacgttcaggatattttgggagaacttagagaaaaggtgggtgagtgtgaagcgtctgccatgctgccactggagtgccagtacttgaacaaaaacgccctgacgaccctcgcgggacccctcactcccccggtgaagcattttcagttaaagcggaaacccaagagcgccacgctgcgggcggagctgctgcagaagtccacggagaccgcccagcagttgaagcggagcgccggggtgcccttccacgccaagggccgggggctgctgcggaagatggacaccaccaccccactcaaaggcatcccgaagcaggcgcccttcagaagccccacggcgcccagcgtcttcagccccacagggaaccggacccccatcccgccttccaggacgctgctgcggaaggaacgaggtgtgaagctgctggacatctctgagctggatatggttggcgctggccgagaggcgaagcggagaaggaagactctc

SEQ ID NO: 158217 - DNA, 574 bp, Homo sapiens
  Payload ID: 10976
  Gene Symbol: NELFA
  Gene Name: negative elongation factor complex member A
  ENST ID: ENST00000421397
  CDS Start-End: 1-198
atcgacaacatccgtctctgcttccatggcctctcgtcggcagtgaagctcaagttgctactcgggacgctgcacctcccgcgccgcacggtggacgagggtctggcgctgtcaaccaggctggagtgcagtggcaccatcgtgactcactgcagccttgacctcctcacctcagatcttcccatctcagcctcctgagtagctgggactacagggtttcaccatgctgcccaggctggtcttgaactcctgacctcaagcaatctgcttgcctcagcctcctgaagggctgggattacagtgggtgagtgtgaagcgtctgccatgctgccactggagtgccagtacttgaacaaaaacgccctgacgaccctcgcgggacccctcactcccccggtgaagcattttcagttaaagcggaaacccaagagcgccacgctgcgggcggagctgctgcagaagtccacggagaccgcccagcagttgaagcggagcgccggggtgcccttccacgccaagggccgggggctgctgcggaagatggacaccaccaccccactcaaaggcatcccga

SEQ ID NO: 158218 - DNA, 2465 bp, Homo sapiens
  Payload ID: 10976
  Gene Symbol: NELFA
  Gene Name: negative elongation factor complex member A
  ENST ID: ENST00000542778
  CDS Start-End: 244-1863
atgatgttttacggaagccgatagtccttgctcagcggcaccccgtccttccggctctcggctttgccacaaagcttcccgaagacgcggccgctacccggagacgcggtcgccacccagaagcgctctcccgggaagccccgctcgtgggaccgcgccacctgcgccgcctctgcggcccgcagcccgacgggcgccgccatgttggggtcctagcgagggacgcgtaggtgtcttcataagatgccggggcagcggcgcgcgctttcccccaagatggcgtccatgcgggagagcgacacgggcctgtggctgcacaacaagctgggggccacggacgagctgtgggcgccgcccagcatcgcgtccctgctcacggccgcggtcatcgacaacatccgtctctgcttccatggcctctcgtcggcagtgaagctcaagttgctactcgggacgctgcacctcccgcgccgcacggtggacgagatgaagggcgccctaatggagatcatccagctcgccagcctcgactcggacccctgggtgctcatggtcgccgacatcttgaagtcctttccggacacaggctcgcttaacctggagctggaggagcagaatcccaacgttcaggatattttgggagaacttagagaaaaggtgggtgagtgtgaagcgtctgccatgctgccactggagtgccagtacttgaacaaaaacgccctgacgaccctcgcgggacccctcactcccccggtgaagcattttcagttaaagcggaaacccaagagcgccacgctgcgggcggagctgctgcagaagtccacggagaccgcccagcagttgaagcggagcgccggggtgcccttccacgccaagggccgggggctgctgcggaagatggacaccaccaccccactcaaaggcatcccgaagcaggcgcccttcagaagccccacggcgcccagcgtcttcagccccacagggaaccggacccccatcccgccttccaggacgctgctgcggaaggaacgaggtgtgaagctgctggacatctctgagctggatatggttggcgctggccgagaggcgaagcggagaaggaagactctcgatgcggaggtggtggagaagccggccaaggaggaaacggtggtggagaacgccaccccggactacgcagccggcctggtgtccacgcagaaacttgggtccctgaacaatgagcctgcgctgccctccacgagctaccttccctccacgcccagcgtggttcccgcctcctcctacatccccagctccgagacgcccccagccccatcttcccgggaagccagccgcccaccagaggagcccagcgccccgagccccacgttgccagcgcagttcaagcagcgggcgcccatgtacaacagcggcctgagccctgccacacccacgcctgcggcgcccacctcgcctctgacacccaccacacctccggctgtcgcccctaccactcagacacccccggttgccatggtggccccgcagacccaggcccctgctcagcagcagcctaagaagaacctgtccctcacgagagagcagatgttcgctgcccaggagatgttcaagacggccaacaaagtcacgcggcccgagaaggccctcatcctgggcttcatggccggctcccgagagaacccgtgccaggagcagggggacgtgatccagatcaagctgagcgagcacacggaggacctgcccaaggcggacggccagggtagcacaaccatgctggtggacacagtgtttgagatgaactatgccacgggccagtggacgcgcttcaagaagtacaagcccatgaccaatgtgtcctagaaccacctgcctcacagctggccgtcacttgtgggggtccacgggacgatggctttgccagcttaaagtaaccggatggcggacacctggcccccgaggtcccccggccgccgccctgctgctgacccagcctgttttaagttctggatgcatttctctggggtatttggggcttatttttaaaattttaatatgggttcttttttgtgtgatttaagacactttttggactcaacgttacatttttgaatgtagtaagtaaattaaccaaaaaagttacaacttcctaattttagtgacagctctgcctgttagactcttactttttaaaatcttttctattttccctcgctggggcagtgccctcctacccccagggttgaggggaccaaggtggcacggtggtactgggggtgcggcagggacacccgaccacaccagagcgtgggagacggtgggccttgtcccctgcctgtgcctgcctgggagttttgtattcatcttttgtatagttgtggacatttaagacagtctttgggtacctattttcattgtaaaactatctgaaccattaaagtcgagcttttctaaagaaagccacc

SEQ ID NO: 158219 - DNA, 2698 bp, Homo sapiens
  Payload ID: 10977
  Gene Symbol: NELFB
  Gene Name: negative elongation factor complex member B
  Uniprot ID: Q8WX92
  ENST ID: ENST00000343053
  CDS Start-End: 194-2080
cgggaccgggtgggcgcatgcgcgctgggctggctgggcggggtctctcgcgccgggtgagggcgctgctcccaggaacctgcgcgcggccccggcggcgtttcccgggggccggttggcgggcggacctgggcggtgcggggcggaagtgggcggctgcgggacgcgcgcggagtcgcgcggcgggcgggacctggccgagctggagggcgccggggagcggggctcgggcggtccccgaggcccggcggagcgggcttctggggtgtctgcggcggcgccgggggaacgggctggggatggggcgcctagccgggcggtggccggggcctcggccatgttcgcggggctgcaggacctgggcgtggccaacggcgaggacctgaaggagaccctgaccaactgcacggagccgctcaaggccatcgagcagttccagacagagaatggtgtgctgctgccatctcttcagtcagccctccccttcttggacctgcacgggacgccgcggctggagttccaccagtcggtattcgatgagctgcgggacaagctgctggagcgagtgtcagccatcgcttcggaggggaaggctgaggaaaggtacaagaagctggaagaccttctggagaagagcttttctctggtgaagatgccgtccctgcagcccgtggtgatgtgcgtcatgaagcacctgcccaaggttccggagaaaaaactgaagctggttatggctgacaaggagctgtatcgagcctgcgccgtggaggtgaagcggcagatctggcaagacaaccaggccctcttcggggacgaggtttccccactcctgaagcagtacatcctggagaaggagagcgctctcttcagtacagagctctctgtcctgcacaactttttcagtccttcccccaagaccaggcgccagggcgaggtggtgcagcggctgacgcggatggtggggaagaacgtgaagctgtacgacatggtgctgcagtttctgcgcacgctcttcctgcgcacgcggaatgtgcactactgcacgctgcgggctgagctgctcatgtccctgcacgacctggacgtgggtgaaatctgcaccgtggacccgtgccacaagttcacctggtgcctggacgcctgcatccgagagcggttcgtggacagcaagagggcgcgggagctgcaggggtttctcgatggcgtcaagaagggccaggagcaggtgctgggggacctgtccatgatcctgtgtgaccccttcgccatcaacacgctggcactgagcacagtcaggcacctgcaggagctggtcggccaggagacactgcccagggacagccccgacctcctgctgctgctccggctgctggcgctgggccagggagcctgggacatgatcgacagccaggtcttcaaggagcccaagatggaggtagagctcatcaccaggttcctcccgatgctcatgtccttcctggtggatgactacactttcaatgtggatcagaaacttccggctgaggagaaagccccagtctcatatccaaacacacttcccgaaagcttcactaagtttctgcaggagcagcgcatggcctgcgaggtggggctgtactacgtcctgcacatcaccaagcagaggaacaagaacgcgctcctccgcctgctgcccgggctggtggagacctttggcgacttggcctttggcgacatcttcctccacctgctcacgggcaaccttgcgctgctggccgacgaatttgcccttgaggacttctgcagcagcctcttcgatggcttcttcctcaccgcctctccaaggaaggagaacgtgcaccggcacgcgctgcggctcctcattcacctgcaccccagggtggccccgtctaagctggaggcgttgcagaaggccctggagcctacaggccagagcggagaggcagtgaaggagctttactcccagctcggcgagaagctggaacagctggatcaccggaagcccagcccggcacaggctgcggagacgccggccctggagctgcccctccccagcgtgcccgcccctgccccgctctgagggccctccagacctgctcgggtgctggggccatgccgagtcgcggccctgctcagccggaagaggctcccggacctggatgtacagggcagtctctcttcccggggctatggctgggcctgtcctgccgtcatggccccctgcttcctgctccttggagctggctcccggaccttgcccaccatccatgcagtggctcccagggcagagcctctccttgtactttggcagccatagaaagcgtgctcattttctgttttcctgtgttaggaaaaaaccacctgttttccaaggggagagggcggggcctgagggtgggggcggggcctcttcattggcccagcttggcgaaagcgaggcacactgcttactgccttggggttgtggagatggacccgtgacctcgtggaggccgtgtgggggcagcagcctggcctgtgccatggtgggtgtcctggggcctgtgcggagggagccacctcaccctgcagcccagtttgcaggtgtggccttgtttctccttgcccagcagtgctgccttcagcggccgtgacggggccagctggacacacggtgagattttctcgtatgtaaataaaaggcattttggtaaacgtg

SEQ ID NO: 158220 - DNA, 2565 bp, Homo sapiens
  Payload ID: 10977
  Gene Symbol: NELFB
  Gene Name: negative elongation factor complex member B
  ENST ID: ENST00000634710
  CDS Start-End: 204-1946
ggtgcggggcggaagtgggcggctgcgggacgcgcgcggagtcgcgcggcgggcgggacctggccgagctggagggcgccggggagcggggctcgggcggtccccgaggcccggcggagcgggcttctggggtgtctgcggcggcgccgggggaacgggctggggatggggcgcctagccgggcggtggccggggcctcggccatgttcgcggggctgcaggacctgggcgtggccaacggcgaggacctgaaggagaccctgaccaactgcacggagccgctcaaggccatcgagcagttccagacagagaatggtgtgctgctgccatctcttcagtcagccctccccttcttggacctgcacgggacgccgcggctggagttccaccagtcggtattcgatgagctgcgggacaagctgctggagcgagtgtcagccatcgcttcggaggggaaggctgaggaaaggtacaagaagctggaagaccttctggagaagagcttttctctggtgaagatgccgtccctgcagcccgtggtgatgtgcgtcatgaagcacctgcccaaggttccggagaaaaaactgaagctggttatggctgacaaggagctgtatcgagcctgcgccgtggaggtgaagcggcagatctggcaagacaaccaggccctcttcggggacgaggtttccccactcctgaagcagtacatcctggagaaggagagcgctctcttcagtacagagctctctgtcctgcacaactttttcagtccttcccccaagaccaggcgccagggcgaggtggtgcagcggctgacgcggatggtggggaagaacgtgaagctgtacgacatggtgctgcagtttctgcgcacgctcttcctgcgcacgcggaatgtgcactactgcacgctgcgggctgagctgctcatgtccctgcacgacctggacgtgggtgaaatctgcaccgtggacccgtgccacaagttcacctggtgcctggacgcctgcatccgagagcggttcgtggacagcaagagggcgcgggagctgcaggggtttctcgatggcgtcaagaagggccaggagcaggtgctgggggacctgtccatgatcctgtgtgaccccttcgccatcaacacgctggcactgagcacagtcaggcacctgcaggagctggtcggccaggagacactgcccagggacagccccgacctcctgctgctgctccggctgctggcgctgggccagggagcctgggacatgatcgacagccaggtcttcaaggagcccaagatggaggtagagctcatcaccaggttcctcccgatgctcatgtccttcctggtggatgactacactttcaatgtggatcagaaacttccggctgaggagaaagccccagtctcatatccaaacacacttcccgaaagcttcactaagtttctgcaggagcagcgcatggcctgcgaggtggggctgtactacgtcctgcacatcaccaagcagaggaacaagaacgcgctcctccgcctgctgcccgggctggtggagacctttggcgacttggcctttggcgacatcttcctccacctgctcacgggcaaccttgcgctgctggccgacgaatttgcccttgaggacttctgcagcagcctcttcgatggcttcttcctcaccgcctctccaaggaaggagaacgtgcaccggcacgcgctgcggctcctcattcacctgcaccccagggtggccccgtctaagctggaggcgttgcagaaggccctggagcctacaggccagagcggagaggcagtgaaggagctttactcccagctcggcgagaagctggaacagctggatcaccggaagcccagcccggcacaggctgcggagacgccggccctggagctgcccctccccagcgtgcccgcccctgccccgctctgagggccctccagacctgctcgggtgctggggccatgccgagtcgcggccctgctcagccggaagaggctcccggacctggatgtacagggcagtctctcttcccggggctatggctgggcctgtcctgccgtcatggccccctgcttcctgctccttggagctggctcccggaccttgcccaccatccatgcagtggctcccagggcagagcctctccttgtactttggcagccatagaaagcgtgctcattttctgttttcctgtgttaggaaaaaaccacctgttttccaaggggagagggcggggcctgagggtgggggcggggcctcttcattggcccagcttggcgaaagcgaggcacactgcttactgccttggggttgtggagatggacccgtgacctcgtggaggccgtgtgggggcagcagcctggcctgtgccatggtgggtgtcctggggcctgtgcggagggagccacctcaccctgcagcccagtttgcaggtgtggccttgtttctccttgcccagcagtgctgccttcagcggccgtgacggggccagctggacacacggtgagattttctcgtatgtaaataaaaggcattttggtaaacgtgg

SEQ ID NO: 158221 - DNA, 2097 bp, Homo sapiens
  Payload ID: 10978
  Gene Symbol: NELFCD
  Gene Name: negative elongation factor complex member C/D
  Uniprot ID: Q8IXH7
  ENST ID: ENST00000344018
  CDS Start-End: 8-1429
ggagggcatggcgggggccgtgccgggcgccatcatggacgaggactactacgggagcgcggccgagtggggcgacgaggctgacggcggccagcaggaggatgattctggagaaggagaggatgatgcggaggttcagcaagaatgcctgcataaattttccacccgggattatatcatggaaccctccatcttcaacactctgaagaggtattttcaggcaggagggtctccagagaatgttatccagctcttatctgaaaactacaccgctgtggcccagactgtgaacctgctggccgagtggctcattcagacaggtgttgagccagtgcaggttcaggaaactgtggaaaatcacttgaagagtttgctgatcaaacattttgacccccgcaaagcagattctatttttactgaagaaggagagaccccagcgtggctggaacagatgattgcacataccacgtggcgggaccttttttataaactggctgaagcccatccagactgtttgatgctgaacttcaccgttaagcttatttctgacgcagggtaccagggggagatcaccagtgtgtccacagcatgccagcagctagaagtgttctcgagagtgctccggacctctctagctacaattttagatggaggagaagaaaaccttgaaaaaaatctccctgagtttgccaagatggtgtgccacggggagcacacgtacctgtttgcccaggccatgatgtccgtgctggcccaggaggagcaggggggctccgctgtgcgcaggatcgcccaggaagtgcagcgctttgcccaggagaaaggtcatgacgccagtcagatcacactagccttgggcacagctgcctcctaccccagggcctgccaggctctcggggccatgctgtccaaaggagccctgaaccctgctgacatcaccgtcctgttcaagatgttcacaagcatggaccctcctccggttgaacttatccgcgttccagccttcctggacctgttcatgcagtcactctttaaaccaggggctcggatcaaccaggaccacaagcacaaatacatccacatcttggcgtacgcagcaagcgtggttgagacctggaagaagaacaagcgagtgagcatcaataaagatgagctgaagtcaacgtcaaaagctgtcgaaaccgttcacaatttgtgttgcaacgagaacaaaggggcctctgaactagtggcagaattgagcacactttatcagtgtattaggtttccagtggtagcaatgggtgtgctgaagtgggtggattggactgtatcagaaccaaggtactttcagctgcagactgaccatacccctgtccacctggcgttgctggatgagatcagcacctgcaccagctccgcacccccaggtcctgcagctgcttgttaagctttttgagactgagcactcccagctggacgtgatggagcagcttgagttgaagaagacactgctggacaggatggttcacctgctgagtcgaggttatgtacttcctgttgtcagttacatccgaaagtgtctggagaagctggacactgacatttcactcattcgctattttgtcactgaggtgctggacgtcattgctcctccttatacctctgacttcgtgcaacttttcctccccatcctggagaatgacagcatcgcaggtaccatcaaaacggaaggcgagcatgaccctgtgacggagtttatagctcactgcaaatctaacttcatcatggtgaactaatttagagcatcctccagagctgaagcagaacattccagaacccgttgtggaaaaaccctttcaagaagctgttttaagaggctcgggcagcgtcttgaaaatgggcaccgctgggaggaggtggatgacttctttacaaaggaaaatggcaggcgctgggctcccacgacccctcaggacagatctggccgtcagccgcgggccgctgggaactccactcggggaactcctttccaagctgacctcagttttctcacaagaacccagttagctgatgttttattgtaattgtcttaatttgctaagaacaagtaataag

SEQ ID NO: 158222 - DNA, 2137 bp, Homo sapiens
  Payload ID: 10978
  Gene Symbol: NELFCD
  Gene Name: negative elongation factor complex member C/D
  ENST ID: ENST00000460601
  CDS Start-End: 1-1781
gggagggcatggcgggggccgtgccgggcgccatcatggacgaggactactacgggagcgcggccgagtggggcgacgaggctgacggcggccagcaggaggatgattctggagaaggagaggatgatgcggaggttcagcaagaatgcctgcataaattttccacccgggattatatcatggaaccctccatcttcaacactctgaagaggtattttcaggcaggagggtctccagagaatgttatccagctcttatctgaaaactacaccgctgtggcccagactgtgaacctgctggccgagtggctcattcagacaggtgttgagccagtgcaggttcaggaaactgtggaaaatcacttgaagagtttgctgatcaaacattttgacccccgcaaagcagattctatttttactgaagaaggagagaccccagcgtggctggaacagatgattgcacataccacgtggcgggaccttttttataaactggctgaagcccatccagactgtttgatgctgaacttcaccgttaagcttatttctgacgcagggtaccagggggagatcaccagtgtgtccacagcatgccagcagctagaagtgttctcgagagtgctccggacctctctagctacaattttagatggaggagaagaaaaccttgaaaaaaatctccctgagtttgccaagatggtgtgccacggggagcacacgtacctgtttgcccaggccatgatgtccgtgctggcccaggaggagcaggggggctccgctgtgcgcaggatcgcccaggaagtgcagcgctttgcccaggagaaaggtcatgacgccagtcagatcacactagccttgggcacagctgcctcctaccccagggcctgccaggctctcggggccatgctgtccaaaggagccctgaaccctgctgacatcaccgtcctgttcaagatgttcacaagcatggaccctcctccggttgaacttatccgcgttccagccttcctggacctgttcatgcagtcactctttaaaccaggggctcggatcaaccaggaccacaagcacaaatacatccacatcttggcgtacgcagcaagcgtggttgagacctggaagaagaacaagcgagtgagcatcaataaagatgagctgaagtcaacgtcaaaagctgtcgaaaccgttcacaatttgtgttgcaacgagaacaaaggggcctctgaactagtggcagaattgagcacactttatcagtgtattaggtttccagtggtagcaatgggtgtgctgaagtgggtggattggactgtatcagaaccaaggtactttcagctgcagactgaccatacccctgtccacctggcgttgctggatgagatcagcacctgccaccagctcctgcacccccaggtcctgcagctgcttgttaagctttttgagactgagcactcccagctggacgtgatggagcagcttgagttgaagaagacactgctggacaggatggttcacctgctgagtcgaggttatgtacttcctgttgtcagttacatccgaaagtgtctggagaagctggacactgacatttcactcattcgctattttgtcactgaggtgctggacgtcattgctcctccttatacctctgacttcgtgcaacttttcctccccatcctggagaatgacagcatcgcaggtaccatcaaaacggaaggcgagcatgaccctgtgacggagtttatagctcactgcaaatctaacttcatcatggtgaactaatttagagcatcctccagagctgaagcagaacattccagaacccgttgtggaaaaaccctttcaagaagctgttttaagaggctcgggcagcgtcttgaaaatgggcaccgctgggaggaggtggatgacttctttacaaaggaaaatggcaggcgctgggctcccacgacccctcaggacagatctggccgtcagccgcgggccgctgggaactccactcggggaactcctttccaagctgacctcagttttctcacaagaacccagttagctgatgttttattgtaattgtcttaatttgctaagaacaagtaataagtaaatttttaaaaagcctttctgctgggttggattaa

SEQ ID NO: 158223 - DNA, 2305 bp, Homo sapiens
  Payload ID: 10978
  Gene Symbol: NELFCD
  Gene Name: negative elongation factor complex member C/D
  ENST ID: ENST00000602795
  CDS Start-End: 49-1848
gaggcgcgcggccgcgcgtgcgcccgcccgcccgtccccgcctcgcgcatgcgccgcgctcgctcgcgggagggcatggcgggggccgtgccgggcgccatcatggacgaggactactacgggagcgcggccgagtggggcgacgaggctgacggcggccagcaggaggatgattctggagaaggagaggatgatgcggaggttcagcaagaatgcctgcataaattttccacccgggattatatcatggaaccctccatcttcaacactctgaagaggtattttcaggcaggagggtctccagagaatgttatccagctcttatctgaaaactacaccgctgtggcccagactgtgaacctgctggccgagtggctcattcagacaggtgttgagccagtgcaggttcaggaaactgtggaaaatcacttgaagagtttgctgatcaaacattttgacccccgcaaagcagattctatttttactgaagaaggagagaccccagcgtggctggaacagatgattgcacataccacgtggcgggaccttttttataaactggctgaagcccatccagactgtttgatgctgaacttcaccgttaagcttatttctgacgcagggtaccagggggagatcaccagtgtgtccacagcatgccagcagctagaagtgttctcgagagtgctccggacctctctagctacaattttagatggaggagaagaaaaccttgaaaaaaatctccctgagtttgccaagatggtgtgccacggggagcacacgtacctgtttgcccaggccatgatgtccgtgctggcccaggaggagcaggggggctccgctgtgcgcaggatcgcccaggaagtgcagcgctttgcccaggagaaaggtcatgacgccagtcagatcacactagccttgggcacagctgcctcctaccccagggcctgccaggctctcggggccatgctgtccaaaggagccctgaaccctgctgacatcaccgtcctgttcaagatgttcacaagcatggaccctcctccggttgaacttatccgcgttccagccttcctggacctgttcatgcagtcactctttaaaccaggggctcggatcaaccaggaccacaagcacaaatacatccacatcttggcgtacgcagcaagcgtggttgagacctggaagaagaacaagcgagtgagcatcaataaagatgagctgaagtcaacgtcaaaagctgtcgaaaccgttcacaatttgtgttgcaacgagaacaaaggggcctctgaactagtggcagaattgagcacactttatcagtgtattaggtttccagtggtagcaatgggtgtgctgaagtgggtggattggactgtatcagaaccaaggtactttcagctgcagactgaccatacccctgtccacctggcgttgctggatgagatcagcacctgccaccagctcctgcacccccaggtcctgcagctgcttgttaagctttttgagactgagcactcccagctggacgtgatggagcagcttgagttgaagaagacactgctggacaggatggttcacctgctgagtcgaggttatgtacttcctgttgtcagttacatccgaaagtgtctggagaagctggacactgacatttcactcattcgctattttgtcactgaggtgctggacgtcattgctcctccttatacctctgacttcgtgcaacttttcctccccatcctggagaatgacagcatcgcaggtaccatcaaaacggaaggcgagcatgaccctgtgacggagtttatagctcactgcaaatctaacttcatcatggtgaactaatttagagcatcctccagagctgaagcagaacattccagaacccgttgtggaaaaaccctttcaagaagctgttttaagaggctcgggcagcgtcttgaaaatgggcaccgctgggaggaggtggatgacttctttacaaaggaaaatggtagcagcttcagtgagaaactgcccttacaaacagtcccttctctgctgtcaatccaatactgctcccaaatcctgttttcagtgttcatttccctcaaggcaggcgctgggctcccacgacccctcaggacagatctggccgtcagccgcgggccgctgggaactccactcggggaactcctttccaagctgacctcagttttctcacaagaacccagttagctgatgttttattgtaattgtcttaatttgctaagaacaagtaataagtaaatttttaaaaagcctttctgctgggttggattaa

SEQ ID NO: 158224 - DNA, 1405 bp, Homo sapiens
  Payload ID: 10979
  Gene Symbol: NELFE
  Gene Name: negative elongation factor complex member E
  Uniprot ID: P18615
  ENST ID: ENST00000375425
  CDS Start-End: 170-1333
atagccgtttctctgttcttcctctttgcgttgctctgcgggcgctacgctggctccaccgccttctctgccgttcaaaccccgcggttgtccttaccctagcgagggtaggggggtcgggtgccatcgtctttccgacggagtggatatttgtccctccttgaaccacatggtacctaaaggagccaccatgttggtgataccccccggactgagcgaggaagaggaggctctgcagaagaaattcaacaagctcaagaaaaagaaaaaggcattgctggctctgaagaagcaaagtagcagcagcacaaccagccaaggtggtgtcaaacgctcactatcagagcagcctgtcatggacacagccacagcaacagagcaggcaaagcagctggtgaagtcaggagccatcagtgccatcaaggctgagaccaagaactcaggcttcaagcgttctcgaacccttgaggggaagttaaaggaccccgagaagggaccagtccccactttccagccgttccagaggagcatatctgctgatgatgacctgcaagagtcatccagacgtccccagaggaaatctctgtatgagagctttgtgtcttctagtgatcgacttcgagaactaggaccagatggagaagaggcagagggcccaggggctggtgatggtccccctcgaagctttgactggggctatgaagaacgcagtggtgcccactcctcagcctcccctccccgaagccgcagccgggaccgcagccatgagaggaaccgggacagagaccgagatcgggagcgggatcgagaccgggatcgagacagagacagagagcgggacagggatcgggatcgggatcgagatcgagaccgggaacgggacagggatcgggagcgggatcgagaccgagaccgagagggtcctttccgcaggtcggattcattccctgaacggcgagcccctaggaaagggaatactctctatgtatatggagaagacatgacacccacccttctccgtggggccttctctccttttggaaacatcattgacctctccatggacccacccagaaactgtgccttcgtcacctatgaaaagatggagtcagcagatcaggccgttgctgagctcaacgggacccaggtggagtctgtacagctcaaagtcaacatagcccgaaaacagcccatgctggatgccgctactggcaagtctgtctggggctccctcgctgtccagaacagccctaagggttgccaccgggacaagaggacccagattgtctacagtgatgacgtctacaaggaaaaccttgtggatggcttctagggaacagagctggattccttgtgcctcatatgccccaatgctggtctcagtaaaacactgaggtggaagctt

SEQ ID NO: 158225 - DNA, 1584 bp, Homo sapiens
  Payload ID: 10979
  Gene Symbol: NELFE
  Gene Name: negative elongation factor complex member E
  Uniprot ID: P18615
  ENST ID: ENST00000375429
  CDS Start-End: 228-1370
aagtagaggcaacttccggtacagccccgccgagagcgtgaactatcgctgcggaggggcagacctggaccggtggaaggccgggcggaagtgcgcgcctggggccgccttggttaccgcgttttccgctcctcgctacgtcatcgttgtgagcccgctatcagcggccagcgcgggcgcggccggagaccgtggggcccccggttgccgccccctcgggagccaccatgttggtgataccccccggactgagcgaggaagaggaggctctgcagaagaaattcaacaagctcaagaaaaagaaaaaggcattgctggctctgaagaagcaaagtagcagcagcacaaccagccaaggtggtgtcaaacgctcactatcagagcagcctgtcatggacacagccacagcaacagagcaggcaaagcagctggtgaagtcaggagccatcagtgccatcaaggctgagaccaagaactcaggcttcaagcgttctcgaacccttgaggggaagttaaaggaccccgagaagggaccagtccccactttccagccgttccagaggagcatatctgctgatgatgacctgcaagagtcatccagacgtccccagaggaaatctctgtatgagagctttgtgtcttctagtgatcgacttcgagaactaggaccagatggagaagaggcagagggcccaggggctggtgatggtccccctcgaagctttgactggggctatgaagaacgcagtggtgcccactcctcagcctcccctccccgaagccgcagccgggaccgcagccatgagaggaaccgggacagagaccgagatcgggagcgggatcgagaccgggatcgagacagagacagagagcgggacagggatcgggatcgggatcgagatcgagaccgggaacgggacagggatcgggagcgggatcgagaccgagaccgagagggtcctttccgcaggtcggattcattccctgaacggcgagcccctaggaaagggaatactctctatgtatatggagaagacatgacacccacccttctccgtggggccttctctccttttggaaacatcattgacctctccatggacccacccagaaactgtgccttcgtcacctatgaaaagatggagtcagcagatcaggccgttgctgagctcaacgggacccaggtggagtctgtacagctcaaagtcaacatagcccgaaaacagcccatgctggatgccgctactggcaagtctgtctggggctccctcgctgtccagaacagccctaagggttgccaccgggacaagaggacccagattgtctacagtgatgacgtctacaaggaaaaccttgtggatggcttctagggaacagagctggattccttgtgcctcatatgccccaatgctggtctcagtaaaacactgaggtggaagcttacacatctccctcagcctctggtttttcagcacttgggattggggttaaacctttaaaaacggctgtcaggtttgatctcagtgtaacaacatggccagtgcctgttccccactcccttgccccaaaaggatctggaacaca

SEQ ID NO: 158226 - DNA, 1566 bp, Homo sapiens
  Payload ID: 10979
  Gene Symbol: NELFE
  Gene Name: negative elongation factor complex member E
  Uniprot ID: P18615
  ENST ID: ENST00000383174
  CDS Start-End: 210-1352
gtacagccccgccgagagcgtgaactatcgctgcggaggggcagacctggaccggtggaaggccgggcggaagtgcgcgcctggggccgccttggttaccgcgttttccgctcctcgctacgtcatcgttgtgagcccgctatcagcggccagcgcgggcgcggccggagaccgtggggcccccggttgccgccccctcgggagccaccatgttggtgataccccccggactgagcgaggaagaggaggctctgcagaagaaattcaacaagctcaagaaaaagaaaaaggcattgctggctctgaagaagcaaagtagcagcagcacaaccagccaaggtggtgtcaaacgctcactatcagagcagcctgtcatggacacagccacagcaacagagcaggcaaagcagctggtgaagtcaggagccatcagtgccatcaaggctgagaccaagaactcaggcttcaagcgttctcgaacccttgaggggaagttaaaggaccccgagaagggaccagtccccactttccagccgttccagaggagcatatctgctgatgatgacctgcaagagtcatccagacgtccccagaggaaatctctgtatgagagctttgtgtcttctagtgatcgacttcgagaactaggaccagatggagaagaggcagagggcccaggggctggtgatggtccccctcgaagctttgactggggctatgaagaacgcagtggtgcccactcctcagcctcccctccccgaagccgcagccgggaccgcagccatgagaggaaccgggacagagaccgagatcgggagcgggatcgagaccgggatcgagacagagacagagagcgggacagggatcgggatcgggatcgagatcgagaccgggaacgggacagggatcgggagcgggatcgagaccgagaccgagagggtcctttccgcaggtcggattcattccctgaacggcgagcccctaggaaagggaatactctctatgtatatggagaagacatgacacccacccttctccgtggggccttctctccttttggaaacatcattgacctctccatggacccacccagaaactgtgccttcgtcacctatgaaaagatggagtcagcagatcaggccgttgctgagctcaacgggacccaggtggagtctgtacagctcaaagtcaacatagcccgaaaacagcccatgctggatgccgctactggcaagtctgtctggggctccctcgctgtccagaacagccctaagggttgccaccgggacaagaggacccagattgtctacagtgatgacgtctacaaggaaaaccttgtggatggcttctagggaacagagctggattccttgtgcctcatatgccccaatgctggtctcagtaaaacactgaggtggaagcttacacatctccctcagcctctggtttttcagcacttgggattggggttaaacctttaaaaacggctgtcaggtttgatctcagtgtaacaacatggccagtgcctgttccccactcccttgccccaaaaggatctggaacaca

SEQ ID NO: 158227 - DNA, 1566 bp, Homo sapiens; identical to SEQ ID NO: 158226
  Payload ID: 10979
  Gene Symbol: NELFE
  Gene Name: negative elongation factor complex member E
  Uniprot ID: P18615
  ENST ID: ENST00000383343
  CDS Start-End: 210-1352

SEQ ID NO: 158228 - DNA, 1202 bp, Homo sapiens
  Payload ID: 10979
  Gene Symbol: NELFE
  Gene Name: negative elongation factor complex member E
  Uniprot ID: P18615
  ENST ID: ENST00000444811
  CDS Start-End: 78-1130
gagcccgctatcagcggccagcgcgggcgcggccggagaccgtggggcccccggttgccgccccctcgggagccaccatgttggtgataccccccggactgagcgaggaagaggaggctctgcagaagaaattcaacaagctcaagaaaaagaaaaaggcattgctggctctgaagaagcaaagtagcagcagcacaaccagccaaggtggtgtcaaacgctcactatcagagcagcctgtcatggacacagccacagcaacagagcaggcaaagcagctggtgaagtcaggagccatcagtgccatcaaggctgagaccaagaactcaggcttcaagcgttctcgaacccttgaggggaagttaaaggaccccgagaagggaccagtccccactttccagccgttccagaggagcatatctgctgatgatgacctgcaagagtcatccagacgtccccagaggaaatctctgtatgagagctttgactggggctatgaagaacgcagtggtgcccactcctcagcctcccctccccgaagccgcagccgggaccgcagccatgagaggaaccgggacagagaccgagatcgggagcgggatcgagaccgggatcgagacagagacagagagcgggacagggatcgggatcgggatcgagatcgagaccgggaacgggacagggatcgggagcgggatcgagaccgagaccgagagggtcctttccgcaggtcggattcattccctgaacggcgagcccctaggaaagggaatactctctatgtatatggagaagacatgacacccacccttctccgtggggccttctctccttttggaaacatcattgacctctccatggacccacccagaaactgtgccttcgtcacctatgaaaagatggagtcagcagatcaggccgttgctgagctcaacgggacccaggtggagtctgtacagctcaaagtcaacatagcccgaaaacagcccatgctggatgccgctactggcaagtctgtctggggctccctcgctgtccagaacagccctaagggttgccaccgggacaagaggacccagattgtctacagtgatgacgtctacaaggaaaaccttgtggatggcttctagggaacagagctggattccttgtgcctcatatgccccaatgctggtctcagtaaaacactgaggtggaagctt

SEQ ID NO: 158229 - DNA, 765 bp, Homo sapiens
  Payload ID: 10979
  Gene Symbol: NELFE
  Gene Name: negative elongation factor complex member E
  ENST ID: ENST00000425721
  CDS Start-End: 289-765
ttttctcatagccgtttctctgttcttcctctttgcgttgctctgcgggcgctacgctggctccaccgccttctctgccgttcaaaccccgcggttgtccttaccctagcgagggtaggggggtcgggtgccatcgtctttccgacggagtggatatttgtccctccttgaaccacatggtacctaaaggtgctggtgtctgtgatccctggagacaggagggaatgctggatgatcccgaccagcgggagcttggacagcagcctggtttaagcaaggggagccaccatgttggtgataccccccggactgagcgaggaagaggaggctctgcagaagaaattcaacaagctcaagaaaaagaaaaaggcattgctggctctgaagaagcaaagtagcagcagcacaaccagccaaggtggtgtcaaacgctcactatcagagcagcctgtcatggacacagccacagcaacagagcaggcaaagcagctggtgaagtcaggagccatcagtgccatcaaggctgagaccaagaactcaggcttcaagcgttctcgaacccttgaggggaagttaaaggaccccgagaagggaccagtccccactttccagccgttccagaggagcatatctgctgatgatgacctgcaagagtcatccagacgtccccagaggaaatctctgtatgagagctttgtgtcttctagtgatcgacttcgagaactaggaccagatggagaagaggcagagggcccaggggctggt

SEQ ID NO: 158230 - DNA, 1566 bp, Homo sapiens; identical to SEQ ID NO: 158226
  Payload ID: 10979
  Gene Symbol: NELFE
  Gene Name: negative elongation factor complex member E
  Uniprot ID: P18615
  ENST ID: ENST00000457397
  CDS Start-End: 210-1352

SEQ ID NO: 158231 - DNA, 1075 bp, Homo sapiens
  Payload ID: 10979
  Gene Symbol: NELFE
  Gene Name: negative elongation factor complex member E
  ENST ID: ENST00000443464
  CDS Start-End: 75-1075
cccgctatcagcggccagcgcgggcgcggccggagaccgtggggcccccggttgccgccccctcgggagccaccatgttggtgataccccccggactgagcgaggaagaggaggctctgcagaagaaattcaacaagctcaagaaaaagaaaaaggcattgctggctctgaagaagcaaagtagcagcagcacaaccagccaaggtggtgtcaaacgctcactatcagagcagcctgtcatggacacagccacagcaacagagcaggcaaagcagctggtgaagtcaggagccatcagtgccatcaaggctgagaccaagaactcaggcttcaagcgttctcgaacccttgaggggaagttaaaggaccccgagaagggaccagtccccactttccagccgttccagaggagcatatctgctgatgatgacctgcaagagtcatccagacgtccccagaggaaatctctgtatgagagtgatcgacttcgagaactaggaccagatggagaagaggcagagggcccaggggctggtgatggtccccctcgaagctttgactggggctatgaagaacgcagtggtgcccactcctcagcctcccctccccgaagccgcagccgggaccgcagccatgagaggaaccgggacagagaccgagatcgggagcgggatcgagaccgggatcgagacagagacagagagcgggacagggatcgggatcgggatcgagatcgagaccgggaacgggacagggatcgggagcgggatcgagaccgagaccgagagggtcctttccgcaggtcggattcattccctgaacggcgagcccctaggaaagggaatactctctatgtatatggagaagacatgacacccacccttctccgtggggccttctctccttttggaaacatcattgacctctccatggacccacccagaaactgtgccttcgtcacctatgaaaagatggagtcagcagatcaggccgttgctgagctcaacgggacccaggtggagtctgtacagctcaaagtcaacatagcccgaaaacagcccatgctggatgccgc

SEQ ID NO: 158232 - DNA, 847 bp, Homo sapiens
  Payload ID: 10979
  Gene Symbol: NELFE
  Gene Name: negative elongation factor complex member E
  ENST ID: ENST00000449057
  CDS Start-End: 126-847
agccaaagacaagagtaggcagacctgaaggggtggggttgggtacagtgtggacggcgtgtgaaccccgggtggtaacagtggagaaagatgtcttgggccctgcccctgaactaggagccaccatgttggtgataccccccggactgagcgaggaagaggaggctctgcagaagaaattcaacaagctcaagaaaaagaaaaaggcattgctggctctgaagaagcaaagtagcagcagcacaaccagccaaggtggtgtcaaacgctcactatcagagcagcctgtcatggacacagccacagcaacagagcaggcaaagcagctggtgaagtcaggagccatcagtgccatcaaggctgagaccaagaactcaggcttcaagcgttctcgaacccttgaggggaagttaaaggaccccgagaagggaccagtccccactttccagccgttccagaggagcatatctgctgatgatgacctgcaagagtcatccagacgtccccagaggaaatctctgtatgagagtgatcgacttcgagaactaggaccagatggagaagaggcagagggcccaggggctggtgatggtccccctcgaagctttgactggggctatgaagaacgcagtggtgcccactcctcagcctcccctccccgaagccgcagccgggaccgcagccatgagaggaaccgggacagagaccgagatcgggagcgggatcgagaccgggatcgagacagagacagagagcgggacagggatcgggatcgggatcgagatcgagaccgggaacgggacagggatcgggagcgggatcgagaccgagaccgagagggtccttt

SEQ ID NO: 158233 - DNA, 914 bp, Homo sapiens
  Payload ID: 10979
  Gene Symbol: NELFE
  Gene Name: negative elongation factor complex member E
  ENST ID: ENST00000453084
  CDS Start-End: 34-914
gtcttgggccctgcccctgaactaggagccaccatgttggtgataccccccggactgagcgaggaagaggaggctctgcagaagaaattcaacaagctcaagaaaaagaaaaaggcattgctggctctgaagaagcaaagtagcagcagcacaaccagccaaggtggtgtcaaacgctcactatcagagcagcctgtcatggacacagccacagcaacagagcaggcaaagcagctggtgaagtcaggagccatcagtgccatcaaggctgagaccaagaactcaggcttcaagcgttctcgaacccttgaggggaagttaaaggaccccgagaagggaccagtccccactttccagccgttccagaggagcatatctgctgatgatgacctgcaagagtcatccagacgtccccagaggaaatctctgtatgagagctttgtgtcttctagtgatcgacttcgagaactaggaccagatggagaagaggcagagggcccaggggctggtgatggtccccctcgaagctttgactggggctatgaagaacgcagtggtgcccactcctcagcctcccctccccgaagccgcagccgggaccgcagccatgagaggaaccgggacagagaccgagatcgggagcgggatcgagaccgggatcgagacagagacagagagcgggacagggatcgggatcgggatcgagatcgagaccgggaacgggacagggatcgggagcgggatcgagaccgagaccgagagggtcctttccgcaggtcggattcattccctgaacggcgagcccctaggaaagggaatactctctatgtatatggagaagacatgacacccacccttctccgtggggccttctctccttttggaaacatcattgacctctccatggacccacc

SEQ ID NO: 158234 - DNA, 765 bp, Homo sapiens; identical to SEQ ID NO: 158229
  Payload ID: 10979
  Gene Symbol: NELFE
  Gene Name: negative elongation factor complex member E
  ENST ID: ENST00000426722
  CDS Start-End: 289-765

SEQ ID NO: 158235 - DNA, 1566 bp, Homo sapiens; identical to SEQ ID NO: 158226
  Payload ID: 10979
  Gene Symbol: NELFE
  Gene Name: negative elongation factor complex member E
  Uniprot ID: P18615
  ENST ID: ENST00000448628
  CDS Start-End: 210-1352

SEQ ID NO: 158236 - DNA, 847 bp, Homo sapiens; identical to SEQ ID NO: 158232
  Payload ID: 10979
  Gene Symbol: NELFE
  Gene Name: negative elongation factor complex member E
  ENST ID: ENST00000418423
  CDS Start-End: 126-847

SEQ ID NO: 158237 - DNA, 847 bp, Homo sapiens; identical to SEQ ID NO: 158232
  Payload ID: 10979
  Gene Symbol: NELFE
  Gene Name: negative elongation factor complex member E
  ENST ID: ENST00000435435
  CDS Start-End: 126-847

SEQ ID NO: 158238 - DNA, 847 bp, Homo sapiens; identical to SEQ ID NO: 158232
  Payload ID: 10979
  Gene Symbol: NELFE
  Gene Name: negative elongation factor complex member E
  ENST ID: ENST00000456281
  CDS Start-End: 126-847

SEQ ID NO: 158239 - DNA, 914 bp, Homo sapiens; identical to SEQ ID NO: 158233
  Payload ID: 10979
  Gene Symbol: NELFE
  Gene Name: negative elongation factor complex member E
  ENST ID: ENST00000437732
  CDS Start-End: 34-914

SEQ ID NO: 158240 - DNA, 1075 bp, Homo sapiens; identical to SEQ ID NO: 158231
  Payload ID: 10979
  Gene Symbol: NELFE
  Gene Name: negative elongation factor complex member E
  ENST ID: ENST00000441998
  CDS Start-End: 75-1075

SEQ ID NO: 158241 - DNA, 765 bp, Homo sapiens; identical to SEQ ID NO: 158229
  Payload ID: 10979
  Gene Symbol: NELFE
  Gene Name: negative elongation factor complex member E
  ENST ID: ENST00000418059
  CDS Start-End: 289-765

SEQ ID NO: 158242 - DNA, 1075 bp, Homo sapiens; identical to SEQ ID NO: 158231
  Payload ID: 10979
  Gene Symbol: NELFE
  Gene Name: negative elongation factor complex member E
  ENST ID: ENST00000452147
  CDS Start-End: 75-1075

SEQ ID NO: 158243 - DNA, 1566 bp, Homo sapiens; identical to SEQ ID NO: 158226
  Payload ID: 10979
  Gene Symbol: NELFE
  Gene Name: negative elongation factor complex member E
  Uniprot ID: P18615
  ENST ID: ENST00000429857
  CDS Start-End: 210-1352

SEQ ID NO: 158244 - DNA, 1075 bp, Homo sapiens; identical to SEQ ID NO: 158231
  Payload ID: 10979
  Gene Symbol: NELFE
  Gene Name: negative elongation factor complex member E
  ENST ID: ENST00000425810
  CDS Start-End: 75-1075

SEQ ID NO: 158245 - DNA, 1075 bp, Homo sapiens; identical to SEQ ID NO: 158231
  Payload ID: 10979
  Gene Symbol: NELFE
  Gene Name: negative elongation factor complex member E
  ENST ID: ENST00000440478
  CDS Start-End: 75-1075

SEQ ID NO: 158246 - DNA, 914 bp, Homo sapiens; identical to SEQ ID NO: 158233
  Payload ID: 10979
  Gene Symbol: NELFE
  Gene Name: negative elongation factor complex member E
  ENST ID: ENST00000456263
  CDS Start-End: 34-914

SEQ ID NO: 158247 - DNA, 765 bp, Homo sapiens; identical to SEQ ID NO: 158229
  Payload ID: 10979
  Gene Symbol: NELFE
  Gene Name: negative elongation factor complex member E
  ENST ID: ENST00000458622
  CDS Start-End: 289-765

SEQ ID NO: 158248 - DNA, 914 bp, Homo sapiens; identical to SEQ ID NO: 158233
  Payload ID: 10979
  Gene Symbol: NELFE
  Gene Name: negative elongation factor complex member E
  ENST ID: ENST00000434518
  CDS Start-End: 34-914

SEQ ID NO: 158249 - DNA, 914 bp, Homo sapiens; identical to SEQ ID NO: 158233
  Payload ID: 10979
  Gene Symbol: NELFE
  Gene Name: negative elongation factor complex member E
  ENST ID: ENST00000454913
  CDS Start-End: 34-914

SEQ ID NO: 158250 - DNA, 914 bp, Homo sapiens; identical to SEQ ID NO: 158233
  Payload ID: 10979
  Gene Symbol: NELFE
  Gene Name: negative elongation factor complex member E
  ENST ID: ENST00000411745
  CDS Start-End: 34-914

SEQ ID NO: 158251 - DNA, 765 bp, Homo sapiens; identical to SEQ ID NO: 158229
  Payload ID: 10979
  Gene Symbol: NELFE
  Gene Name: negative elongation factor complex member E
  ENST ID: ENST00000420039
  CDS Start-End: 289-765

SEQ ID NO: 158252 - DNA, 847 bp, Homo sapiens; identical to SEQ ID NO: 158232
  Payload ID: 10979
  Gene Symbol: NELFE
  Gene Name: negative elongation factor complex member E
  ENST ID: ENST00000424967
  CDS Start-End: 126-847

SEQ ID NO: 158253 - DNA, 765 bp, Homo sapiens; identical to SEQ ID NO: 158229
  Payload ID: 10979
  Gene Symbol: NELFE
  Gene Name: negative elongation factor complex member E
  ENST ID: ENST00000420837
  CDS Start-End: 289-765

SEQ ID NO: 158254 - DNA, 906 bp, Homo sapiens
  Payload ID: 10979
  Gene Symbol: NELFE
  Gene Name: negative elongation factor complex member E
  ENST ID: ENST00000436289
  CDS Start-End: 126-906
agccaaagacaagagtaggcagacctgaaggggtggggttgggtacagtgtggacggcgtgtgaaccccgggtggtaacagtggagaaagatgtcttgggccctgcccctgaactaggagccaccatgttggtgataccccccggactgagcgaggaagaggaggctctgcagaagaaattcaacaagctcaagaaaaagaaaaaggcattgctggctctgaagaagcaaagtagcagcagcacaaccagccaaggtggtgtcaaacgctcactatcagagcagcctgtcatggacacagccacagcaacagagcaggcaaagcagctggtgaagtcaggagccatcagtgccatcaaggctgagaccaagaactcaggcttcaagcgttctcgaacccttgaggggaagttaaaggaccccgagaagggaccagtccccactttccagccgttccagaggagcatatctgctgatgatgacctgcaagagtcatccagacgtccccagaggaaatctctgtatgagagtgatcgacttcgagaactaggaccagatggagaagaggcagagggcccaggggctggtgatggtccccctcgaagctttgactggggctatgaagaacgcagtggtgcccactcctcagcctcccctccccgaagccgcagccgggaccgcagccatgagaggaaccgggacagagaccgagatcgggagcgggatcgagaccgggatcgagacagagacagagagcgggacagggatcgggatcgggatcgagatcgagaccgggaacgggacagggatcgggagcgggatcgagaccgagaccgagagggtcctttccgcaggtcggattcattccctgaacggcgagcccctaggaaagggaatactctctatg

SEQ ID NO: 158255 - DNA, 1075 bp, Homo sapiens; identical to SEQ ID NO: 158231
  Payload ID: 10979
  Gene Symbol: NELFE
  Gene Name: negative elongation factor complex member E
  ENST ID: ENST00000424762
  CDS Start-End: 75-1075

SEQ ID NO: 158256 - DNA, 583 bp, Homo sapiens
  Payload ID: 10979
  Gene Symbol: NELFE
  Gene Name: negative elongation factor complex member E
  ENST ID: ENST00000492539
  CDS Start-End: 86-259
atcgttgtgagcccgctatcagcggccagcgcgggcgcggccggagaccgtggggcccccggttgccgccccctcgggagccaccatgttggtgataccccccggactgagcgaggaagaggaggctctgcagaagaaattcaacaagctcaagaaaaaggtgagggactgtgtgtggacatggcctaacctttcacagactctgcactctgagaagatatgggaaaaaggcattgctggctctgaagaagcaaagtagcagcagcacaaccagccaaggtggtgtcaaacgctcactatcagagcagcctgtcatggacacagccacagcaacagagcaggcaaagcagctggtgaagtcaggagccatcagtgccatcaaggctgagaccaagaactcaggcttcaagcgttctcgaacccttgaggggaagttaaaggaccccgagaagggaccagtccccactttccagccgttccagaggagcatatctgctgatgatgacctgcaagagtcatccagacgtccccagaggaaatctctgtatgagagctttgactggggctatgaagaacgcagtgg

SEQ ID NO: 158257 - DNA, 568 bp, Homo sapiens
  Payload ID: 10979
  Gene Symbol: NELFE
  Gene Name: negative elongation factor complex member E
  ENST ID: ENST00000494956
  CDS Start-End: 72-182
gctatcagcggccagcgcgggcgcggccggagaccgtggggcccccggttgccgccccctcgggagccaccatgttggtgataccccccggactgagcgaggaagaggaggctctgcagaagaaattcaacaagctcaagaaaaagactgtaagcttcttgagggtaggaacaatgcattagcctcctggatatccctgttacgaagtcatggctgggcctcattcaatatgcaggaaatagatggatgaagcttccaggaaagaaaaaggcattgctggctctgaagaagcaaagtagcagcagcacaaccagccaaggtggtgtcaaacgctcactatcagagcagcctgtcatggacacagccacagcaacagagcaggcaaagcagctggtgaagtcaggagccatcagtgccatcaaggctgagaccaagaactcaggcttcaagcgttctcgaacccttgaggggaagttaaaggaccccgagaagggaccagtccccactttccagccgttccagaggagcatatctgctgatgatgacctgcaagagtcatccagacgtc

SEQ ID NO: 158258 - DNA, 111 bp, Homo sapiens
  Payload ID: 10979
  Gene Symbol: NELFE
  Gene Name: negative elongation factor complex member E
  ENST ID: ENST00000625545
  CDS Start-End: 1-111
atgttggtgataccccccggactgagcgaggaagaggaggctctgcagaagaaattcaacaagctcaagaaaaagactgtaagcttcttgagggtaggaacaatgcattag

SEQ ID NO: 158259 - DNA, 111 bp, Homo sapiens; identical to SEQ ID NO: 158258
  Payload ID: 10979
  Gene Symbol: NELFE
  Gene Name: negative elongation factor complex member E
  ENST ID: ENST00000628497
  CDS Start-End: 1-111

SEQ ID NO: 158260 - DNA, 111 bp, Homo sapiens; identical to SEQ ID NO: 158258
  Payload ID: 10979
  Gene Symbol: NELFE
  Gene Name: negative elongation factor complex member E
  ENST ID: ENST00000629797
  CDS Start-End: 1-111

SEQ ID NO: 158261 - DNA, 111 bp, Homo sapiens; identical to SEQ ID NO: 158258
  Payload ID: 10979
  Gene Symbol: NELFE
  Gene Name: negative elongation factor complex member E
  ENST ID: ENST00000625905
  CDS Start-End: 1-111

SEQ ID NO: 158262 - DNA, 111 bp, Homo sapiens; identical to SEQ ID NO: 158258
  Payload ID: 10979
  Gene Symbol: NELFE
  Gene Name: negative elongation factor complex member E
  ENST ID: ENST00000625436
  CDS Start-End: 1-111

SEQ ID NO: 158263 - DNA, 111 bp, Homo sapiens; identical to SEQ ID NO: 158258
  Payload ID: 10979
  Gene Symbol: NELFE
  Gene Name: negative elongation factor complex member E
  ENST ID: ENST00000625993
  CDS Start-End: 1-111

SEQ ID NO: 158264 - DNA, 2564 bp, Homo sapiens
  Payload ID: 10980
  Gene Symbol: NRROS
  Gene Name: negative regulator of reactive oxygen species
  Uniprot ID: Q86YC3
  ENST ID: ENST00000328557
  CDS Start-End: 204-2282
cctgtgctgagtcgccgagcagcccgctctccatgtgacttcagtttccgtccgttccttccgctggtgctaaaataatctgatgccccacagcaaggaggtagcccagccccgcgttcggctgctctcgaggaggccggagcccccggagacgatgcgccccgcgcagccgcctgcgcctgcgggagccggctgcccttgagatggagttgctgcctctttggctctgcctgggttttcacttcctgaccgtgggctggaggaacagaagcggaacagccacagcagcctcccaaggagtctgcaagttggtgggtggagccgctgactgccgagggcagagcctcgcttcggtgcccagcagcctcccgccccacgcccggatgctcaccctggatgccaaccctctcaagaccctgtggaatcactccctccagccttaccctctcctggagagcctcagcctgcacagctgccacctggagcgcatcagccgcggcgccttccaggagcaaggtcacctgcgcagcctggtcctgggggacaactgcctctcagagaactacgaagagacggcagccgccctccacgccctgccgggcctgcggaggctggacttgtcaggaaacgccctgacggaggacatggcagccctcatgctccagaacctctcctcgctgcggtccgtgtccctggcggggaacaccatcatgcggctggacgactccgtcttcgagggcctggagcgtctccgggagctggatctgcagaggaactacatcttcgagatcgagggcggcgctttcgacggcctggctgagctgaggcacctcaacctggccttcaacaacctcccctgcatcgtggacttcgggctcacgcggctgcgggtcctcaacgtcagctacaacgtcctggagtggttcctcgcgaccgggggagaggctgccttcgagctggagacgctggacctgtctcacaaccagctgctgttcttcccgctgctgccccagtacagcaagttgcggaccctcctgctgcgcgacaacaacatgggcttctaccgggacctgtacaacacctcgtcgccgagggagatggtggcccagttcctcctcgtggacggcaacgtgaccaacatcaccaccgtcagcctctgggaagaattctcctccagcgacctcgcagatctccgcttcctggacatgagccagaaccagttccagtacctgccagacggcttcctgaggaaaatgccttccctctcccacctgaacctccaccagaattgcctgatgacgcttcacattcgggagcacgagccccccggagcgctcaccgagctggacctgagccacaaccagctgtcggagctgcacctggctccggggctggccagctgcctgggcagcctgcgcttgttcaacctgagctccaaccagctcctgggcgtcccccctggcctcttcgccaatgctaggaacatcactacacttgacatgagccacaatcagatctcactttgtcccctgccagctgcctcggaccgggtgggcccccctagctgtgtggatttcaggaatatggcatctttaaggagcctgtctctggagggctgtggcctgggggcattgccagactgcccattccaagggacctccctgacctacttagacctctcaagcaactggggggttctgaatgggagcctcgccccactccaggatgttgcccccatgttacaggtcctgtctctcaggaacatgggcctccactccagctttatggcgttggacttctctgggtttgggaatctcagggacttagatctgtcggggaattgcttgaccaccttcccaaggtttgggggcagcctggccctggagaccctggatctccgtagaaactcgctcacagcccttccccagaaggctgtgtctgagcagctctcgagaggtctgcggaccatctacctcagtcagaatccatatgactgctgtggggtggatggctggggggccctgcagcatgggcagacggtggccgactgggccatggtcacctgcaacctctcctccaagatcatccgcgtgacggagctgcccggaggtgtgcctcgggactgcaagtgggagcggctggacctgggcctgctctacctcgtgctcatcctccccagctgcctcaccctgctggtggcctgcactgtcatcgtcctcacttttaagaagcctctgcttcaggtcatcaagagccgctgccactggtcctccgtttactgacctggctgtgtgccaagactcgaaattcggtccgcacacaacaggacactttctctgccagctttcaagatgtgatgcagaggccaagtctgacgaattgaagtttcaattaaaatttaatatgtttccattcctcatcgcccaccccacccccgcccccaccaccgcccaagttctttttccatcattataattcatcctcattatcttggtaaaatatttattaagtgactttttcagaaataaaaggcaacgtgtctcataaatattttttaaattaaa

SEQ ID NO: 158265 - DNA, 3180 bp, Homo sapiens
  Payload ID: 10981
  Gene Symbol: NUB1
  Gene Name: negative regulator of ubiquitin-like proteins 1
  ENST ID: ENST00000413040
  CDS Start-End: 79-1956
accctctttccaagcggcggcggcggcggcggcgcgaaggcgacagcggcggcgggggcggggctggcctcacccggaatgaaaacaaacggcggccgctgccgcatccgggcactctgctggtcgcggcgggagtggcgtggcgcagggatggcacaaaagaaatatcttcaagcaaaattgacccagtttttaagggaagacaggattcaactttggaaacctccatatacagatgaaaataaaaaagttggtttggcattaaaggaccttgctaagcagtactctgacagactagaatgctgtgaaaatgaagtagaaaaggtaatagaagaaatacgttgcaaggcaattgagcgtggaacaggaaatgacaattatagaacaacgggaattgctacaatcgaggtgtttttaccaccaagactaaaaaaagataggaaaaacttgttggagacccgattgcacatcactggcagagaactgaggtccaaaatagctgaaacctttggacttcaagaaaattatatcaaaattgtcataaataagaagcaactacaactagggaaaacccttgaagaacaaggcgtggctcacaatgtgaaagcgatggtgcttgaactaaaacaatctgaagaggacgcgaggaaaaacttccagttagaggaagaggagcaaaatgaggccaaactcaaagaaaaacaaattcagaggaccaagagaggactagaaatactggcaaagagagcagcagagacagtggtggatccagaaatgacaccgtacttagacatagctaaccagacaggcagatcaatcagaattcccccatcagaaagaaaagcccttatgttagctatgggatatcatgagaagggcagagctttcctgaaaagaaaagaatatggaatagccttgccatgtctgttggacgctgacaaatatttctgtgagtgttgcagagagctgctggacacagtggataactacgccgtcctccagctggatatagtgtggtgttacttccgcctggaacagctggaatgccttgatgatgcagaaaaaaaattaaacttggcccagaaatgctttaaaaattgttacggagaaaatcatcagagactggtccacataaaaggaaattgtgggaaagagaaggtactgtttctaagactctacttacttcaagggatccgaaactatcacagtggaaatgatgtagaggcttatgagtatcttaacaaggcacgtcagctctttaaagagctatatattgatccatcaaaagtggacaatttgttgcagttggggtttactgcccaggaagcccggcttggcctgagggcgtgtgatgggaacgtggatcatgcggccactcatattaccaaccgcagagaggaactggcccaaataaggaaggaggaaaaagagaagaaaagacgccgcctcgagaacatcaggtttctgaaagggatgggctactccacgcacgcggcccagcagattctgctcagcaatcctcagatgtggtggttaaatgattccaatcctgaaaccgacaaccgtcaagaaagtccttcccaggaaaacattgaccgattggtgtacatgggttttgatgcactcgtggccgaagctgcgctgagagtgttcagaggcaacgtccagctggccgcccagacccttgctcacaacggaggaagcctgcctcccgagctgccgctgtcgccagaagactctttgtccccgccagccacgtccccttctgactccgcaggaacctctagtgcctcaacagacgaagacatggagacagaggccgtcaatgagatactggaagacattccagagcatgaggaagactatcttgactcaactctggaagatgaagaaattattattgcagagtacctatcctatgtagaaaataggaagtcagcaacaaagaaaaactaaataatgaacagaaatagcgctaattttctgcttataaatgctatcattatgaaaaggctaatgcagctctttctgttcttactttttatctgaattacaagtcctctttgggtgtaggagggggtgggcaggggacaagtccaggaggggtcccagggccttcatgcgtggtctcggggaagaagcttcctctggcctggcgcaggccgttccatctgcctcccaggtctgcgtccctaaccccttccccagcttggtgttttaccccgaaacaggaaggaacaggggtcctgtagaacaggggtcctggggaaggtgtccagggcagggtcctgggaagggtgtcccgaccgcttcctctccagctgtggctccatctgcccagcttgcctgcctcctgcacccactgccctgaccttcctgcttcccacgctgccatctctgccagggtgccacatgggttcctgtgccaccctttccccgcccctcaaatcgtcctttaagtcttccttccaagtgctgtggggcataacgatgaggcgctggccttgggggccacaccaggtcgcagcaaatggcttcagcctgggacgccagtgttttatgctcttagttcagtaaaatacgcccccgaaattcaagattgagtgtcaggctttatatatattcagcattcctcattacagaaatcttctattgaatgggaaaggtttaaatgctaaccaaagcaatttatttttaattaatatttttagactctgtgctgtcatactgaactcactgctagctaagagacctatcagagatttagatatattttctccaggttttttgtgggttttctttgttgttgttgttgttctagccatgtgacagaggctctttctaaaagtatgtagttcgctgtgtgtcggctccagcagtaaccgtcctcactgcgccacgcactcctctgtagatgtgtgcccagtgggagttccttccagccccaggaccacagcagcagccaggtgccgagtggattgagtgccaggtgcatccaagactttccctcccttccagaaggcactgactgaagacaggatggatcatgcggagccggctgaaatgctccaactttttcaaagtgtgggtggtccagtttggactgatgggaatcttcttgtcattctttttaaacggatgataccgatggaaataaaaggtgggaaatatattcaaaaa

SEQ ID NO: 158266 - DNA, 619 bp, Homo sapiens
  Payload ID: 10981
  Gene Symbol: NUB1
  Gene Name: negative regulator of ubiquitin-like proteins 1
  ENST ID: ENST00000470229
  CDS Start-End: 157-619
actctgctggtcgcggcgggagtggcgtggcgcaggtgaggacacggcggccgagtgtcctcgaccccagcctcagcagcactgcttggcgccccggttcccggtccgactgggcacctctcctggccaggggtggagcggccgcggggcggggggatggcacaaaagaaatatcttcaagcaaaattgacccagtttttaagggaagacaggattcaactttggaaacctccatatacagatgaaaataaaaaagttggtttggcattaaaggaccttgctaagcagtactctgacagactagaatgctgtgaaaatgaagtagaaaaggtaatagaagaaatacgttgcaaggcaattgagcgtggaacaggaaatgacaattatagaacaacgggaattgctacaatcgaggtgtttttaccaccaagactaaaaaaagataggaaaaacttgttggagacccgattgcacatcactggcagagaactgaggtccaaaatagctgaaacctttggacttcaagaaaattatatcaaaattgtcataaataagaagcaactacaactagggaaaacccttgaagaacaaggcgtggctcacaatgtgaaagcgatgg

SEQ ID NO: 158267 - DNA, 586 bp, Homo sapiens
  Payload ID: 10981
  Gene Symbol: NUB1
  Gene Name: negative regulator of ubiquitin-like proteins 1
  ENST ID: ENST00000480714
  CDS Start-End: 1-385
gagggcgtgtgatgggaacgtggatcatgcggccactcatattaccaaccgcagagaggaactggcccaaataaggaaggaggaaaaagagaagaaaagacgccgcctcgagaacatcaggtttctgaaagggatgggctactccacgcacgcggcccagcaggtactccacgcagccagcgggaacttggatgaggccctgaaggtagcagctccctcggggcctctggccttgtccctgagcagtgggtcctgcccagagctccctccatggctctccagcatcctcccgggctcactcctatgggctgccccgtcatccggatctgaagggcaggtttctcctgggctccagcccagacacaggctgcgtgaggccacgtgaggccccatgctcagtgcttggcccaggcctggctccaaaacgtggtgcctgtccacaccagcacagtccacaggccaggactttgtgtagggtttctgtgtgcagcagagtttagtgaaacaggcagtttccacggcagaaaaaagagaatgggaattcaacttgtagtataattgtttggcattaaaattttaaatgtaa

SEQ ID NO: 158268 - DNA, 1752 bp, Homo sapiens
  Payload ID: 10981
  Gene Symbol: NUB1
  Gene Name: negative regulator of ubiquitin-like proteins 1
  ENST ID: ENST00000470316
  CDS Start-End: 6-455
cagggatggcacaaaagaaatatcttcaagcaaaattgacccagtttttaagggaagacaggattcaactttggaaacctccatatacagatgaaaataaaaaagttggtttggcattaaaggaccttgctaagcagtactctgacagactagaatgctgtgaaaatgaagtagaaaaggtaatagaagaaatacgttgcaaggcaattgagcgtggaacaggaaatgacaattatagaacaacgggaattgctacaatcgaggtgtttttaccaccaagactaaaaaaagataggaaaaacttgttggagacccgattgcacatcactggcagagaactgaggtccaaggctgtcaggggtggattcaggaagtggcatgcaacacacatgcgtagaagaccctgtggatcagcccccgctatgggcttctccagggagaccacagaagaatagctgaaacctttggacttcaagaaaattatatcaaaattgtcataaataagaagcaactacaactagggaaaacccttgaagaacaaggcgtggctcacaatgtgaaagcgatggtgcttgaactaaaacaatctgaagaggacgcgaggaaaaacttccagttagaggaagaggagcaaaatgaggccaaactcaaagaaaaacaaattcagaggaccaagagaggactagaaatactggcaaagagagcagcagagacagtggtggatccagaaatgacaccgtacttagacatagctaaccagacaggcagatcaatcagaattcccccatcagaaagaaaagcccttatgttagctatgggatatcatgagaagggcagagctttcctgaaaagaaaagaatatggaatagccttgccatgtctgttggacgctgacaaatatttctggtaggcgcttttgtacttggtgaacaccagctttaaggaagatggcccagactatacagaacaccctgccatgcccttgagactgcagactttcatctacaacagtggttaatgtaaaagagtagttatggtgtaaactggtgaatttcttcttccctttgtatttctaattgacctttcctccctgtaaagaaaagaattttcaagcaggtaggatatcctctcttcttctgtacatgtgctatgttgctagtcggaactttccattataaagtttcctgtcagcttttcacctaatggttttggggtagtattgatgattattcctcaaatccgttgtttaagagctgtataatggtgatattattccttctgtacttattttttttgagacagagtctcactctgtcacccaggctggaatgcagtggcatgatctcagctcactgcaacttccatctcctgggctcaagtgatcctcccacctcagcctcctaagtagctgggatcacaggtgcacatcaccacaggtgcacatcaccatgcccagataatttttttgtatttgttgtagagatgaggtttcactatgttgcccatactagtctcaaactcctgggctcaagtgatccacccaccacagcctctcaaagtgctggtattacaggtgtgagccaccgcacccagcctcccttctgcatttattgctggaattctgaaaaatttgtttttgctcatcagttattttatatgtggaggtacaatttgtataggaaagttagaataaaatactttgtttctttctccttattttcttgttttcagaataaatgagttgcttcacta

SEQ ID NO: 158269 - DNA, 767 bp, Homo sapiens
  Payload ID: 10981
  Gene Symbol: NUB1
  Gene Name: negative regulator of ubiquitin-like proteins 1
  ENST ID: ENST00000483358
  CDS Start-End: 6-767
cagggatggcacaaaagaaatatcttcaagcaaaattgacccagtttttaagggaagacaggattcaactttggaaacctccatatacagatgaaaataaaaaagttggtttggcattaaaggaccttgctaagcagtactctgacagactagaatgctgtgaaaatgaagtagaaaaggtaatagaagaaatacgttgcaaggcaattgagcgtggaacaggaaatgacaattatagaacaacgggaattgctacaatcgaggtgtttttaccaccaagactaaaaaaagataggaaaaacttgttggagacccgattgcacatcactggcagagaactgaggtccaaaatagctgaaacctttggacttcaagaaaattatatcaaaattgtcataaataagaagcaactacaactagggaaaacccttgaagaacaaggcgtggctcacaatgtgaaagcgatggtgcttgaactaaaacaatctgaagaggacgcgaggaaaaacttccagttagaggaagaggagcaaaatgaggccaaactcaaagaaaaacaaattcagaggaccaagagaggactagaaatactggcaaagagagcagcagagacagtggtggatccagaaatgacaccgtacttagacatagctaaccagacaggcagatcaatcagaattcccccatcagaaagaaaagcccttatgttagctatgggatatcatgagaagggcagagctttcctgaaaagaaaagaatatggaata

SEQ ID NO: 158270 - DNA, 664 bp, Homo sapiens
  Payload ID: 10981
  Gene Symbol: NUB1
  Gene Name: negative regulator of ubiquitin-like proteins 1
  ENST ID: ENST00000460712
  CDS Start-End: 1-608
aggcacgtcagctctttaaagagctatatattgatccatcaaaagtggacaatttgttgcagttggggtttactgcccaggaagcccggcttggcctgagggcgtgtgatgggaacgtggatcatgcggccactcatattaccaaccgcagagagattctgctcagcaatcctcagatgtggtggttaaatgattccaatcctgaaaccgacaaccgtcaagaaagtccttcccaggaaaacattgaccgattggtgtacatgggttttgatgcactcgtggccgaagctgcgctgagagtgttcagaggcaacgtccagctggccgcccagacccttgctcacaacggaggaagcctgcctcccgagctgccgctgtcgccagaagactctttgtccccgccagccacgtccccttctgactccgcaggaacctctagtgcctcaacagacgaagacatggagacagaggccgtcaatgagatactggaagacattccagagcatgaggaagactatcttgactcaactctggaagatgaagaaattattattgcagagtacctatcctatgtagaaaataggaagtcagcaacaaagaaaaactaaataatgaacagaaatagcgctaattttctgcttataaatgctatcattatgaaaag

SEQ ID NO: 158271 - DNA, 1703 bp, Homo sapiens
  Payload ID: 10981
  Gene Symbol: NUB1
  Gene Name: negative regulator of ubiquitin-like proteins 1
  ENST ID: ENST00000468404
  CDS Start-End: 46-849
atccgggcactctgctggtcgcggcgggagtggcgtggcgcagggatggcacaaaagaaatatcttcaagcaaaattgacccagtttttaagggaagacaggattcaactttggaaacctccatatacagatgaaaataaaaaagttggtttggcattaaaggaccttgctaagcagtactctgacagactagaatgctgtgaaaatgaagtagaaaaggtaatagaagaaatacgttgcaaggcaattgagcgtggaacaggaaatgacaattatagaacaacgggaattgctacaatcgaggtgtttttaccaccaagactaaaaaaagataggaaaaacttgttggagacccgattgcacatcactggcagagaactgaggtccaaaatagctgaaacctttggacttcaagaaaattatatcaaaattgtcataaataagaagcaactacaactagggaaaacccttgaagaacaaggcgtggctcacaatgtgaaagcgatggtgcttgaactaaaacaatctgaagaggacgcgaggaaaaacttccagttagaggaagaggagcaaaatgaggccaaactcaaagaaaaacaaattcagaggaccaagagaggactagaaatactggcaaagagagcagcagagacagtggtggatccagaaatgacaccgtacttagacatagctaaccagacaggcagatcaatcagaattcccccatcagaaagaaaagcccttatgttagctatgggatatcatgagaagggcagagctttcctgaaaagaaaagaatatggaatagccttgccatgtctgttggacgctgacaaatatttctggtaggcgcttttgtacttggtgaacaccagctttaaggaagatggcccagactatacagaacaccctgccatgcccttgagactgcagactttcatctacaacagtggttaatgtaaaagagtagttatggtgtaaactggtgaatttcttcttccctttgtatttctaattgacctttcctccctgtaaagaaaagaattttcaagcaggtaggatatcctctcttcttctgtacatgtgctatgttgctagtcggaactttccattataaagtttcctgtcagcttttcacctaatggttttggggtagtattgatgattattcctcaaatccgttgtttaagagctgtataatggtgatattattccttctgtacttattttttttgagacagagtctcactctgtcacccaggctggaatgcagtggcatgatctcagctcactgcaacttccatctcctgggctcaagtgatcctcccacctcagcctcctaagtagctgggatcacaggtgcacatcaccacaggtgcacatcaccatgcccagataatttttttgtatttgttgtagagatgaggtttcactatgttgcccatactagtctcaaactcctgggctcaagtgatccacccaccacagcctctcaaagtgctggtattacaggtgtgagccaccgcacccagcctcccttctgcatttattgctggaattctgaaaaatttgtttttgctcatcagttattttatatgtggaggtacaatttgtataggaaagttagaataaaatactttgtttctttctccttattttcttgttttcagaataaatgagttgcttcactatcaccctccaaa

SEQ ID NO: 158272 - DNA, 3210 bp, Homo sapiens
  Payload ID: 10981
  Gene Symbol: NUB1
  Gene Name: negative regulator of ubiquitin-like proteins 1
  ENST ID: ENST00000568733
  CDS Start-End: 67-1986
agcggcggcggcggcggcggcgcgaaggcgacagcggcggcgggggcggggctggcctcacccggaatgaaaacaaacggcggccgctgccgcatccgggcactctgctggtcgcggcgggagtggcgtggcgcagggatggcacaaaagaaatatcttcaagcaaaattgacccagtttttaagggaagacaggattcaactttggaaacctccatatacagatgaaaataaaaaagttggtttggcattaaaggaccttgctaagcagtactctgacagactagaatgctgtgaaaatgaagtagaaaaggtaatagaagaaatacgttgcaaggcaattgagcgtggaacaggaaatgacaattatagaacaacgggaattgctacaatcgaggtgtttttaccaccaagactaaaaaaagataggaaaaacttgttggagacccgattgcacatcactggcagagaactgaggtccaaaatagctgaaacctttggacttcaagaaaattatatcaaaattgtcataaataagaagcaactacaactagggaaaacccttgaagaacaaggcgtggctcacaatgtgaaagcgatggtgcttgaactaaaacaatctgaagaggacgcgaggaaaaacttccagttagaggaagaggagcaaaatgaggccaaactcaaagaaaaacaaattcagaggaccaagagaggactagaaatactggcaaagagagcagcagagacagtggtggatccagaaatgacaccgtacttagacatagctaaccagacaggcagatcaatcagaattcccccatcagaaagaaaagcccttatgttagctatgggatatcatgagaagggcagagctttcctgaaaagaaaagaatatggaatagccttgccatgtctgttggacgctgacaaatatttctgtgagtgttgcagagagctgctggacacagtggataactacgccgtcctccagctggatatagtgtggtgttacttccgcctggaacagctggaatgccttgatgatgcagaaaaaaaattaaacttggcccagaaatgctttaaaaattgttacggagaaaatcatcagagactggtccacataaaaggaaattgtgggaaagagaaggtactgtttctaagactctacttacttcaagggatccgaaactatcacagtggaaatgatgtagaggcttatgagtatcttaacaaggcacgtcagctctttaaagagctatatattgatccatcaaaagtggacaatttgttgcagttggggtttactgcccaggaagcccggcttggcctgagggcgtgtgatgggaacgtggatcatgcggccactcatattaccaaccgcagagaggaactggcccaaataaggaaggaggaaaaagagaagaaaagacgccgcctcgagaacatcaggtttctgaaagggatgggctactccacgcacgcggcccagcaggtactccacgcagccagcgggaacttggatgaggccctgaagattctgctcagcaatcctcagatgtggtggttaaatgattccaatcctgaaaccgacaaccgtcaagaaagtccttcccaggaaaacattgaccgattggtgtacatgggttttgatgcactcgtggccgaagctgcgctgagagtgttcagaggcaacgtccagctggccgcccagacccttgctcacaacggaggaagcctgcctcccgagctgccgctgtcgccagaagactctttgtccccgccagccacgtccccttctgactccgcaggaacctctagtgcctcaacagacgaagacatggagacagaggccgtcaatgagatactggaagacattccagagcatgaggaagactatcttgactcaactctggaagatgaagaaattattattgcagagtacctatcctatgtagaaaataggaagtcagcaacaaagaaaaactaaataatgaacagaaatagcgctaattttctgcttataaatgctatcattatgaaaaggctaatgcagctctttctgttcttactttttatctgaattacaagtcctctttgggtgtaggagggggtgggcaggggacaagtccaggaggggtcccagggccttcatgcgtggtctcggggaagaagcttcctctggcctggcgcaggccgttccatctgcctcccaggtctgcgtccctaaccccttccccagcttggtgttttaccccgaaacaggaaggaacaggggtcctgtagaacaggggtcctggggaaggtgtccagggcagggtcctgggaagggtgtcccgaccgcttcctctccagctgtggctccatctgcccagcttgcctgcctcctgcacccactgccctgaccttcctgcttcccacgctgccatctctgccagggtgccacatgggttcctgtgccaccctttccccgcccctcaaatcgtcctttaagtcttccttccaagtgctgtggggcataacgatgaggcgctggccttgggggccacaccaggtcgcagcaaatggcttcagcctgggacgccagtgttttatgctcttagttcagtaaaatacgcccccgaaattcaagattgagtgtcaggctttatatatattcagcattcctcattacagaaatcttctattgaatgggaaaggtttaaatgctaaccaaagcaatttatttttaattaatatttttagactctgtgctgtcatactgaactcactgctagctaagagacctatcagagatttagatatattttctccaggttttttgtgggttttctttgttgttgttgttgttctagccatgtgacagaggctctttctaaaagtatgtagttcgctgtgtgtcggctccagcagtaaccgtcctcactgcgccacgcactcctctgtagatgtgtgcccagtgggagttccttccagccccaggaccacagcagcagccaggtgccgagtggattgagtgccaggtgcatccaagactttccctcccttccagaaggcactgactgaagacaggatggatcatgcggagccggctgaaatgctccaactttttcaaagtgtgggtggtccagtttggactgatgggaatcttcttgtcattctttttaaacggatgataccgatggaaataaaaggtgggaaatatattcaaaaa

SEQ ID NO: 158273 - DNA, 4656 bp, Homo sapiens
  Payload ID: 10982
  Gene Symbol: NBR1
  Gene Name: neighbor of BRCA1 gene 1
  Uniprot ID: Q14596
  ENST ID: ENST00000341165
  CDS Start-End: 141-3041
agtaattgctgtaccaaggtcagaatcgccacctgaggcctgaatatcagcgtaagatagtgtccaaagcagtcttaagaagaggtcccattaccccactctttccgccctaatggaggtctccagtttagcctcacagcatggaaccacaggttactctaaatgtgacttttaaaaatgaaattcaaagctttctggtttctgatccagaaaatacaacttgggctgatatcgaagctatggtaaaagtttcatttgatctgaatactattcaaataaaatacctggatgaggaaaatgaagaggtatccatcaacagtcaaggagaatatgaagaagcgcttaagatggcagttaaacagggaaaccaactgcagatgcaagtccacgaagggcaccatgtcgttgatgaagccccacccccagttgtaggagcaaaacgactagctgccagggcagggaagaagccacttgcacattactcttcactggtgagagtcttgggatcagacatgaagaccccagaggatcctgcagtgcagtcgtttccacttgttccatgtgacacagaccagcctcaagacaagcccccagactggttcacaagctacctggagacgttcagagaacaagtggttaacgaaacggttgagaagcttgaacagaaattacatgaaaagcttgtcctccagaacccatccttgggttcttgtccctcagaagtctcaatgcctacttcagaagaaacattgtttttgccagaaaaccagttcagctggcatattgcttgcaacaactgccaaagaaggattgttggtgtccgctaccagtgtagcctatgcccatcctacaatatctgtgaagattgtgaagcagggccatatggccatgacactaaccacgtcctgctgaagttgcggagacctgttgtgggctcctctgaaccgttctgtcactcaaagtactctactcctcgtcttcctgctgctctggaacaagtcaggctccagaaacaggttgataagaactttcttaaagcagaaaagcaaaggttgcgagctgagaagaaacaacgtaaagcagaggtcaaggaacttaaaaagcagcttaaactccataggaaaattcacctgtggaattcaatccatggactccagagccccaagtctcctttaggccgacctgagagcttgctccagtctaataccctgatgctccctttgcagccctgtacctccgttatgccaatgctcagtgcagcatttgtggatgagaatttgcctgatgggactcaccttcagccaggaaccaagtttatcaaacactggaggatgaaaaatacaggaaatgtaaagtggagtgcagacacaaagctcaagttcatgtggggaaacctgactttggcttccacagaaaagaaggatgttttggttccctgcctcaaggccggccatgtgggagttgtatctgtggagttcattgccccagccttggagggaacgtatacttcccattggcgtctttctcacaaaggccagcaatttgggcctcgggtctggtgcagtatcatagtagatcctttcccctccgaagagagccctgataacattgaaaagggcatgatcagctcaagcaaaactgatgatctcacctgccagcaagaggaaacttttcttctggctaaagaagaaagacagcttggtgaagtgactgagcagacagaagggacagcagcctgcatcccacagaaggcaaaaaatgttgccagtgagagggagctctacatcccatctgtggatcttctgactgcccaggacctgctgtcctttgagctgttggatataaacattgttcaagagttggagagagtgccccacaacacccctgtggatgtgactccctgcatgtctcctctgccacatgacagtcctttaatagagaagccaggcttggggcagatagaggaagagaatgaaggggcaggatttaaagcacttcctgattctatggtgtcagtaaagaggaaggctgagaacattgcttctgtggaggaagcagaagaagacctgagtgggacccagtttgtgtgtgagacagtaatccgatcccttaccttggatgctgccccagaccacaaccctccttgcagacagaagtccttgcagatgacatttgccttgcctgaaggaccacttggaaatgagaaggaggagattatccatatcgctgaggaagaagctgtcatggaggaggaggaggatgaggaggatgaggaggaggaggatgagctcaaagatgaagttcaaagtcagtcctctgcttcctcagaggattacatcatcatcctgcctgagtgctttgataccagccgccccctgggggattctatgtacagctctgcgctctcacagccaggcctggagcgaggtgctgaaggcaagcctggggttgaggctgggcaggaaccagctgaggctggggaaagactccctggaggggagaaccagccacaggagcacagcataagtgacatcctcacgacctcacagactctggaaacagtgcccctaatcccagaggtagtggagcttccaccgtcactgcccaggagctctccttgtgtacatcatcatggttccccaggagtggatttaccagttaccataccagaagtttcttcagtccctgatcagatcagaggagagcccagaggctcatcaggacttgtaaacagcagacagaagagctatgaccactcaaggcaccatcatgggagcagcattgctggaggactggtgaagggggctttgtctgttgctgcctctgcatacaaggccctgtttgctgggccaccagtcactgcacagccaataatttctgaagatcagacagcagccctgatggcccatctctttgaaatgggattctgtgacaggcagctgaacctacggctgctgaagaaacacaattacaatatcctgcaggttgtgacagaacttcttcagttaaacaacaacgactggtacagccaacgctattgaggagtgaccttgtattaaataactgcctgctgctcagagatgatctttattctgtcattggggtatgggatagaagcccttgcttatttttaatctgatgaatctgtatagagcccatcgttgagttaccaagacaatacctgctacagtattttggggagcaaactaaagaccagaacttaaattttcactttagacattggatgaatagtatgaagacagtttttcagttgatttggataaaactattttagtgcattgacaagtgtaacttcaacttcatatagaaccatttttctttctgcttttattgaaactgagtatttttctttggctaatgtggattttttatggggatatctgttaattttcaggttttgaaagacattaacctcggaagttgtttttaagaattattctcataattcttattctcataatttctgtaatccacctcaagcttcatagttatttggcattgaaataacacccagagcatgatagaaatgttgttactcttcctctctcaaggagaaagtaattttcctgcaatacttaataattggcaccgttgctttctaaagactccatggtgcattcaagagtatccaacttcaagggaatctccgcatttcaatgaaaggaggaagagtgtgctgataaacctaccagcacctattgagcaatgtctattatagtaattttgcatacatttttatttaagggaaaaaatataggtattgtgaaatattttgctaatcttatagaaaaggaaaaaatcccgttatttaaagggaaaagtaaatttaacagttgccttttttcttaatgtcagggcagatcttattttacagtacagtgggggaaatagaaacatgtgaaaggcaaaaggcaggctcctaaattaatgtcagtgaagttcagggtgggcaaatgagtgtgtgtgaggtataggaaatgctgatgacttctttaatgcttgaagtccgttcacaggtatctagccctagaatgcctagaacaggaagaggcagctggtgttctgcaaaacttggacaggggcaaagttgctgaaaaagttttggtttaacccgaagataagtggaaaagagcttgtccatgaacccaggttctcactctgtttacagaagtgtgttgagtacagttggtgaaggaagaggtaacaaaaaatgctaaatattttatccatgaaaatgacttccagaaaaggaagaatatgaaccccagaccgaaggggaaaagatagttaatagtattatctaacctggttggtatttgtaatgaatggtgattttaattagtcattagccataatgatgtttatttacagtataactcctgaatgctacttaaataaaccaggattcaaactgcaagccagccaggccgttcattatttaaaacgttttaatcggggcttccgggtagaaggtggagcggcagggtgtaattgggttgatgggtgggacctgtcttgaccatcggagttttataatcgagggccaggagggcccgggttgctctcctggttatgtatgtacttgtacataaccacctaaagaatggtgaaataaatgttcttggaaattcctac

SEQ ID NO: 158274 - DNA, 2703 bp, Homo sapiens
  Payload ID: 10982
  Gene Symbol: NBR1
  Gene Name: neighbor of BRCA1 gene 1
  ENST ID: ENST00000542611
  CDS Start-End: 111-2624
atccgccatgttagattcaccccacagggatagcggcagagccggtagcggacggtccttgcattggcctccggcaggcgccccccgggggcgggaagctgcctcacagcatggaaccacaggttactctaaatgtgacttttaaaaatgaaattcaaagctttctggtttctgatccagaaaatacaacttgggctgatatcgaagctatggtatccatcaacagtcaaggagaatatgaagaagcgcttaagatggcagttaaacagggaaaccaactgcagatgcaagtccacgaagggcaccatgtcgttgatgaagccccacccccagttgtaggagcaaaacgactagctgccagggcagggaagaagccacttgcacattactcttcactggtgagagtcttgggatcagacatgaagaccccagaggatcctgcagtgcagtcgtttccacttgttccatgtgacacagaccagcctcaagacaagcccccagactggttcacaagctacctggagacgttcagagaacaagtggttaacgaaacggttgagaagcttgaacagaaattacatgaaaagcttgtcctccagaacccatccttgggttcttgtccctcagaagtctcaatgcctacttcagaagaaacattgtttttgccagaaaaccagttcagctggcatattgcttgcaacaactgccaaagaaggattgttggtgtccgctaccagtgtagcctatgcccatcctacaatatctgtgaagattgtgaagcagggccatatggccatgacactaaccacgtcctgctgaagttgcggagacctgttgtgggctcctctgaaccgttctgtcactcaaagtactctactcctcgtcttcctgctgctctggaacaagtcaggctccagaaacaggttgataagaactttcttaaagcagaaaagcaaaggttgcgagctgagaagaaacaacgtaaagcagaggtcaaggaacttaaaaagcagcttaaactccataggaaaattcacctgtggaattcaatccatggactccagagccccaagtctcctttaggccgacctgagagcttgctccagtctaataccctgatgctccctttgcagccctgtacctccgttatgccaatgctcagtgcagcatttgtggatgagaatttgcctgatgggactcaccttcagccaggaaccaagtttatcaaacactggaggatgaaaaatacaggaaatgtaaagtggagtgcagacacaaagctcaagttcatgtggggaaacctgactttggcttccacagaaaagaaggatgttttggttccctgcctcaaggccggccatgtgggagttgtatctgtggagttcattgccccagccttggagggaacgtatacttcccattggcgtctttctcacaaaggccagcaatttgggcctcgggtctggtgcagtatcatagtagatcctttcccctccgaagagagccctgataacattgaaaagggcatgatcagctcaagcaaaactgatgatctcacctgccagcaagaggaaacttttcttctggctaaagaagaaagacagcttggtgaagtgactgagcagacagaagggacagcagcctgcatcccacagaaggcaaaaaatgttgccagtgagagggagctctacatcccatctgtggatcttctgactgcccaggacctgctgtcctttgagctgttggatataaacattgttcaagagttggagagagtgccccacaacacccctgtggatgtgactccctgcatgtctcctctgccacatgacagtcctttaatagagaagccaggcttggggcagatagaggaagagaatgaaggggcaggatttaaagcacttcctgattctatggtgtcagtaaagaggaaggctgagaacattgcttctgtggaggaagcagaagaagacctgagtgggacccagtttgtgtgtgagacagtaatccgatcccttaccttggatgctgccccagaccacaaccctccttgcagacagaagtccttgcagatgacatttgccttgcctgaaggaccacttggaaatgagaaggaggagattatccatatcgctgaggaagaagctgtcatggaggaggaggaggatgaggaggatgaggaggaggaggatgagctcaaagatgaagttcaaagtcagtcctctgcttcctcagaggattacatcatcatcctgcctgagtgctttgataccagccgccccctgggggattctatgtacagctctgcgctctcacagccaggcctggagcgaggtgctgaaggcaagcctggggttgaggctgggcaggaaccagctgaggctggggaaagactccctggaggggagaaccagccacaggagcacagcataagtgacatcctcacgacctcacagactctggaaacagtgcccctaatcccagaggtagtggagcttccaccgtcactgcccaggagctctccttgtgtacatcatcatggttccccaggagtggatttaccagttaccataccagaagtttcttcagtccctgatcagatcagaggagccaataatttctgaagatcagacagcagccctgatggcccatctctttgaaatgggattctgtgacaggcagctgaacctacggctgctgaag

SEQ ID NO: 158275 - DNA, 586 bp, Homo sapiens
  Payload ID: 10982
  Gene Symbol: NBR1
  Gene Name: neighbor of BRCA1 gene 1
  ENST ID: ENST00000586650
  CDS Start-End: 460-586
ccaaggtcagaatcgccacctgaggcctgaatatcagcgtaagatagtgtccaaagcagtcttaagaagaggtcccattaccccactctttccgccctaatggaggtctccagtttaggtaaataaaaggattgttgggaggtggagggaaagaactactatttccaacatgcattgcggaacgaaaggccttggccacactgttccttggaaactgtagtcttatggagaggaacatccaataccaaagcgggcacaattctcacggaaatccagtggatagattggagacctccgcgggcttatacatgtcaacagtaatggattggagtgttgttatgttctcctatcttgagagcagagactaggccaaaaaaagatacctacaactcctaggaagactacgattcccatccagccccacgagtctcgggcaagtagtcctctaagcctcacagcatggaaccacaggttactctaaatgtgacttttaaaaatgaaattcaaagctttctggtttctgatccagaaaatacaacttgggctgatatcgaagctatggtaaaagtttcatttgatctgaata

SEQ ID NO: 158276 - DNA, 3446 bp, Homo sapiens
  Payload ID: 10982
  Gene Symbol: NBR1
  Gene Name: neighbor of BRCA1 gene 1
  Uniprot ID: Q14596
  ENST ID: ENST00000590996
  CDS Start-End: 99-2999
agattcaccccacagggatagcggcagagccggtagcggacggtccttgcattggcctccggcaggcgccccccgggggcgggaagctgcctcacagcatggaaccacaggttactctaaatgtgacttttaaaaatgaaattcaaagctttctggtttctgatccagaaaatacaacttgggctgatatcgaagctatggtaaaagtttcatttgatctgaatactattcaaataaaatacctggatgaggaaaatgaagaggtatccatcaacagtcaaggagaatatgaagaagcgcttaagatggcagttaaacagggaaaccaactgcagatgcaagtccacgaagggcaccatgtcgttgatgaagccccacccccagttgtaggagcaaaacgactagctgccagggcagggaagaagccacttgcacattactcttcactggtgagagtcttgggatcagacatgaagaccccagaggatcctgcagtgcagtcgtttccacttgttccatgtgacacagaccagcctcaagacaagcccccagactggttcacaagctacctggagacgttcagagaacaagtggttaacgaaacggttgagaagcttgaacagaaattacatgaaaagcttgtcctccagaacccatccttgggttcttgtccctcagaagtctcaatgcctacttcagaagaaacattgtttttgccagaaaaccagttcagctggcatattgcttgcaacaactgccaaagaaggattgttggtgtccgctaccagtgtagcctatgcccatcctacaatatctgtgaagattgtgaagcagggccatatggccatgacactaaccacgtcctgctgaagttgcggagacctgttgtgggctcctctgaaccgttctgtcactcaaagtactctactcctcgtcttcctgctgctctggaacaagtcaggctccagaaacaggttgataagaactttcttaaagcagaaaagcaaaggttgcgagctgagaagaaacaacgtaaagcagaggtcaaggaacttaaaaagcagcttaaactccataggaaaattcacctgtggaattcaatccatggactccagagccccaagtctcctttaggccgacctgagagcttgctccagtctaataccctgatgctccctttgcagccctgtacctccgttatgccaatgctcagtgcagcatttgtggatgagaatttgcctgatgggactcaccttcagccaggaaccaagtttatcaaacactggaggatgaaaaatacaggaaatgtaaagtggagtgcagacacaaagctcaagttcatgtggggaaacctgactttggcttccacagaaaagaaggatgttttggttccctgcctcaaggccggccatgtgggagttgtatctgtggagttcattgccccagccttggagggaacgtatacttcccattggcgtctttctcacaaaggccagcaatttgggcctcgggtctggtgcagtatcatagtagatcctttcccctccgaagagagccctgataacattgaaaagggcatgatcagctcaagcaaaactgatgatctcacctgccagcaagaggaaacttttcttctggctaaagaagaaagacagcttggtgaagtgactgagcagacagaagggacagcagcctgcatcccacagaaggcaaaaaatgttgccagtgagagggagctctacatcccatctgtggatcttctgactgcccaggacctgctgtcctttgagctgttggatataaacattgttcaagagttggagagagtgccccacaacacccctgtggatgtgactccctgcatgtctcctctgccacatgacagtcctttaatagagaagccaggcttggggcagatagaggaagagaatgaaggggcaggatttaaagcacttcctgattctatggtgtcagtaaagaggaaggctgagaacattgcttctgtggaggaagcagaagaagacctgagtgggacccagtttgtgtgtgagacagtaatccgatcccttaccttggatgctgccccagaccacaaccctccttgcagacagaagtccttgcagatgacatttgccttgcctgaaggaccacttggaaatgagaaggaggagattatccatatcgctgaggaagaagctgtcatggaggaggaggaggatgaggaggatgaggaggaggaggatgagctcaaagatgaagttcaaagtcagtcctctgcttcctcagaggattacatcatcatcctgcctgagtgctttgataccagccgccccctgggggattctatgtacagctctgcgctctcacagccaggcctggagcgaggtgctgaaggcaagcctggggttgaggctgggcaggaaccagctgaggctggggaaagactccctggaggggagaaccagccacaggagcacagcataagtgacatcctcacgacctcacagactctggaaacagtgcccctaatcccagaggtagtggagcttccaccgtcactgcccaggagctctccttgtgtacatcatcatggttccccaggagtggatttaccagttaccataccagaagtttcttcagtccctgatcagatcagaggagagcccagaggctcatcaggacttgtaaacagcagacagaagagctatgaccactcaaggcaccatcatgggagcagcattgctggaggactggtgaagggggctttgtctgttgctgcctctgcatacaaggccctgtttgctgggccaccagtcactgcacagccaataatttctgaagatcagacagcagccctgatggcccatctctttgaaatgggattctgtgacaggcagctgaacctacggctgctgaagaaacacaattacaatatcctgcaggttgtgacagaacttcttcagttaaacaacaacgactggtacagccaacgctattgaggagtgaccttgtattaaataactgcctgctgctcagagatgatctttattctgtcattggggtatgggatagaagcccttgcttatttttaatctgatgaatctgtatagagcccatcgttgagttaccaagacaatacctgctacagtattttggggagcaaactaaagaccagaacttaaattttcactttagacattggatgaatagtatgaagacagtttttcagttgatttggataaaactattttagtgcattgacaagtgtaacttcaacttcatatagaaccatttttctttctgcttttattgaaactgagtatttttctttggctaatgtggattttttatggggatatctgttaattttcaggttttgaaagacattaacctcggaagttgtttttaagaattattctcataattcttattctcataatttctgt

SEQ ID NO: 158277 - DNA, 3097 bp, Homo sapiens
  Payload ID: 10982
  Gene Symbol: NBR1
  Gene Name: neighbor of BRCA1 gene 1
  Uniprot ID: Q14596
  ENST ID: ENST00000589872
  CDS Start-End: 70-2883
ccggtagcggacggtccttgcattggcctccggcaggcgccccccgggggcgggaagctgcctcacagcatggaaccacaggttactctaaatgtgacttttaaaaatgaaattcaaagctttctggtttctgatccagaaaatacaacttgggctgatatcgaagctatggtaaaagtttcatttgatctgaatactattcaaataaaatacctggatgaggaaaatgaagaggtatccatcaacagtcaaggagaatatgaagaagcgcttaagatggcagttaaacagggaaaccaactgcagatgcaagtccacgaagggcaccatgtcgttgatgaagccccacccccagttgtaggagcaaaacgactagctgccagggcagggaagaagccacttgcacattactcttcactggtgagagtcttgggatcagacatgaagaccccagaggatcctgcagtgcagtcgtttccacttgttccatgtgacacagaccagcctcaagacaagcccccagactggttcacaagctacctggagacgttcagagaacaagtggttaacgaaacggttgagaagcttgaacagaaattacatgaaaagcttgtcctccagaacccatccttgggttcttgtccctcagaagtctcaatgcctacttcagaagaaacattgtttttgccagaaaaccagttcagctggcatattgcttgcaacaactgccaaagaaggattgttggtgtccgctaccagtgtagcctatgcccatcctacaatatctgtgaagattgtgaagcagggccatatggccatgacactaaccacgtcctgctgaagttgcggagacctgttgtgggctcctctgaaccgttctgtcactcaaagtactctactcctcgtcttcctgctgctctggaacaagtcaggctccagaaacaggttgataagaactttcttaaagcagaaaagcaaaggttgcgagctgagaagaaacaacgtaaagcagaggtcaaggaacttaaaaagcagcttaaactccataggaaaattcacctgtggaattcaatccatggactccagagccccaagtctcctttaggccgacctgagagcttgctccagtctaataccctgatgctccctttgcagccctgtacctccgttatgccaatgctcagtgcagcatttgtggatgagaatttgcctgatgggactcaccttcagccaggaaccaagtttatcaaacactggaggatgaaaaatacaggaaatgtaaagtggagtgcagacacaaagctcaagttcatgtggggaaacctgactttggcttccacagaaaagaaggatgttttggttccctgcctcaaggccggccatgtgggagttgtatctgtggagttcattgccccagccttggagggaacgtatacttcccattggcgtctttctcacaaaggccagcaatttgggcctcgggtctggtgcagtatcatagtagatcctttcccctccgaagagagccctgataacattgaaaagggcatgatcagctcaagcaaaactgatgatctcacctgccagcaagaggaaacttttcttctggctaaagaagaaagacagcttggtgaagtgactgagcagacagaagggacagcagcctgcatcccacagaaggcaaaaaatgttgccagtgagagggagctctacatcccatctgtggatcttctgactgcccaggacctgctgtcctttgagctgttggatataaacattgttcaagagttggagagagtgccccacaacacccctgtggatgtgactccctgcatgtctcctctgccacatgacagtcctttaatagagaagccaggcttggggcagatagaggaagagaatgaaggggcaggatttaaagcacttcctgattctatggtgtcagtaaagaggaaggctgagaacattgcttctgtggaggaagcagaagaagacctgagtgggacccagtttgtgtgtgagacagtaatccgatcccttaccttggatgctgccccagaccacaaccctccttgcagacagaagtccttgcagatgacatttgccttgcctgaaggaccacttggaaatgagaaggaggagattatccatatcgctgaggaagaagctgtcatggaggaggaggaggatgaggaggatgaggaggaggaggatgagctcaaagatgaagttcaaagtcagtcctctgcttcctcagaggattacatcatcatcctgcctgagtgctttgataccagccgccccctgggggattctatgtacagctctgcgctctcacagccaggcctggagcgaggtgctgaaggcaagcctggggttgaggctgggcaggaaccagctgaggctggggaaagactccctggaggggagaaccagccacaggagcacagcataagtgacatcctcacgacctcacagactctggaaacagtgcccctaatcccagaggtagtggagcttccaccgtcactgcccaggagctctccttgtgtacatcatcatggttccccaggagtggatttaccagttaccataccagaagtttcttcagtccctgatcagatcagaggagagcccagaggctcatcaggacttgtaaacagcagacagaagagctatgaccactcaaggcaccatcatgggagcagcattgctggaggactggtgaagggggctttgtctgttgctgcctctgcatacaaggccctgtttgctgggccaccagtcactgcacagggtctctggggcttgctgtcattccttcatctggccaaaaaatgcttcttcctgaaagccccgagtgaagcattctcctggttctaagtacagttcattagctccccggtttcccttttctcctccttcaagtacacagataactaatctaaaatagggccttcccagtccgaaccgttggtatcaagtacacaggagtgccatagccttgaatctaattacctagtactttgaataaatctggaaagactagtatgcttgcaagatgatacaaatgtataaaataaacatttaaattata

SEQ ID NO: 158278 - DNA, 3759 bp, Homo sapiens
  Payload ID: 10983
  Gene Symbol: NEIL1
  Gene Name: nei-like DNA glycosylase 1
  Uniprot ID: Q96FI4
  ENST ID: ENST00000355059
  CDS Start-End: 507-1679
ctctttctcgcctcagggcctttgtactggcggttccttccgccggacacgtcgggtttcctcgtttttgcggactggcgctttctgatttcagagactctccgcaacagaaccatctcaagtgggtctacctcctcgcctttttttgttgttgttgttgcttggctgcgcttctgacagggcaggccgtgatgatgtttgtttatgagttaggtctgactgttcgttggtgcttaagatccccaccgggtccctagggcctgtgcgtaccgcgcacctgtgcacgtcctgcgcgcagctgcaggcgactccgctctggctcgtcgctgctgtttcctgctgggggtgccgaccctgtcccacgctagctgggtgacttcccccaaccgcagagacagcggcgacccggggcctcagacctgcccccgcatctcgccggcgccaggcagtgggaagtcaggttcttccgccacctcccagccaggactctgccaccctccctcaggatgcctgagggccccgagctgcacctggccagccagtttgtgaatgaggcctgcagggcgctggtgttcggcggctgcgtggagaagtcctctgtcagccgcaaccctgaggtgccctttgagagcagtgcctaccgcatctcagcttcagcccgcggcaaggagctgcgcctgatactgagccctctgcctggggcccagccccaacaggagccactggccctggtcttccgcttcggcatgtccggctcttttcagctggtgccccgcgaggagctgccacgccatgcccacctgcgcttttacacggccccgcctggcccccggctcgccctatgtttcgtggacatccgccggttcggccgctgggaccttgggggaaagtggcagccgggccgcgggccctgtgtcttgcaggagtaccagcagttcagggagaatgtgctacgaaacctagcggataaggcctttgaccggcccatctgcgaggccctcctggaccagaggttcttcaatggcattggcaactatctgcgggcagagatcctgtaccggctgaagatccccccctttgagaaggcccgctcggtcctggaggccctgcagcagcacaggccgagcccggagctgaccctgagccagaagataaggaccaagctgcagaatccagacctgctggagctatgtcactcagtgcccaaggaagtggtccagttggggggcaaaggctacgggtcagagagcggggaggaggactttgctgcctttcgagcctggctgcgctgctatggcatgccaggcatgagctccctgcaggaccggcatggccgtaccatctggttccagggggatcctggaccgttggcacccaaagggcgcaagtcccgcaaaaagaaatccaaggccacacagctgagtcctgaggacagagtggaggacgctttgcctccaagcaaggccccttccaggacacgaagggcaaagagagaccttcctaagaggactgcaacccagcggcctgaggggaccagcctccagcaggacccagaagctcccacagtgcccaagaaggggaggaggaaggggcgacaggcagcctctggccactgcagaccccggaaggtcaaggctgacatcccatccttggaaccagaggggacctcagcctcttagcaggaggctctccttgcttgcactcaccctttcttattgtcttgccctgcatctgggggtctgaatttttgggagcaggcaatatctgaaggtgcaaacaggccctacggctgttccctgcacaactctcatggttttaattgtaccccatcttccacatctttaaagctcatgtgaaaaatgctgcatttttaataaactgatacatttgaacttcttggcacctcttggtctgagatggccaggtaggaagggcctgctgtccggtcctggtgacagaaggcccagctcctcacaaggcaaactgagcccccatcccagtcctcaaggctctgactctatcagaggacagtttgcctctgcaaggacagcccctcagaggtggtacaaagaccctggccccaggcagcccaggagccagagctcctccagtccagattctccagggtccagggctgccccctcatcctggcaggagccaggcaaaacccacccttcggcccctccccagccccaggcccaggccctttacctgctggcacaggggaggggcttctcaactcatggtctcttcactggcttttggtggctcgaggtccccagtctctcctgtgggggctgcaacccagaccctgcacgcacaggtaccttaggatcttgcccctacccaccaaatacctgggaagccatcccaccccagacttcccacccccaccccaagcgtgaggatgggccctaaggggactgagcagcagggttcccgatccaaggatttattccacaagaaaagactgatccctgctttaggctggggaagcagaaattaggagtccccagagccttctacaaacaaaaccccagccccagggactcagtgtggcggaggctgaagcacgagcaacagggacagcacttggaagggagaaaaggtgagcttcaggcggttgtcccgaagggtcaagtggccagcagggtctggtcgctccaagagatcgcagctggagaacaggaggggccatgaaggctctgcgagggcgagactcgacccccgccccaatcccacaccgccactcacaggatggcctcctgaaccggcagcgacaagtgcagccagcagtccacgtggctgccgtgggcctcatacagcctcaggaccagcgagcggcgctgggggctgctctccgcctgcagaggaacacgtctggtgggaggggccgagggcaggcccagttcggaaccccgtccccagcacgtcccaccccttgcctgcttgacggtctccaatacgaccgcgggtgaagacacggaaaacgcactccaggaggtggcgggcgctgggctgggggctggcagagccaacagggggaagtttaggctgtaggcagcttggataacgccagcatcctggaaagagcctggggtacgaccaggaaacaatgctggtggagaatgggggctaccctcccctgtccctagaaggggcaggaagccaggttgctggggtttgggctcagggaagggcagagaggtgtctagggctgcaggaaggccccaccgtccccagcactcacccttgtgcggcatcagtgcataggtgaactcgtggcgccccgtgtcagcagtagcgtccggggctttaggcgcccgcaagctggggtgaggagggcgcgtaggggccacgctgaagctgttggagttgtggtcgggaagacccatttctccatgccagctcccaggcctggtgggtaccccacttacagcgagaggctgaggatgctgcctcgcactgacgcgccatacttgcagtcgttgagcagggccagcccaaagccgtgttctgacagatccatccagcgatgggcccacacctggagggcagatccaagacccacttggtggccctgtgcccctctttgtgctcccagactccagagctcctgtcactaggccgagcacaagctctagaaccacacaactgaactccagctcccactgtacggggccctgggcatgccacccaacctgcctaagcctcagtttccttatctgtgaaacgggaataaataatagtactcacccc

SEQ ID NO: 158279 - DNA, 532 bp, Homo sapiens
  Payload ID: 10983
  Gene Symbol: NEIL1
  Gene Name: nei-like DNA glycosylase 1
  ENST ID: ENST00000567005
  CDS Start-End: 69-532
gaaccgcccggggacagaggcaagtggcaaagcagggagggcggaggactctgccaccctccctcaggatgcctgagggccccgagctgcacctggccagccagtttgtgaatgaggcctgcagggcgctggtgttcggcggctgcgtggagaagtcctctgtcagccgcaaccctgaggtgccctttgagagcagtgcctaccgcatctcagcttcagcccgcggcaaggagctgcgcctgatactgagccctctgcctggggcccagccccaacaggagccactggccctggtcttccgcttcggcatgtccggctcttttcagctggtgccccgcgaggagctgccacgccatgcccacctgcgcttttacacggccccgcctggcccccggctcgccctatgtttcgtggacatccgccggttcggccgctgggaccttgggggaaagtggcagccgggccgcgggccctgtgtcttgcaggagtaccagcagttcagaaacaggttctctgagcccctctccccatc

SEQ ID NO: 158280 - DNA, 587 bp, Homo sapiens
  Payload ID: 10983
  Gene Symbol: NEIL1
  Gene Name: nei-like DNA glycosylase 1
  ENST ID: ENST00000568881
  CDS Start-End: 469-587
gctttctgatttcagagactctccgcaacagaaccatctcaagtgggtctacctcctcgcctttttttgttgttgttgttgcttggctgcgcttctgacagggcaggccgtgatgatgtttgtttatgagttaggtctgactgttcgttggtgcttaagatccccaccgggtccctagggcctgtgcgtaccgcgcacctgtgcacgtcctgcgcgcagctgcaggcgactccgctctggctcgtcgctgctgtttcctgctgggggtgccgaccctgtcccacgctagctgggtgacttcccccaaccgcagagacagcggcgacccggggcctcagacctgcccccgcatctcgccggcgccaggcagtgggaagtcaggttcttccgccacctcccagccaggcacaccttcgcctccgattccgaaccgcccggggacagaggactctgccaccctccctcaggatgcctgagggccccgagctgcacctggccagccagtttgtgaatgaggcctgcagggcgctggtgttcggcggctgcgtggagaagtcctctgtcagccgcaaccctgaggtgccctt

SEQ ID NO: 158281 - DNA, 1797 bp, Homo sapiens
  Payload ID: 10983
  Gene Symbol: NEIL1
  Gene Name: nei-like DNA glycosylase 1
  Uniprot ID: Q96FI4
  ENST ID: ENST00000569035
  CDS Start-End: 412-1584
cgacgagcggaacggagtgcgggttcccggggagggggcgtgcaggatcgggttgtggggggtgcgctgtagggctaaggagaagatgagctttggggggccctgaggaggaggggagtcaggattaaccgaggacagggtcgcagcgggggcatggggaggacgggcccgagagcgccgctcctccccaaaactaggatttggagcctcacgttctcccgcaaaacgagccctgtgggtgccaggccaggggcggctcccaggtgtggagggggcaaggtacgggcgtctgccgtcgctaagtgcccccttccacttaaggcacaccttcgcctccgattccgaaccgcccggggacagaggcaagtggcaaagcagggagggcggaggactctgccaccctccctcaggatgcctgagggccccgagctgcacctggccagccagtttgtgaatgaggcctgcagggcgctggtgttcggcggctgcgtggagaagtcctctgtcagccgcaaccctgaggtgccctttgagagcagtgcctaccgcatctcagcttcagcccgcggcaaggagctgcgcctgatactgagccctctgcctggggcccagccccaacaggagccactggccctggtcttccgcttcggcatgtccggctcttttcagctggtgccccgcgaggagctgccacgccatgcccacctgcgcttttacacggccccgcctggcccccggctcgccctatgtttcgtggacatccgccggttcggccgctgggaccttgggggaaagtggcagccgggccgcgggccctgtgtcttgcaggagtaccagcagttcagggagaatgtgctacgaaacctagcggataaggcctttgaccggcccatctgcgaggccctcctggaccagaggttcttcaatggcattggcaactatctgcgggcagagatcctgtaccggctgaagatccccccctttgagaaggcccgctcggtcctggaggccctgcagcagcacaggccgagcccggagctgaccctgagccagaagataaggaccaagctgcagaatccagacctgctggagctatgtcactcagtgcccaaggaagtggtccagttggggggcaaaggctacgggtcagagagcggggaggaggactttgctgcctttcgagcctggctgcgctgctatggcatgccaggcatgagctccctgcaggaccggcatggccgtaccatctggttccagggggatcctggaccgttggcacccaaagggcgcaagtcccgcaaaaagaaatccaaggccacacagctgagtcctgaggacagagtggaggacgctttgcctccaagcaaggccccttccaggacacgaagggcaaagagagaccttcctaagaggactgcaacccagcggcctgaggggaccagcctccagcaggacccagaagctcccacagtgcccaagaaggggaggaggaaggggcgacaggcagcctctggccactgcagaccccggaaggtcaaggctgacatcccatccttggaaccagaggggacctcagcctcttagcaggaggctctccttgcttgcactcaccctttcttattgtcttgccctgcatctgggggtctgaatttttgggagcaggcaatatctgaaggtgcaaacaggccctacggctgttccctgcacaactctcatggttttaattgtaccccatcttccacatctttaaagctcatgtgaaaaatgctgcatttttaataaactgatacatttgaa

SEQ ID NO: 158282 - DNA, 572 bp, Homo sapiens
  Payload ID: 10983
  Gene Symbol: NEIL1
  Gene Name: nei-like DNA glycosylase 1
  ENST ID: ENST00000568059
  CDS Start-End: 308-572
gtttttgcggactggcgctttctgatttcagagactctccgcaacagaaccatctcaaggcctgtgcgtaccgcgcacctgtgcacgtcctgcgcgcagctgcaggcgactccgctctggctcgtcgctgctgtttcctgctgggggtgccgaccctgtcccacgctagctgggtgacttcccccaaccgcagagacagcggcgacccggggcctcagacctgcccccgcatctcgccggcgccaggcagtgggaagtcaggttcttccgccacctcccagccaggactctgccaccctccctcaggatgcctgagggccccgagctgcacctggccagccagtttgtgaatgaggcctgcagggcgctggtgttcggcggctgcgtggagaagtcctctgtcagccgcaaccctgaggtgccctttgagagcagtgcctaccgcatctcagcttcagcccgcggcaaggagctgcgcctgatactgagccctctgcctggggcccagccccaacaggagccactggccctggtcttccgcttcggcatgtccggctcttttcagctggtgc

SEQ ID NO: 158283 - DNA, 780 bp, Homo sapiens
  Payload ID: 10983
  Gene Symbol: NEIL1
  Gene Name: nei-like DNA glycosylase 1
  ENST ID: ENST00000567657
  CDS Start-End: 227-780
gcagtgggaagtcaggttcttccgccacctcccagccaggatttggagcctcacgttctcccgcaaaacgagccctgtgggtgccaggccaggggcggctcccaggtgtggagggggcaaggtacgggcgtctgccgtcgctaagtgcccccttccacttaaggcacaccttcgcctccgattccgaaccgcccggggacagaggactctgccaccctccctcaggatgcctgagggccccgagctgcacctggccagccagtttgtgaatgaggcctgcagggcgctggtgttcggcggctgcgtggagaagtcctctgtcagccgcaaccctgaggtgccctttgagagcagtgcctaccgcatctcagcttcagcccgcggcaaggagctgcgcctgatactgagccctctgcctggggcccagccccaacaggagccactggccctggtcttccgcttcggcatgtccggctcttttcagctggtgccccgcgaggagctgccacgccatgcccacctgcgcttttacacggccccgcctggcccccggctcgccctatgtttcgtggacatccgccggttcggccgctgggaccttgggggaaagtggcagccgggccgcgggccctgtgtcttgcaggagtaccagcagttcagggagaatgtgctacgaaacctagcggataaggcctttgaccggcccatctgcgaggccctcctggaccagaggttcttcaatggcattggcaactatctgcgggcagagatcctgtaccg

SEQ ID NO: 158284 - DNA, 583 bp, Homo sapiens
  Payload ID: 10983
  Gene Symbol: NEIL1
  Gene Name: nei-like DNA glycosylase 1
  ENST ID: ENST00000564500
  CDS Start-End: 518-583
acacaggacttctttgagttctttcagtgaccaatctctttctcgcctcagggcctttgtactggcggttccttccgccggacacgtcgggtttcctcgtttttgcggactggcgctttctgatttcagagactctccgcaacagaaccatctcaagtctgactgttcgttggtgcttaagatccccaccgggtccctagggcctgtgcgtaccgcgcacctgtgcacgtcctgcgcgcagctgcaggcgactccgctctggctcgtcgctgctgtttcctgctgggggtgccgaccctgtcccacgctagctgggtgacttcccccaaccgcagagacagcggcgacccggggcctcagacctgcccccgcatctcgccggcgccaggcagtgggaagtcaggttcttccgccacctcccagccaggcacaccttcgcctccgattccgaaccgcccggggacagaggcaagtggcaaagcagggagggcggaggactctgccaccctccctcaggatgcctgagggccccgagctgcacctggccagccagtttgtgaatgaggcctgcagggcgctggtg

SEQ ID NO: 158285 - DNA, 558 bp, Homo sapiens
  Payload ID: 10983
  Gene Symbol: NEIL1
  Gene Name: nei-like DNA glycosylase 1
  ENST ID: ENST00000564257
  CDS Start-End: 163-558
aaaacgagccctgtgggtgccaggccaggggcggctcccaggtgtggagggggcaaggtacgggcgtctgccgtcgctaagtgcccccttccacttaaggcacaccttcgcctccgattccgaaccgcccggggacagaggactctgccaccctccctcaggatgcctgagggccccgagctgcacctggccagccagtttgtgaatgaggcctgcagggcgctggtgttcggcggctgcgtggagaagtcctctgtcagccgcaaccctgaggtgccctttgagagcagtgcctaccgcatctcagcttcagcccgcggcaaggagctgcgcctgatactgagccctctgcctggggcccagccccaacaggagccactggccctggtcttccgcttcggcatgtccggctcttttcagctggtgccccgcgaggagctgccacgccatgcccacctgcgcttttacacggccccgcctggcccccggctcgccctatgtttcgtggacatccgccggttcggccgctgggaccttgggggaaagtggcagccgggc

SEQ ID NO: 158286 - DNA, 771 bp, Homo sapiens
  Payload ID: 10983
  Gene Symbol: NEIL1
  Gene Name: nei-like DNA glycosylase 1
  ENST ID: ENST00000568519
  CDS Start-End: 114-572
gacagcggcgacccggggcctcagacctgcccccgcatctcgccggcgccaggcagtgggaagtcaggttcttccgccacctcccagccaggactctgccaccctccctcaggatgcctgagggccccgagctgcacctggccagccagtttgtgaatgaggcctgcagggcgctggtgttcggcggctgcgtggagaagtcctctgtcagccgcaaccctgaggtgccctttgagagcagtgcctaccgcatctcagcttcagcccgcggcaaggagctgcgcctgatactgagccctctgcctggggcccagccccaacaggagccactggccctggtcttccgcttcggcatgtccggctcttttcagctggtgccccgcgaggagctgccacgccatgcccacctgcgcttttacacggccccgcctggcccccggctcgccctatgtttcgtggacatccgccggttcggccgctgggaccttgggggaaagtggcagccgggccgcgggccctgtgtcttgcaggagtaccagcagttcagggtctcgctctgttgcctaggctagagtacagtggcgccatcacagctcattgcagccttaacctccagggctcagaaacaggttctctgagcccctctccccatcccatggagggtggggatgggtcttacgcacccagaccgtgttcctccagggagaatgtgctacgaaacctagcggataaggcctttgaccggcccatctgcgaggccctcctggacca

SEQ ID NO: 158287 - DNA, 833 bp, Homo sapiens
  Payload ID: 10983
  Gene Symbol: NEIL1
  Gene Name: nei-like DNA glycosylase 1
  ENST ID: ENST00000565051
  CDS Start-End: 236-833
gctttggggggccctgaggaggaggggagtcaggattaaccgaggacagggtcgcagcgggggcatggggaggacgggcccgagagcgccgctcctccccaaaactaggatttggagcctcacgttctcccgcaaaacgagccctgcacaccttcgcctccgattccgaaccgcccggggacagaggcaagtggcaaagcagggagggcggaggactctgccaccctccctcaggatgcctgagggccccgagctgcacctggccagccagtttgtgaatgaggcctgcagggcgctggtgttcggcggctgcgtggagaagtcctctgtcagccgcaaccctgaggtgccctttgagagcagtgcctaccgcatctcagcttcagcccgcggcaaggagctgcgcctgatactgagccctctgcctggggcccagccccaacaggagccactggccctggtcttccgcttcggcatgtccggctcttttcagctggtgccccgcgaggagctgccacgccatgcccacctgcgcttttacacggccccgcctggcccccggctcgccctatgtttcgtggacatccgccggttcggccgctgggaccttgggggaaagtggcagccgggccgcgggccctgtgtcttgcaggagtaccagcagttcaggctgaagatccccccctttgagaaggcccgctcggtcctggaggccctgcagcagcacaggccgagcccggagctgaccctgagccagaagataaggaccaagctgcagaatccagacctgctggagctatgtcactcagtgcccaaggaagtggtccagttgg

SEQ ID NO: 158288 - DNA, 559 bp, Homo sapiens
  Payload ID: 10983
  Gene Symbol: NEIL1
  Gene Name: nei-like DNA glycosylase 1
  ENST ID: ENST00000566313
  CDS Start-End: 408-559
acgtcgggtttcctcgtttttgcggactggcgctttctgatttcagagactctccgcaacagaaccatctcaagtctgactgttcgttggtgcttaagatccccaccgggtccctagggcctgtgcgtaccgcgcacctgtgcacgtcctgcgcgcagctgcaggcgactccgctctggctcgtcgctgctgtttcctgctgggggtgccgaccctgtcccacgctagctgggtgacttcccccaaccgcagagacagcggcgacccggggcctcagacctgcccccgcatctcgccggcgccaggcagtgggaagtcaggttcttccgccacctcccagccaggcacaccttcgcctccgattccgaaccgcccggggacagaggactctgccaccctccctcaggatgcctgagggccccgagctgcacctggccagccagtttgtgaatgaggcctgcagggcgctggtgttcggcggctgcgtggagaagtcctctgtcagccgcaaccctgaggtgccctttgagagcagtgcctaccgcatctcagcttcagc

SEQ ID NO: 158289 - DNA, 2019 bp, Homo sapiens
  Payload ID: 10983
  Gene Symbol: NEIL1
  Gene Name: nei-like DNA glycosylase 1
  Uniprot ID: Q96FI4
  ENST ID: ENST00000564784
  CDS Start-End: 630-1802
cctttagtggctgcagtggcgacgagcggaacggagtgcgggttcccggggagggggcgtgcaggatcgggttgtggggggtgcgctgtagggctaaggagaagatgagctttggggggccctgaggaggaggggagtcaggattaaccgaggacagggtcgcagcgggggcatggggaggacgggcccgagagcgccgctcctccccaaaactaggatttggagcctcacgttctcccgcaaaacgagccctgtgggtgccaggccaggggcggctcccaggtgtggagggggcaaggtacgggcgtctgccgtcgctaagtgcccccttccacttaaggcacaccttcgcctccgattccgaaccgcccggggacagagatggtgggagagcctggagaaagagacagcgtgtgcggagggggtgctccctcagatggggggtcaggaagtctccctcaagtgtctgggacagagggacagcaggggccaaggcggagatgagatccgtgagtgaggggagccgggaagaagtaaggctgcagccgcggccccgcaaggattgggactttcgtctaaacgcggtggaagcccatggaaggaagcggactctgccaccctccctcaggatgcctgagggccccgagctgcacctggccagccagtttgtgaatgaggcctgcagggcgctggtgttcggcggctgcgtggagaagtcctctgtcagccgcaaccctgaggtgccctttgagagcagtgcctaccgcatctcagcttcagcccgcggcaaggagctgcgcctgatactgagccctctgcctggggcccagccccaacaggagccactggccctggtcttccgcttcggcatgtccggctcttttcagctggtgccccgcgaggagctgccacgccatgcccacctgcgcttttacacggccccgcctggcccccggctcgccctatgtttcgtggacatccgccggttcggccgctgggaccttgggggaaagtggcagccgggccgcgggccctgtgtcttgcaggagtaccagcagttcagggagaatgtgctacgaaacctagcggataaggcctttgaccggcccatctgcgaggccctcctggaccagaggttcttcaatggcattggcaactatctgcgggcagagatcctgtaccggctgaagatccccccctttgagaaggcccgctcggtcctggaggccctgcagcagcacaggccgagcccggagctgaccctgagccagaagataaggaccaagctgcagaatccagacctgctggagctatgtcactcagtgcccaaggaagtggtccagttggggggcaaaggctacgggtcagagagcggggaggaggactttgctgcctttcgagcctggctgcgctgctatggcatgccaggcatgagctccctgcaggaccggcatggccgtaccatctggttccagggggatcctggaccgttggcacccaaagggcgcaagtcccgcaaaaagaaatccaaggccacacagctgagtcctgaggacagagtggaggacgctttgcctccaagcaaggccccttccaggacacgaagggcaaagagagaccttcctaagaggactgcaacccagcggcctgaggggaccagcctccagcaggacccagaagctcccacagtgcccaagaaggggaggaggaaggggcgacaggcagcctctggccactgcagaccccggaaggtcaaggctgacatcccatccttggaaccagaggggacctcagcctcttagcaggaggctctccttgcttgcactcaccctttcttattgtcttgccctgcatctgggggtctgaatttttgggagcaggcaatatctgaaggtgcaaacaggccctacggctgttccctgcacaactctcatggttttaattgtaccccatcttccacatctttaaagctcatgtgaaaaatgctgcatttttaataaactgatacatttgaacttc

SEQ ID NO: 158290 - DNA, 593 bp, Homo sapiens
  Payload ID: 10983
  Gene Symbol: NEIL1
  Gene Name: nei-like DNA glycosylase 1
  ENST ID: ENST00000569506
  CDS Start-End: 348-593
cgcgatcctaagaccctttcagatggtgggagagcctggagaaagagacagcgtgtgcggagggggtgctccctcagatggggggtcaggaagtctccctcaagtgtctgggacagagggacagcaggggccaaggcggagatgagatccgtgagtgaggggagccgggaagaagtaaggctgcagccgcggccccgcaaggattgggactttcgtctaaacgcggtggaagcccatggaaggaagcggttagcagcaaggcagagtcctgctccctctgcagccccagctcccagcgccctgggctttccaggcacctgtccgggactctgccaccctccctcaggatgcctgagggccccgagctgcacctggccagccagtttgtgaatgaggcctgcagggcgctggtgttcggcggctgcgtggagaagtcctctgtcagccgcaaccctgaggtgccctttgagagcagtgcctaccgcatctcagcttcagcccgcggcaaggagctgcgcctgatactgagccctctgcctggggcccagccccaacaggagccactggccctggtcttccgcttcggcatgtcc

SEQ ID NO: 158291 - DNA, 584 bp, Homo sapiens
  Payload ID: 10983
  Gene Symbol: NEIL1
  Gene Name: nei-like DNA glycosylase 1
  ENST ID: ENST00000566752
  CDS Start-End: 392-584
gtactggcggttccttccgccggacacgtcgggtttcctcgtttttgcggactggcgctttctgatttcagagactctccgcaacagaaccatctcaagtctgactgttcgttggtgcttaagatccccaccgggtccctagggcctgtgcgtaccgcgcacctgtgcacgtcctgcgcgcagctgcaggcgactccgctctggctcgtcgctgctgtttcctgctgggggtgccgaccctgtcccacgctagctgggtgacttcccccaaccgcagagacagcggcgacccggggcctcagacctgcccccgcatctcgccggcgccaggcagtgggaagtcaggttcttccgccacctcccagccaggactctgccaccctccctcaggatgcctgagggccccgagctgcacctggccagccagtttgtgaatgaggcctgcagggcgctggtgttcggcggctgcgtggagaagtcctctgtcagccgcaaccctgaggtgccctttgagagcagtgcctaccgcatctcagcttcagcccgcggcaaggagctgcgcctgatactgagccctctgcctg

SEQ ID NO: 158292 - DNA, 2671 bp, Homo sapiens
  Payload ID: 10984
  Gene Symbol: NEIL2
  Gene Name: nei-like DNA glycosylase 2
  Uniprot ID: Q969S2
  ENST ID: ENST00000284503
  CDS Start-End: 600-1598
gcgggctgcgtagcggtgctgggtcgggccgacgtgccacccacccggagccggtgagtgcagccgcccgccctccggtagatctgcggcctggcggagaagtcgggaggggacaggaagggagggcgggccccgggccctcctccgtctcagccgcctgcggaggtgctgcccacgcctggaggcccccactgaccctcagacccgcgtctgcgcccctctccccgcaccccgaggcagagttgggaaagcagtggtcttagaccccccacctcgggcactcggaagagaacggcggagacaacccctcctcttccctggctggcgcagcgccagcctcgagctcctcggtagcccccgggcagggagggccggagggtgggcgcggcatcttcagcgactcttcgaagtcccttccgcgtctcatctttcaaggctgttgcagaggcggcttgcttcccacctgtccatctccataaaaatccctaaacgaaacatgcccacgtgtccggagattttcaggacttggtgcatttcagatgaaggcttttccagaagcttccccgtagaagaggatcaggcatccaactggttaagggatgccagaagggccgttggtgaggaaatttcaccatttggtctccccctttgtgggtcagcaggtggtcaagacagggggcagcagtaagaagctacagcccgccagcctgcagtctctgtggctccaggacacccaggtccatggaaagaaattattccttagatttgatctagatgaagaaatggggccccctggcagcagcccaacaccagagcctccacaaaaagaagtgcagaaggaaggggctgcggacccaaagcaggtcggggagcccagcgggcagaagacccttgatggatcctcacggtctgcagagctcgtcccccagggcgaggatgattctgagtatttggagagagacgcccctgcaggagatgctgggaggtggctgcgtgtcagctttggtttgtttggcagcgtttgggtgaacgatttctccagagccaagaaagccaacaagaggggggactggagggacccttccccgaggttggtcctgcactttggtggtggtggcttcctggcattttataattgtcagttgtcttggagctcttccccagtggtcacacccacctgtgacatcctgtctgagaagttccatcgaggacaagccttagaagctctaggccaggctcagcctgtctgctatacactgctggaccagagatacttctcagggctagggaacatcattaagaatgaagccttgtacagagctgggatccatcccctttctctcggttcagtcctgagtgcctcgcgtcgggaggtcctggtggatcacgtggtggagttcagtacagcctggctgcagggcaagttccaaggcagaccgcagcacacacaggtctaccagaaagaacagtgccctgctggccaccaggtcatgaaggaggcgtttgggcccgaagatgggttacagaggctcacctggtggtgcccgcagtgccagccccagttgtcagaggagccagagcagtgccagttctcctaaggagctggtggtgctcctcacggaaccttgccgcttggggaacctgacgtctaagtgtccagaaaggaggatgtgggcagggacggggtacagaggatagtgtgggtcagaggtgccagtagtataatattcgtctccctggagttatgttgaaggcagagttttcatagggttagattttttttatccttttctagttcagttaattcatcctgttgaattgcaccatcgtgaaagatgggaaaaatcgtgatgatgggtaaggggaaaacttcccggaaggcaatggggcaaggaaaaagaaagcctatgggaaatggctgtgctcccaacatagctttgcagatgatgtgggttttttttttttttttggttgtttgttttgagagagagtcttgctctgtctccctggctagggtgtggtggtgtgatcttggctcacggcagccttgccctccctggctcaagcagtcttcatctcagcctccagagtagctgggactacaggcatgtgatatgatgctcggctgatttttgtttactttttagagagatggggtcttgccatatttgccaggctggtttgaactcctacaactcaagcattcctcccaccttggtctcccaaaatgttgggaccacgggtgtgagccaccgcgcccagctagctcctgtgttttgtttttgttttgtaactttggttgatgttaaggccctccattttggaaagcaggaaaacaggatttttttttttttatcttgttccctggaggatccagggatgaggatagagtggcctgagagcagtgcttggattcagcctcctgctgggtccttctgctggatacaggcaccaagaggcggtcgtggagcagggagctgcgccttcctggggtgcccggtggtgtgtagagaaaagctgcttgtttactccttaagtcaatgtattggtgactgttgatttgttgaacaattcaggaatcaagggctgtggagaaactccctcatgttgttggcaacaggtgaatgaacctagagcggtgacatgaaaataaagctcactgttactcgct

SEQ ID NO: 158293 - DNA, 2016 bp, Homo sapiens
  Payload ID: 10984
  Gene Symbol: NEIL2
  Gene Name: nei-like DNA glycosylase 2
  Uniprot ID: Q969S2
  ENST ID: ENST00000403422
  CDS Start-End: 129-944
gaaatctccgcccccagctggagcggctgtgcgggctgcgtagcggtgctgggtcgggccgacgtgccacccacccggagccggtccatggaaagaaattattccttagatttgatctagatgaagaaatggggccccctggcagcagcccaacaccagagcctccacaaaaagaagtgcagaaggaaggggctgcggacccaaagcaggtcggggagcccagcgggcagaagacccttgatggatcctcacggtctgcagagctcgtcccccagggcgaggatgattctgagtatttggagagagacgcccctgcaggagatgctgggaggtggctgcgtgtcagctttggtttgtttggcagcgtttgggtgaacgatttctccagagccaagaaagccaacaagaggggggactggagggacccttccccgaggttggtcctgcactttggtggtggtggcttcctggcattttataattgtcagttgtcttggagctcttccccagtggtcacacccacctgtgacatcctgtctgagaagttccatcgaggacaagccttagaagctctaggccaggctcagcctgtctgctatacactgctggaccagagatacttctcagggctagggaacatcattaagaatgaagccttgtacagagctgggatccatcccctttctctcggttcagtcctgagtgcctcgcgtcgggaggtcctggtggatcacgtggtggagttcagtacagcctggctgcagggcaagttccaaggcagaccgcagcacacacaggtctaccagaaagaacagtgccctgctggccaccaggtcatgaaggaggcgtttgggcccgaagatgggttacagaggctcacctggtggtgcccgcagtgccagccccagttgtcagaggagccagagcagtgccagttctcctaaggagctggtggtgctcctcacggaaccttgccgcttggggaacctgacgtctaagtgtccagaaaggaggatgtgggcagggacggggtacagaggatagtgtgggtcagaggtgccagtagtataatattcgtctccctggagttatgttgaaggcagagttttcatagggttagattttttttatccttttctagttcagttaattcatcctgttgaattgcaccatcgtgaaagatgggaaaaatcgtgatgatgggtaaggggaaaacttcccggaaggcaatggggcaaggaaaaagaaagcctatgggaaatggctgtgctcccaacatagctttgcagatgatgtgggttttttttttttttttggttgtttgttttgagagagagtcttgctctgtctccctggctagggtgtggtggtgtgatcttggctcacggcagccttgccctccctggctcaagcagtcttcatctcagcctccagagtagctgggactacaggcatgtgatatgatgctcggctgatttttgtttactttttagagagatggggtcttgccatatttgccaggctggtttgaactcctacaactcaagcattcctcccaccttggtctcccaaaatgttgggaccacgggtgtgagccaccgcgcccagctagctcctgtgttttgtttttgttttgtaactttggttgatgttaaggccctccattttggaaagcaggaaaacaggatttttttttttttatcttgttccctggaggatccagggatgaggatagagtggcctgagagcagtgcttggattcagcctcctgctgggtccttctgctggatacaggcaccaagaggcggtcgtggagcagggagctgcgccttcctggggtgcccggtggtgtgtagagaaaagctgcttgtttactccttaagtcaatgtattggtgactgttgatttgttgaacaattcaggaatcaagggctgtggagaaactccctcatgttgttggcaacaggtgaatgaacctagagcggtgacatgaaaataaagctcactgttactcgc

SEQ ID NO: 158294 - DNA, 2226 bp, Homo sapiens
  Payload ID: 10984
  Gene Symbol: NEIL2
  Gene Name: nei-like DNA glycosylase 2
  Uniprot ID: Q969S2
  ENST ID: ENST00000436750
  CDS Start-End: 156-1154
ggagccccgcagcctccacctacaggggcgtcccctaaggggacggaggccgcatgggccgccgagccgggaaatctccgcccccagctggagcggctgtgcgggctgcgtagcggtgctgggtcgggccgacgtgccacccacccggagccgggatgccagaagggccgttggtgaggaaatttcaccatttggtctccccctttgtgggtcagcaggtggtcaagacagggggcagcagtaagaagctacagcccgccagcctgcagtctctgtggctccaggacacccaggtccatggaaagaaattattccttagatttgatctagatgaagaaatggggccccctggcagcagcccaacaccagagcctccacaaaaagaagtgcagaaggaaggggctgcggacccaaagcaggtcggggagcccagcgggcagaagacccttgatggatcctcacggtctgcagagctcgtcccccagggcgaggatgattctgagtatttggagagagacgcccctgcaggagatgctgggaggtggctgcgtgtcagctttggtttgtttggcagcgtttgggtgaacgatttctccagagccaagaaagccaacaagaggggggactggagggacccttccccgaggttggtcctgcactttggtggtggtggcttcctggcattttataattgtcagttgtcttggagctcttccccagtggtcacacccacctgtgacatcctgtctgagaagttccatcgaggacaagccttagaagctctaggccaggctcagcctgtctgctatacactgctggaccagagatacttctcagggctagggaacatcattaagaatgaagccttgtacagagctgggatccatcccctttctctcggttcagtcctgagtgcctcgcgtcgggaggtcctggtggatcacgtggtggagttcagtacagcctggctgcagggcaagttccaaggcagaccgcagcacacacaggtctaccagaaagaacagtgccctgctggccaccaggtcatgaaggaggcgtttgggcccgaagatgggttacagaggctcacctggtggtgcccgcagtgccagccccagttgtcagaggagccagagcagtgccagttctcctaaggagctggtggtgctcctcacggaaccttgccgcttggggaacctgacgtctaagtgtccagaaaggaggatgtgggcagggacggggtacagaggatagtgtgggtcagaggtgccagtagtataatattcgtctccctggagttatgttgaaggcagagttttcatagggttagattttttttatccttttctagttcagttaattcatcctgttgaattgcaccatcgtgaaagatgggaaaaatcgtgatgatgggtaaggggaaaacttcccggaaggcaatggggcaaggaaaaagaaagcctatgggaaatggctgtgctcccaacatagctttgcagatgatgtgggttttttttttttttttggttgtttgttttgagagagagtcttgctctgtctccctggctagggtgtggtggtgtgatcttggctcacggcagccttgccctccctggctcaagcagtcttcatctcagcctccagagtagctgggactacaggcatgtgatatgatgctcggctgatttttgtttactttttagagagatggggtcttgccatatttgccaggctggtttgaactcctacaactcaagcattcctcccaccttggtctcccaaaatgttgggaccacgggtgtgagccaccgcgcccagctagctcctgtgttttgtttttgttttgtaactttggttgatgttaaggccctccattttggaaagcaggaaaacaggatttttttttttttatcttgttccctggaggatccagggatgaggatagagtggcctgagagcagtgcttggattcagcctcctgctgggtccttctgctggatacaggcaccaagaggcggtcgtggagcagggagctgcgccttcctggggtgcccggtggtgtgtagagaaaagctgcttgtttactccttaagtcaatgtattggtgactgttgatttgttgaacaattcaggaatcaagggctgtggagaaactccctcatgttgttggcaacaggtgaatgaacctagagcggtgacatgaaaataaagctcactgttactcgc

SEQ ID NO: 158295 - DNA, 2323 bp, Homo sapiens
  Payload ID: 10984
  Gene Symbol: NEIL2
  Gene Name: nei-like DNA glycosylase 2
  Uniprot ID: Q969S2
  ENST ID: ENST00000455213
  CDS Start-End: 258-1256
gccgagccgggaaatctccgcccccagctggagcggctgtgcgggctgcgtagcggtgctgggtcgggccgacgtgccacccacccggagccggctgttgcagaggcggcttgcttcccacctgtccatctccataaaaatccctaaacgaaacatgcccacgtgtccggagattttcaggacttggtgcatttcagatgaaggcttttccagaagcttccccgtagaagaggatcaggcatccaactggttaagggatgccagaagggccgttggtgaggaaatttcaccatttggtctccccctttgtgggtcagcaggtggtcaagacagggggcagcagtaagaagctacagcccgccagcctgcagtctctgtggctccaggacacccaggtccatggaaagaaattattccttagatttgatctagatgaagaaatggggccccctggcagcagcccaacaccagagcctccacaaaaagaagtgcagaaggaaggggctgcggacccaaagcaggtcggggagcccagcgggcagaagacccttgatggatcctcacggtctgcagagctcgtcccccagggcgaggatgattctgagtatttggagagagacgcccctgcaggagatgctgggaggtggctgcgtgtcagctttggtttgtttggcagcgtttgggtgaacgatttctccagagccaagaaagccaacaagaggggggactggagggacccttccccgaggttggtcctgcactttggtggtggtggcttcctggcattttataattgtcagttgtcttggagctcttccccagtggtcacacccacctgtgacatcctgtctgagaagttccatcgaggacaagccttagaagctctaggccaggctcagcctgtctgctatacactgctggaccagagatacttctcagggctagggaacatcattaagaatgaagccttgtacagagctgggatccatcccctttctctcggttcagtcctgagtgcctcgcgtcgggaggtcctggtggatcacgtggtggagttcagtacagcctggctgcagggcaagttccaaggcagaccgcagcacacacaggtctaccagaaagaacagtgccctgctggccaccaggtcatgaaggaggcgtttgggcccgaagatgggttacagaggctcacctggtggtgcccgcagtgccagccccagttgtcagaggagccagagcagtgccagttctcctaaggagctggtggtgctcctcacggaaccttgccgcttggggaacctgacgtctaagtgtccagaaaggaggatgtgggcagggacggggtacagaggatagtgtgggtcagaggtgccagtagtataatattcgtctccctggagttatgttgaaggcagagttttcatagggttagattttttttatccttttctagttcagttaattcatcctgttgaattgcaccatcgtgaaagatgggaaaaatcgtgatgatgggtaaggggaaaacttcccggaaggcaatggggcaaggaaaaagaaagcctatgggaaatggctgtgctcccaacatagctttgcagatgatgtgggttttttttttttttttggttgtttgttttgagagagagtcttgctctgtctccctggctagggtgtggtggtgtgatcttggctcacggcagccttgccctccctggctcaagcagtcttcatctcagcctccagagtagctgggactacaggcatgtgatatgatgctcggctgatttttgtttactttttagagagatggggtcttgccatatttgccaggctggtttgaactcctacaactcaagcattcctcccaccttggtctcccaaaatgttgggaccacgggtgtgagccaccgcgcccagctagctcctgtgttttgtttttgttttgtaactttggttgatgttaaggccctccattttggaaagcaggaaaacaggatttttttttttttatcttgttccctggaggatccagggatgaggatagagtggcctgagagcagtgcttggattcagcctcctgctgggtccttctgctggatacaggcaccaagaggcggtcgtggagcagggagctgcgccttcctggggtgcccggtggtgtgtagagaaaagctgcttgtttactccttaagtcaatgtattggtgactgttgatttgttgaacaattcaggaatcaagggctgtggagaaactccctcatgttgttggcaacaggtgaatgaacctagagcggtgacatgaaaataaagctcactgtta

SEQ ID NO: 158296 - DNA, 998 bp, Homo sapiens
  Payload ID: 10984
  Gene Symbol: NEIL2
  Gene Name: nei-like DNA glycosylase 2
  Uniprot ID: Q969S2
  ENST ID: ENST00000528323
  CDS Start-End: 247-897
aaatctccgcccccagctggagcggctgtgcgggctgcgtagcggtgctgggtcgggccgacgtgccacccacccggagccggctgttgcagaggcggcttgcttcccacctgtccatctccataaaaatccctaaacgaaacatgcccacgtgtccggagattttcaggacttggtgcatttcagatgaaggcttttccagaagcttccccgtagaagaggatcaggcatccaactggttaagggatgccagaagggccgttggtgaggaaatttcaccatttggtctccccctttgtgggtcagcaggtggtcaagacagggggcagcagtaagaagctacagcccgccagcctgcagtctctgtggctccaggacacccaggtgaggttggtcctgcactttggtggtggtggcttcctggcattttataattgtcagttgtcttggagctcttccccagtggtcacacccacctgtgacatcctgtctgagaagttccatcgaggacaagccttagaagctctaggccaggctcagcctgtctgctatacactgctggaccagagatacttctcagggctagggaacatcattaagaatgaagccttgtacagagctgggatccatcccctttctctcggttcagtcctgagtgcctcgcgtcgggaggtcctggtggatcacgtggtggagttcagtacagcctggctgcagggcaagttccaaggcagaccgcagcacacacaggtctaccagaaagaacagtgccctgctggccaccaggtcatgaaggaggcgtttgggcccgaagatgggttacagaggctcacctggtggtgcccgcagtgccagccccagttgtcagaggagccagagcagtgccagttctcctaaggagctggtggtgctcctcacggaaccttgccgcttggggaacctgacgtctaagtgtccagaaaggaggatgtgggcagggacggggtacagaggatagt

SEQ ID NO: 158297 - DNA, 554 bp, Homo sapiens
  Payload ID: 10984
  Gene Symbol: NEIL2
  Gene Name: nei-like DNA glycosylase 2
  ENST ID: ENST00000528113
  CDS Start-End: 85-267
aaatctccgcccccagctggagcggctgtgcgggctgcgtagcggtgctgggtcgggccgacgtgccacccacccggagccgggatgccagaagggccgttggtgaggaaatttcaccatttggtctccccctttgtgggtcagcaggtggtcaagacagggggcagcagtaagaagctacagcccgccagcctgcagtctctgtggctccaggacacccaggttggtcctgcactttggtggtggtggcttcctggcattttataattgtcagttgtcttggagctcttccccagtggtcacacccacctgtgacatcctgtctgagaagttccatcgaggacaagccttagaagctctaggccaggctcagcctgtctgctatacactgctggaccagagatacttctcagggctagggaacatcattaagaatgaagccttgtacagagctgggatccatcccctttctctcggttcagtcctgagtgcctcgcgtcgggaggtcctggtggatcacgtggtggagttcagtacagcctggctgcagggca

SEQ ID NO: 158298 - DNA, 2408 bp, Homo sapiens
  Payload ID: 10985
  Gene Symbol: NEIL3
  Gene Name: nei-like DNA glycosylase 3
  Uniprot ID: Q8TAT5
  ENST ID: ENST00000264596
  CDS Start-End: 119-1936
agacgcgcgcgagatttgaatttcctctgcgtgcggtcagtgcccgcgcagcgttgagttgcacagcggtattctcaccaggccctgcaatcggtgggccacagtgccggccacagagatggtggaaggaccaggctgtactctgaatggagagaagattcgcgcgcgggtgctcccgggccaggcggtgaccggcgtgcggggaagcgctctgcggagtctgcagggccgcgccttgcggctcgcagcctccacggttgtggtctccccgcaggctgctgcactgaataatgattccagccagaatgtcttgagcctgtttaatggatatgtttacagtggcgtggaaactttggggaaggagctctttatgtactttggaccaaaagctttacggattcatttcggaatgaaaggcttcatcatgattaatccacttgagtataaatataaaaatggagcttctcctgttttggaagtgcagctcaccaaagatttgatttgtttctttgactcatcagtagaactcagaaactcaatggaaagccaacagagaataagaatgatgaaagaattagatgtatgttcacctgaatttagtttcttgagagcagaaagtgaagttaaaaaacagaaaggccggatgctaggtgatgtgctaatggatcagaacgtattgcctggagtagggaacatcatcaaaaatgaagctctctttgacagtggtctccacccagctgttaaagtttgtcaattaacagatgaacagatccatcacctcatgaaaatgatacgtgatttcagcattctcttttacaggtgccgtaaagcaggacttgctctctctaaacactataaggtttacaagcgtcctaattgtggtcagtgccactgcagaataactgtgtgccgctttggggacaataacagaatgacatatttctgtcctcactgtcaaaaagaaaatcctcaacatgttgacatatgcaagctaccgactagaaatactataatcagttggacatctagcagggtggatcatgttatggactccgtggctcggaagtcggaagagcactggacctgtgtggtgtgtactttaatcaataagccctcttctaaggcatgtgatgcttgcttgacctcaaggcctattgattcagtgctcaagagtgaagaaaattctactgtctttagccacttaatgaagtacccgtgtaatacttttggaaaacctcatacagaagtcaagatcaacagaaaaactgcatttggaactacaactcttgtcttgactgattttagcaataaatccagtactttggaaagaaaaacaaagcaaaaccagatactagatgaggagtttcaaaactctcctcctgctagtgtttgtttgaatgatatacagcacccctccaagaagacaacaaacgatataactcaaccatccagcaaagtaaacatatcacctacaatcagttcagaatctaaattatttagtccagcacataaaaaaccgaaaacagcccaatactcatcaccagagcttaaaagctgcaaccctggatattctaacagtgaacttcaaattaatatgacagatggccctcgtaccttaaatcctgacagccctcgctgcagtaaacacaaccgcctctgcattctccgagttgtggggaaggatggggaaaacaagggcaggcagttttatgcctgtcctctacctagagaagcacaatgtggattttttgaatgggcagatttgtccttcccattctgcaaccatggcaagcgttccaccatgaaaacagtattgaagattggacctaacaatggaaagaatttttttgtgtgtcctcttgggaaggaaaaacaatgcaattttttccagtgggcagaaaatgggccaggaataaaaattattcctggatgctaatatctgtagattctctggcatttagtctcttcaaactgtgtataatgtttggtcctcctctgtttcatagaaaagtcatagaatatctatgatacattgaaaagttactgcaatatttgagaactgttctttttttttcttgtgtgtgccatctttccattgttggctacgtcttttcttttgccttgatgaacgttctatgtatttcatcggatatacagcatattccatttaggatgtgtatttaatgcatttagtaatgacgataaagtgtttttagtatgcttttagtctcttgtaactggggagaagcagtgttttttttttaggaaaggattatgcgacacaataaaataagatattctgtctgtagtgaatacatttctcatgtactaacactatttataatatatgattaaagatatttcttgttttattaaataataagaaataagatctcctttatgaacaa

SEQ ID NO: 158299 - DNA, 1528 bp, Homo sapiens
  Payload ID: 10985
  Gene Symbol: NEIL3
  Gene Name: nei-like DNA glycosylase 3
  ENST ID: ENST00000513321
  CDS Start-End: 52-243
ggtattctcaccaggccctgcaatcggtgggccacagtgccggccacagagatggtggaaggaccaggctgtactctgaatggagagaagattcgcgcgcgggtgctcccgggccaggcggtgaccggcgtgcggggaagcgctctgcggagtctgcagggccgcgccttgcggctcgcagcctccacggttgtggtctccccgcaggattcatttcggaatgaaaggcttcatcatgattaatccacttgagtataaatataaaaatggagcttctcctgttttggaagtgcagctcaccaaagatttgatttgtttctttgactcatcagtagaactcagaaactcaatggaaagccaacagagaataagaatgatgaaagaattagatgtatgttcacctgaatttagtttcttgagagcagaaagtgaagttaaaaaacagaaaggccggatgctaggtgatgtgctaatggatcagaacgtattgcctggagtagggaacatcatcaaaaatgaagctctctttgacagtggtctccacccagctgttaaaattcagtgctcaagagtgaagaaaattctactgtctttagccacttaatgaagtacccgtgtaatacttttggaaaacctcatacagaagtcaagatcaacagaaaaactgcatttggaactacaactcttgtcttgactgattttagcaataaatccagtactttggaaagaaaaacaaagcaaaaccagatactagatgaggagtttcaaaactctcctcctgctagtgtttgtttgaatgatatacagcacccctccaagaagacaacaaacgatataactcaaccatccagcaaagtaaacatatcacctacaatcagttcagaatctaaattatttagtccagcacataaaaaaccgaaaacagcccaatactcatcaccagagcttaaaagctgcaaccctggatattctaacaggtatgatgcttttaaccttggtctttaagataattgcttttttttttttttttttaagacgaggtctcactctgtcacctaggctacagtgcagtggtgtgatctcagctcactgcaacctctgcctcccgcgttcaagcgattctcctgcctcagcctcccaagtagctgagattacaggcacatgccatcaggcccgactaatttttgtattttcagtagagacggggtttcaccatgttggccaggctggtctcaatctcctgatctcaagttatctgcccacctccgcctctcaaggtgctgggatttacaggcttgagccaccatgcccggctggttgcattaagttttaagaagacagaaattgtcccttggtaaggaagttgaattacttttggtaacatgaatcaaaccctaaaagactattatagtagtctgtctcccttcccttctctagattataatgttagagaagggaaggaaatgaaaaacgtaatttcctacatgtatgaaaagttgggttttttttttttctgacaataaccata

SEQ ID NO: 158300 - DNA, 4047 bp, Homo sapiens
  Payload ID: 10986
  Gene Symbol: NLK
  Gene Name: nemo-like kinase
  Uniprot ID: Q9UBE8
  ENST ID: ENST00000407008
  CDS Start-End: 719-2302
ccccggctctctttctcctctctgtcctgctgtcgcctcctctcctcactccagcctccttccctggcttattctgcccaggaaagtttggaacccccgccccccctccccaatcaggtcaacctgactaggagtagggggagatgtaggaaggcctgagagttcggggggggggaagctggaagctggtttcccagaaaatttccccccatcttctccatttagggtggtgggaattttttttaatcctgtttttgaggaggtggtaggtgtttagaaaaggatgtgggaatggaaggggtagatgagtcaaccctctttcaagattccaagggtggtgtgttacctgatccttttcgtgtgtggagttcagggggtcgggaggtttggcctttattcccacattcaaagttggaacctcccccaaattaagaatggagttttagtacccacttgtggcaggaatcctggggggaaggggtccttttttcctttttcttttcttttttcccttttttttccttttggcaacccacacccttccacacacgctcaccccaaaattaaacaccaagatcctctaacttgtttggattgactgatgaagacataaagctctatgttttttgaggtggagtgagtggtttttcttcatttttaaatggccaaatgacagcttgacccagtttgctttccaatcaaagggcatttattttgaatgtctctttgtggcgcaagagccaacgcaaaaatgatggcggcttacaatggcggtacatctgcagcagcagcaggtcaccaccaccaccatcaccaccaccttccacacctccctcctcctcacctgcaccaccaccaccaccctcaacaccatcttcatccggggtcggctgccgctgtacaccctgtacagcagcacacctcttcggcagctgcggcagccgcagcagcggctgcagctgcagccatgttaaaccctgggcaacaacagccatatttcccatcaccggcaccggggcaggctcctggaccagctgcagcagccccagctcaggtacaggctgccgcagctgctacagttaaggcgcaccatcatcagcactcgcatcatccacagcagcagctggatattgagccggatagacctattggatatggagcctttggtgttgtctggtcagtaacagatccaagagatggaaagagagtagcgctcaaaaagatgcccaacgtcttccagaatctggtctcttgcaaaagggtcttccgggaattgaagatgttgtgtttttttaagcatgataatgtactctctgcccttgacatactccaacctccacacattgactattttgaagaaatatatgttgtcacagaattgatgcagagtgacctacataaaattatcgtctctcctcaaccactcagctcagatcatgtcaaagtttttctttatcagattttgcgaggtttgaaatatctccattcagctggcattttacatcgagacattaagccagggaatctccttgtgaacagcaactgtgttctaaagatttgtgattttggattggccagagtggaagaattagatgaatcccgtcatatgactcaggaagttgttactcagtattatcgggctccagaaatcctgatgggcagccgtcattacagcaatgctattgacatctggtctgtgggatgtatctttgcagaactactaggacgaagaatattgtttcaggcacagagtcccattcagcagttggatttgatcacggatctgttgggcacaccatcactggaagcaatgaggacagcttgtgaaggcgctaaggcacatatactcaggggtcctcataaacagccatctcttcctgtactctataccctgtctagccaggctacacatgaagctgttcatctcctttgcaggatgttggtctttgatccatccaaaagaatatccgctaaggatgccttagcccacccctacctagatgaagggcgactacgatatcacacatgtatgtgtaaatgttgcttttccacctccactggaagagtttataccagtgactttgagcctgtcaccaatcccaaatttgatgacactttcgagaagaacctcagttctgtccgacaggttaaagaaattattcatcagttcattttggaacagcagaaaggaaacagagtgcctctctgcatcaaccctcagtctgctgcttttaagagctttattagttccactgttgctcagccatctgagatgcccccatctcctctggtgtgggagtgatggtggaagataatgtactactgaagatgtaatgtagctttccactggagtctgggatttgcaattctggaggttaatcatgcttgtactgtaattttactaatgaagttttaaattaacaaccactacttgtatgatatgaataatatttagaaatgttactagacttttaatcttgtaaagtggttgtgcttttagaagaaaaatattttacccagagttgcacatgttttatgaatttagtgcagctgttatggctcacctcagaacaaaagagaattgaaccaaatttgggagtttggggttttatgttttgtttttcttttctaaaatgaagtgagattgttcacacacacacacacacacacacacacacacaaacacaaaggacagtcatacattttgatatttgagccattcctaaagatttggggttttctaaaactaaagaatctaggaaccttgcctgcgaccaatcatggagccacgtgagctgatcgtggctgcacctggggggagggtagggaggaggggcatgccacctaatgatcaagccctataattagcttctcattagagccgtgatggtgatgtgtgctgtctaaaatccaatgttgtgggtagagagaatgagtttgtgactaggagagactaaacttttgttttccttacccagtataaatatatatatatatatttaatctatttttattagaagtttttctgctctttcttacataaaagaaccccaagcatgcatctttcatgtgtgtaaataattcatttctgggctaatttcaaaagaatcccaatattgctgtatagaaagagaactagcttgcacattttaggtctgtgaaattttgtgagacttttcctgcactggacagtaaaaaaataataaaagacaaaaacaaatttaaaaaaaaatttaagccacaaaaaaaggcacatagggaattatgtcaaatgtgtttgtgtccttaggcaaagctgtgggagtcttgaaatgtcacagtagtaaataacttattactttttgacaagttctttttttctgttggaacactgaattcttctgtgcatatgtacatatgaatacaaatcgaaggcctctacctcctggagttatacaacttggcttgtttacctccacatgctgatgatgactattttttttttttgagttcagtgtggagacttgaaacttgaatgtcccttccaacttttatattaaaaataaaaagacaagaaaattgaagatcatttttcacctgtacaaggaatactaatggatcgtcttaaaattggtctaggaaaaaaccttggtgtgtgttatggacaattaactgttaaagttattgtaagttatctgtatttagcagagtattttcaacttgagtgatctgagctgaatttgaagactattaataagttatgtttggaagttttaacttcaatgaagtaattatttgctgtgaaagaaacaaacattgaattactaaacaaagatggtgcaatatctttgttttttttttatgaggctcctgagaatcaacccaactgaagcatttcaattcacttgaatgagaaacgtgtttagtatcaaaagagcccaagaagacactggtgtgaaaggtacaatctcagaggttggtcaattaccgtggcacactttctggtcactttgtacaatgtagatttgaagtacagtggtgaaaacattaaatgtgacatttgaaaaa

SEQ ID NO: 158301 - DNA, 1702 bp, Homo sapiens
  Payload ID: 10986
  Gene Symbol: NLK
  Gene Name: nemo-like kinase
  ENST ID: ENST00000496808
  CDS Start-End: 1-1428
cttcatccggggtcggctgccgctgtacaccctgtacagcagcacacctcttcggcagctgcggcagccgcagcagcggctgcagctgcagccatgttaaaccctgggcaacaacagccatatttcccatcaccggcaccggggcaggctcctggaccagctgcagcagccccagctcaggtacaggctgccgcagctgctacagttaaggcgcaccatcatcagcactcgcatcatccacagcagcagctggatattgagccggatagacctattggatatggagcctttggtgttgtctggtcagtaacagatccaagagatggaaagagagtagcgctcaaaaagatgcccaacgtcttccagaatctggtctcttgcaaaagggtcttccgggaattgaagatgttgtgtttttttaagcatgataatgtactctctgcccttgacatactccaacctccacacattgactattttgaagaaatatatgttgtcacagaattgatgcagagtgacctacataaaattatcgtctctcctcaaccactcagctcagatcatgtcaaagtttttctttatcagattttgcgaggtttgaaatatctccattcagctggcattttacatcgagacattaagccagggaatctccttgtgaacagcaactgtgttctaaagatttgtgattttggattggccagagtggaagaattagatgaatcccgtcatatgactcaggaagttgttactcagtattatcgggctccagaaatcctgatgggcagccgtcattacagcaatgctattgacatctggtctgtgggatgtatctttgcagaactactaggacgaagaatattgtttcaggcacagagtcccattcagcagttggatttgatcacggatctgttgggcacaccatcactggaagcaatgaggacagcttgtgaaggcgctaaggcacatatactcaggggtcctcataaacagccatctcttcctgtactctataccctgtctagccaggctacacatgaagctgttcatctcctttgcaggatgttggtctttgatccatccaaaagaatatccgctaaggatgccttagcccacccctacctagatgaagggcgactacgatatcacacatgtatgtgtaaatgttgcttttccacctccactggaagagtttataccagtgactttgagcctgtcaccaatcccaaatttgatgacactttcgagaagaacctcagttctgtccgacaggttaaagaaattattcatcagttcattttggaacagcagaaaggaaacagagtgcctctctgcatcaaccctcagtctgctgcttttaagagctttattagttccactgttgctcagccatctgagatgcccccatctcctctggtgtgggagtgatggtggaagataatgtactactgaagatgtaatgtagctttccactggagtctgggatttgcaattctggaggctcctgagaatcaacccaactgaagcatttcaattcacttgaatgagaaacgtgtttagtatcaaaagagcccaagaagacactggtgtgaaaggtacaatctcagaggttggtcaattaccgtggcacactttctggtcactttgtacaatgtagatttgaagtacagtggtgaaaacattaaatgtgacatttgaaaaa

SEQ ID NO: 158302 - DNA, 1503 bp, Homo sapiens
  Payload ID: 10986
  Gene Symbol: NLK
  Gene Name: nemo-like kinase
  ENST ID: ENST00000582037
  CDS Start-End: 36-581
cagtttgctttccaatcaaagggcatttattttgaatgtctctttgtggcgcaagagccaacgcaaaaatgatggcggcttacaatggcggtacatctgcagcagcagcaggtcaccaccaccaccatcaccaccaccttccacacctccctcctcctcacctgcaccaccaccaccaccctcaacaccatcttcatccggggtcggctgccgctgtacaccctgtacagcagcacacctcttcggcagctgcggcagccgcagcagcggctgcagctgcagccatgttaaaccctgggcaacaacagccatatttcccatcaccggcaccggggcaggctcctggaccagctgcagcagccccagctcaggtacaggctgccgcagctgctacagttaaggcgcaccatcatcagcactcgcatcatccacagcagcagctggatattgagccggatagacctattggatatggagcctttggtgttgtctggttgagaatctgtagtactgagaagtttctccactatcagccgagattaacagccacagctggattctttgggggctctgctttgtgaaaagagctttgaagaagcagagcctgcaccataaaaaggaaacggttgctcttctagacataacaaagcatccgtatgaaactagaaatgtggaaatctgtattgttaattttaactacaaacgaacttacttttggaaattacaggttcatgatcataaagtagataaagagtagagaataaaagtaacaatctgatgattctgcacccacttcttggtggttgaaactccatagcctataacgttgcaagtcattttgtacttagactcctgaaaagattatccaaattatgttcaaaaaaccacagcacaaaaaataaacttgttttattcttggggagaaatttcatgttatactgtccaatattaatttagaaaaaaagacagtttttttttttaaggcatttcagaaacattgccctttcaagcaagttagaacaatatccctcaacattaaataccatctttttagccatcagtaccactgggcatgtgtcataaaagagaaatgggggcagatatagctccctttcatatgctataccagaacaaaaatttgtaaaatgcataagtgcattaactgaatatgtttgaatttaaattctgggtttttaccttcaaagcacaggcagctgtagatacaaaaagtcctctaatggagtactggaatgtttcattgtcttcacaacttggagtgtcagagttttctctgccttctatattgtaaaactgagtgactattcttggtcgtttttattagatttattgatgtccaagcaatacaagaattaactgttcatatactgtatgtttccttaacatgcttatttggtttctttgatggagattgtcaaggccaaagaaactttttcatttgtcatccaaccaataaatggacagaagctgttagaagctctttaa

SEQ ID NO: 158303 - DNA, 7088 bp, Homo sapiens
  Payload ID: 10987
  Gene Symbol: NEO1
  Gene Name: neogenin 1
  Uniprot ID: Q92859
  ENST ID: ENST00000261908
  CDS Start-End: 193-4578
gagggaggcgccctggagtctcccctccagcgagaggggctgcgcgggccgggccgggccgggctgggctggagcagcggcggccgcgggagccgagcttgcagcgagggaccggctgaggcgcgcgggagggaaggaggcaagggctccgcggcgctgtcgccgccgctgccgctcactctcggggaagagatggcggcggagcggggagcccggcgactcctcagcaccccctccttctggctctactgcctgctgctgctcgggcgccgggcgccgggcgccgcggccgccaggagcggctccgcgccgcagtccccaggagccagcattcgaacgttcactccattttattttctggtggagccggtggatacactctcagttagaggctcttctgttatattaaactgttcagcatattctgagccttctccaaaaattgaatggaaaaaagatggaacttttttaaacttagtatcagatgatcgacgccagcttctcccggatggatctttatttatcagcaatgtggtgcattccaaacacaataaacctgatgaaggttattatcagtgtgtggccactgttgagagtcttggaactattatcagtagaacagcgaagctcatagtagcaggtcttccaagatttaccagccaaccagaaccttcctcagtttatgctgggaacaatgcaattctgaattgtgaagttaatgcagatttggtcccatttgtgaggtgggaacagaacagacaaccccttcttctggatgatagagttatcaaacttccaagtggaatgctggttatcagcaatgcaactgaaggagatggcgggctttatcgctgcgtagtggaaagtggtgggccaccaaagtatagtgatgaagttgaattgaaggttcttccagatcctgaggtgatatcagacttggtatttttgaaacagccttctcccttagtcagagtcattggtcaggatgtagtgttgccatgtgttgcttcaggacttcctactccaaccattaaatggatgaaaaatgaggaggcacttgacacagaaagctctgaaagattggtattgctggcaggtggtagcctggagatcagtgatgttactgaggatgatgctgggacttatttttgtatagctgataatggaaatgagacaattgaagctcaagcagagcttacagtgcaagctcaacctgaattcctgaagcagcctactaatatatatgctcacgaatctatggatattgtatttgaatgtgaagtgactggaaaaccaactccaactgtgaagtgggtcaaaaatggggatatggttatcccaagtgattattttaagattgtaaaggaacataatcttcaagttttgggtctggtgaaatcagatgaagggttctatcagtgcattgctgaaaatgatgttggaaatgcacaagctggagcccaactgataatccttgaacatgcaccagccacaacgggaccactgccttcagctcctcgggatgtcgtggcctccctggtctctacccgcttcatcaaattgacgtggcggacacctgcatcagatcctcacggagacaaccttacctactctgtgttctacaccaaggaagggattgctagggaacgtgttgagaataccagtcacccaggagagatgcaagtaaccattcaaaacctaatgccagcgaccgtgtacatctttagagttatggctcaaaataagcatggctcaggagagagttcagctccactgcgagtagaaacacaacctgaggttcagctccctggcccagcacctaaccttcgtgcatatgcagcttcgcctacctccatcactgttacgtgggaaacaccagtgtctggcaatggggaaattcagaattataaattgtactacatggaaaaggggactgataaagaacaggatgttgatgtttcaagtcactcttacaccattaatgggttgaaaaaatatacagagtatagtttccgagtggtggcctacaataaacatggtcctggagtttccacaccagatgttgctgttcgaacattgtcagatgttcccagtgctgctcctcagaatctgtccttggaagtgagaaattcaaagagtattatgattcactggcagccacctgctccagccacacaaaatgggcagattactggctacaagattcgctaccgaaaggcctcccgaaagagtgatgtcactgagaccttggtaagcgggacacagctgtctcagctgattgaaggtcttgatcgggggactgagtataatttccgagtggctgctctaacaatcaatggtacaggcccggcaactgactggctgtctgctgaaacttttgaaagtgacctagatgaaactcgtgttcctgaagtgcctagctctcttcacgtacgcccgctcgttactagcatcgtagtgagctggactcctccagagaatcagaacattgtggtcagaggttacgccattggttatggcattggcagccctcatgcccagaccatcaaagtggactataaacagcgctattacaccattgaaaatctggatcccagctctcactatgtgattaccctgaaagcatttaataacgtgggtgaaggcatccccctgtatgagagtgctgtgaccaggcctcacacagacacttctgaagttgatttatttgttattaatgctccatacactccagtgccagatcccactcccatgatgccaccagtgggagttcaggcttccattctgagtcatgacaccatcaggattacgtgggcagacaactcgctgcccaagcaccagaagattacagactcccgatactacaccgtccgatggaaaaccaacatcccagcaaacaccaagtacaagaatgcaaatgcaaccactttgagttatttggtgactggtttaaagccgaatacactctatgaattctctgtgatggtgaccaaaggtcgaagatcaagtacatggagtatgacagcccatgggaccacctttgaattagttccgacttctccacccaaggatgtgactgttgtgagtaaagaggggaaacctaagaccataattgtgaattggcagcctccctccgaagccaatggcaaaattacaggttacatcatatattacagtacagatgtgaatgcagagatacatgactgggttattgagcctgttgtgggaaacagactgactcaccagatacaagagttaactcttgacacaccatactacttcaaaatccaggcacggaactcaaagggcatgggacccatgtctgaagctgtccaattcagaacacctaaagcggactcctctgataaaatgcctaatgatcaagcctcagggtctggagggaaaggaagccggctgccagacctaggatccgactacaaacctccaatgagcggcagtaacagccctcatgggagccccacctctcctctggacagtaatatgctgctggtcataattgtttctgttggcgtcatcaccatcgtggtggttgtgattatcgctgtcttttgtacccgtcgtaccacctctcaccagaaaaagaaacgagctgcctgcaaatcagtgaatggctctcataagtacaaagggaattccaaagatgtgaaacctccagatctctggatccatcatgagagactggagctgaaacccattgataagtctccagacccaaaccccatcatgactgatactccaattcctcgcaactctcaagatatcacaccagttgacaactccatggacagcaatatccatcaaaggcgaaattcatacagagggcatgagtcagaggacagcatgtctacactggctggaaggcgaggaatgagaccaaaaatgatgatgccctttgactcccagccaccccagcctgtgattagtgcccatcccatccattccctcgataaccctcaccatcatttccactccagcagcctcgcttctccagctcgcagtcatctctaccacccgggcagcccatggcccattggcacatccatgtccctttcagacagggccaattccacagaatccgttcgaaatacccccagcactgacaccatgccagcctcttcgtctcaaacatgctgcactgatcaccaggaccctgaaggtgctaccagctcctcttacttggccagctcccaagaggaagattcaggccagagtcttcccactgcccatgttcgcccttcccacccattgaagagcttcgccgtgccagcaatcccgcctccaggacctcccacctatgatcctgcattgccaagcacaccattactgtcccagcaagctctgaaccatcacattcactcagtgaagacagcctccatcgggactctaggaaggagccggcctcctatgccagtggttgttcccagtgcccctgaagtgcaggagaccacaaggatgttggaagactccgagagtagctatgaaccagatgagctgaccaaagagatggcccacctggaaggactaatgaaggacctaaacgctatcacaacagcatgacgaccttcaccaggacctgacttcaaacctgagtctggaagtcttggaacttacccttgaaaacaaggaattgtacagagtacgagaggacagcacttgagaacacagaatgagccagcagactggccagcgcctctgtgtagggctggctccaggcatggccacctgccttcccctggtcagcctggaagaagcctgtgtcgaggcagcttccctttgcctgctgatattctgcaggactgggcaccatgggccaaaattttgtgtccagggaagaggcgagaagtgcaacctgcatttcactttgtggtcaggccgtgtctttgtgctgtgactgcatcacctttatggagtgtagacattggcatttatgtacaattttatttgtgtcttattttattttaccttcaaaaacaaaaacgccatccaaaaccaaggaagtccttggtgttctccacaagtggttgacatttgactgcttgttccaattatgtatggaaagtctttgacagtgtgggtcgttcctggggttggcttgttttttggtttcatttttattttttaattctgagtcattgcatcctctaccagctgttaatccatcactctgagggggaggaaatgttgcattgctgtttgtaagctttttttattatttttttattataattattaaaggcctgactctttcctctcatcactgtgagattacagatctatttgaattgaatgaaatgtaacattgaaaagacttgtttgttgctttctgtgcagtttcagtattggggcgggtggggggctgggggttggtaataggaaatggaggggctgctgaggtcctgtgaatgtttctgtcattgtactttcttccagaagcctgcagagaatggaagcatcttctttattgtcctttcctggcatgtccatccttattgtcactacgttgcaactggagtttgatttggatctggttttaaaattcttctgtgcaatagatgggtttgaggatttagcggccctgatgtcttggtcatagcctggtaagaatgtccatgctgaggagccagatgttgtatttctaactgcctgagtcacacagaatagggtaagagcctgaccccattctgtaaatcagaaagcaaggatggagaccctttcctgctgctattattggctctctttgaggaagttggaggttaaggaaggaacttgtttgtttccgtatacgactccttcttctctctagttcagtcttcagccagtccagcgctctcttccacacttcagagccccttcagagaaagcattagcaggaatgagacaaggcagagctgcagtgccccctgaggcttccacacatctttctgaatattatttttcaagtaacaagggcagggacagcggaaacagctgcccaccccccccatcccagcagctcagctaagccctgatgagaatgaagccacaggagttgtctgaggtgaacccagccgctcagccacacatggaagccattgcctttgcacatagttcttgggttctttttcctaaaaaggtaaggagctgaggtgtgtggttttttaatattaagaatatataatggaaaacacacgactgacgctcaggcatcttcccctactccccaacagatccccagaagacagcgtggaaggcagtgtagacagtaaatcgggcttcagttctatagccaagaagagatcagctgctgaaaccaccagtgggtaccccaggccacctgcctttgaacttggggatttgccatgtttgatcttgtcacatacttgcttttttacaagatgaactctttgtatttatgatttggggggcaatgaaaggtgcaatgcaggaactgctgctgccgagctcgctggtcacatgggggtgccaggcgggattctggaaaaccagtgcacttaaactgatcctgaagagagctgtcccagcactctggccaccaggagggccagattccccagaaactaccttttgcccaaagaacatgctcagtatttggggcatttcctcccacaaaccctgactgcttctgttacctcagggccttggtacctggatactgccacagaattggggcgggtgggggaggggcctatttttaaataaaataactgttcaaagttgggggttttttaaaaaattaagaaaaaggaaagctattctgtattgcaccttttcacaatttaatacattttcttacattttcctgtgattttcgaaactaaaccattgtgtgtcctgtagtgtcctggttgagctgccgctcagcagcttcctcggggggatttggaacacctgtgtctgtcgccgcactgcctgtgggaggggcccagagggctgctgggactggcgtctgtacacacttgtttggccttttctgtagttgatgctgtaaactctatggctttttaaaaacgatttcatgtttttatttagtattggaaatccaatacacttttttaatccaatcaaac

SEQ ID NO: 158304 - DNA, 7342 bp, Homo sapiens
  Payload ID: 10987
  Gene Symbol: NEO1
  Gene Name: neogenin 1
  Uniprot ID: Q92859
  ENST ID: ENST00000339362
  CDS Start-End: 448-4833
ggtcagcggctgcgcggccggccccctcccacgggagccgcgccagggcccagcaagagtcgggcgggatcgctattgtttttggcgagcacataaatccccgggccgacccactgcgcacccaggtttcctcccggaggcctttcggtttcctctgaggccctatatagaggctccaggcccggactgtgcagaggtgcgcgcccacgccggcctcccggaccagcctgagctcggagcgcctctcgccctcaggagggaggcgccctggagtctcccctccagcgagaggggctgcgcgggccgggccgggccgggctgggctggagcagcggcggccgcgggagccgagcttgcagcgagggaccggctgaggcgcgcgggagggaaggaggcaagggctccgcggcgctgtcgccgccgctgccgctcactctcggggaagagatggcggcggagcggggagcccggcgactcctcagcaccccctccttctggctctactgcctgctgctgctcgggcgccgggcgccgggcgccgcggccgccaggagcggctccgcgccgcagtccccaggagccagcattcgaacgttcactccattttattttctggtggagccggtggatacactctcagttagaggctcttctgttatattaaactgttcagcatattctgagccttctccaaaaattgaatggaaaaaagatggaacttttttaaacttagtatcagatgatcgacgccagcttctcccggatggatctttatttatcagcaatgtggtgcattccaaacacaataaacctgatgaaggttattatcagtgtgtggccactgttgagagtcttggaactattatcagtagaacagcgaagctcatagtagcaggtcttccaagatttaccagccaaccagaaccttcctcagtttatgctgggaacaatgcaattctgaattgtgaagttaatgcagatttggtcccatttgtgaggtgggaacagaacagacaaccccttcttctggatgatagagttatcaaacttccaagtggaatgctggttatcagcaatgcaactgaaggagatggcgggctttatcgctgcgtagtggaaagtggtgggccaccaaagtatagtgatgaagttgaattgaaggttcttccagatcctgaggtgatatcagacttggtatttttgaaacagccttctcccttagtcagagtcattggtcaggatgtagtgttgccatgtgttgcttcaggacttcctactccaaccattaaatggatgaaaaatgaggaggcacttgacacagaaagctctgaaagattggtattgctggcaggtggtagcctggagatcagtgatgttactgaggatgatgctgggacttatttttgtatagctgataatggaaatgagacaattgaagctcaagcagagcttacagtgcaagctcaacctgaattcctgaagcagcctactaatatatatgctcacgaatctatggatattgtatttgaatgtgaagtgactggaaaaccaactccaactgtgaagtgggtcaaaaatggggatatggttatcccaagtgattattttaagattgtaaaggaacataatcttcaagttttgggtctggtgaaatcagatgaagggttctatcagtgcattgctgaaaatgatgttggaaatgcacaagctggagcccaactgataatccttgaacatgcaccagccacaacgggaccactgccttcagctcctcgggatgtcgtggcctccctggtctctacccgcttcatcaaattgacgtggcggacacctgcatcagatcctcacggagacaaccttacctactctgtgttctacaccaaggaagggattgctagggaacgtgttgagaataccagtcacccaggagagatgcaagtaaccattcaaaacctaatgccagcgaccgtgtacatctttagagttatggctcaaaataagcatggctcaggagagagttcagctccactgcgagtagaaacacaacctgaggttcagctccctggcccagcacctaaccttcgtgcatatgcagcttcgcctacctccatcactgttacgtgggaaacaccagtgtctggcaatggggaaattcagaattataaattgtactacatggaaaaggggactgataaagaacaggatgttgatgtttcaagtcactcttacaccattaatgggttgaaaaaatatacagagtatagtttccgagtggtggcctacaataaacatggtcctggagtttccacaccagatgttgctgttcgaacattgtcagatgttcccagtgctgctcctcagaatctgtccttggaagtgagaaattcaaagagtattatgattcactggcagccacctgctccagccacacaaaatgggcagattactggctacaagattcgctaccgaaaggcctcccgaaagagtgatgtcactgagaccttggtaagcgggacacagctgtctcagctgattgaaggtcttgatcgggggactgagtataatttccgagtggctgctctaacaatcaatggtacaggcccggcaactgactggctgtctgctgaaacttttgaaagtgacctagatgaaactcgtgttcctgaagtgcctagctctcttcacgtacgcccgctcgttactagcatcgtagtgagctggactcctccagagaatcagaacattgtggtcagaggttacgccattggttatggcattggcagccctcatgcccagaccatcaaagtggactataaacagcgctattacaccattgaaaatctggatcccagctctcactatgtgattaccctgaaagcatttaataacgtgggtgaaggcatccccctgtatgagagtgctgtgaccaggcctcacacagacacttctgaagttgatttatttgttattaatgctccatacactccagtgccagatcccactcccatgatgccaccagtgggagttcaggcttccattctgagtcatgacaccatcaggattacgtgggcagacaactcgctgcccaagcaccagaagattacagactcccgatactacaccgtccgatggaaaaccaacatcccagcaaacaccaagtacaagaatgcaaatgcaaccactttgagttatttggtgactggtttaaagccgaatacactctatgaattctctgtgatggtgaccaaaggtcgaagatcaagtacatggagtatgacagcccatgggaccacctttgaattagttccgacttctccacccaaggatgtgactgttgtgagtaaagaggggaaacctaagaccataattgtgaattggcagcctccctccgaagccaatggcaaaattacaggttacatcatatattacagtacagatgtgaatgcagagatacatgactgggttattgagcctgttgtgggaaacagactgactcaccagatacaagagttaactcttgacacaccatactacttcaaaatccaggcacggaactcaaagggcatgggacccatgtctgaagctgtccaattcagaacacctaaagcggactcctctgataaaatgcctaatgatcaagcctcagggtctggagggaaaggaagccggctgccagacctaggatccgactacaaacctccaatgagcggcagtaacagccctcatgggagccccacctctcctctggacagtaatatgctgctggtcataattgtttctgttggcgtcatcaccatcgtggtggttgtgattatcgctgtcttttgtacccgtcgtaccacctctcaccagaaaaagaaacgagctgcctgcaaatcagtgaatggctctcataagtacaaagggaattccaaagatgtgaaacctccagatctctggatccatcatgagagactggagctgaaacccattgataagtctccagacccaaaccccatcatgactgatactccaattcctcgcaactctcaagatatcacaccagttgacaactccatggacagcaatatccatcaaaggcgaaattcatacagagggcatgagtcagaggacagcatgtctacactggctggaaggcgaggaatgagaccaaaaatgatgatgccctttgactcccagccaccccagcctgtgattagtgcccatcccatccattccctcgataaccctcaccatcatttccactccagcagcctcgcttctccagctcgcagtcatctctaccacccgggcagcccatggcccattggcacatccatgtccctttcagacagggccaattccacagaatccgttcgaaatacccccagcactgacaccatgccagcctcttcgtctcaaacatgctgcactgatcaccaggaccctgaaggtgctaccagctcctcttacttggccagctcccaagaggaagattcaggccagagtcttcccactgcccatgttcgcccttcccacccattgaagagcttcgccgtgccagcaatcccgcctccaggacctcccacctatgatcctgcattgccaagcacaccattactgtcccagcaagctctgaaccatcacattcactcagtgaagacagcctccatcgggactctaggaaggagccggcctcctatgccagtggttgttcccagtgcccctgaagtgcaggagaccacaaggatgttggaagactccgagagtagctatgaaccagatgagctgaccaaagagatggcccacctggaaggactaatgaaggacctaaacgctatcacaacagcatgacgaccttcaccaggacctgacttcaaacctgagtctggaagtcttggaacttacccttgaaaacaaggaattgtacagagtacgagaggacagcacttgagaacacagaatgagccagcagactggccagcgcctctgtgtagggctggctccaggcatggccacctgccttcccctggtcagcctggaagaagcctgtgtcgaggcagcttccctttgcctgctgatattctgcaggactgggcaccatgggccaaaattttgtgtccagggaagaggcgagaagtgcaacctgcatttcactttgtggtcaggccgtgtctttgtgctgtgactgcatcacctttatggagtgtagacattggcatttatgtacaattttatttgtgtcttattttattttaccttcaaaaacaaaaacgccatccaaaaccaaggaagtccttggtgttctccacaagtggttgacatttgactgcttgttccaattatgtatggaaagtctttgacagtgtgggtcgttcctggggttggcttgttttttggtttcatttttattttttaattctgagtcattgcatcctctaccagctgttaatccatcactctgagggggaggaaatgttgcattgctgtttgtaagctttttttattatttttttattataattattaaaggcctgactctttcctctcatcactgtgagattacagatctatttgaattgaatgaaatgtaacattgaaaagacttgtttgttgctttctgtgcagtttcagtattggggcgggtggggggctgggggttggtaataggaaatggaggggctgctgaggtcctgtgaatgtttctgtcattgtactttcttccagaagcctgcagagaatggaagcatcttctttattgtcctttcctggcatgtccatccttattgtcactacgttgcaactggagtttgatttggatctggttttaaaattcttctgtgcaatagatgggtttgaggatttagcggccctgatgtcttggtcatagcctggtaagaatgtccatgctgaggagccagatgttgtatttctaactgcctgagtcacacagaatagggtaagagcctgaccccattctgtaaatcagaaagcaaggatggagaccctttcctgctgctattattggctctctttgaggaagttggaggttaaggaaggaacttgtttgtttccgtatacgactccttcttctctctagttcagtcttcagccagtccagcgctctcttccacacttcagagccccttcagagaaagcattagcaggaatgagacaaggcagagctgcagtgccccctgaggcttccacacatctttctgaatattatttttcaagtaacaagggcagggacagcggaaacagctgcccaccccccccatcccagcagctcagctaagccctgatgagaatgaagccacaggagttgtctgaggtgaacccagccgctcagccacacatggaagccattgcctttgcacatagttcttgggttctttttcctaaaaaggtaaggagctgaggtgtgtggttttttaatattaagaatatataatggaaaacacacgactgacgctcaggcatcttcccctactccccaacagatccccagaagacagcgtggaaggcagtgtagacagtaaatcgggcttcagttctatagccaagaagagatcagctgctgaaaccaccagtgggtaccccaggccacctgcctttgaacttggggatttgccatgtttgatcttgtcacatacttgcttttttacaagatgaactctttgtatttatgatttggggggcaatgaaaggtgcaatgcaggaactgctgctgccgagctcgctggtcacatgggggtgccaggcgggattctggaaaaccagtgcacttaaactgatcctgaagagagctgtcccagcactctggccaccaggagggccagattccccagaaactaccttttgcccaaagaacatgctcagtatttggggcatttcctcccacaaaccctgactgcttctgttacctcagggccttggtacctggatactgccacagaattggggcgggtgggggaggggcctatttttaaataaaataactgttcaaagttgggggttttttaaaaaattaagaaaaaggaaagctattctgtattgcaccttttcacaatttaatacattttcttacattttcctgtgattttcgaaactaaaccattgtgtgtcctgtagtgtcctggttgagctgccgctcagcagcttcctcggggggatttggaacacctgtgtctgtcgccgcactgcctgtgggaggggcccagagggctgctgggactggcgtctgtacacacttgtttggccttttctgtagttgatgctgtaaactctatggctttttaaaaacgatttcatgtttttatttagtattggaaatccaatacacttttttaatccaatcaaa

SEQ ID NO: 158305 - DNA, 4441 bp, Homo sapiens
  Payload ID: 10987
  Gene Symbol: NEO1
  Gene Name: neogenin 1
  Uniprot ID: Q92859
  ENST ID: ENST00000558964
  CDS Start-End: 67-4419
gggagggaaggaggcaagggctccgcggcgctgtcgccgccgctgccgctcactctcggggaagagatggcggcggagcggggagcccggcgactcctcagcaccccctccttctggctctactgcctgctgctgctcgggcgccgggcgccgggcgccgcggccgccaggagcggctccgcgccgcagtccccaggagccagcattcgaacgttcactccattttattttctggtggagccggtggatacactctcagttagaggctcttctgttatattaaactgttcagcatattctgagccttctccaaaaattgaatggaaaaaagatggaacttttttaaacttagtatcagatgatcgacgccagcttctcccggatggatctttatttatcagcaatgtggtgcattccaaacacaataaacctgatgaaggttattatcagtgtgtggccactgttgagagtcttggaactattatcagtagaacagcgaagctcatagtagcaggtcttccaagatttaccagccaaccagaaccttcctcagtttatgctgggaacaatgcaattctgaattgtgaagttaatgcagatttggtcccatttgtgaggtgggaacagaacagacaaccccttcttctggatgatagagttatcaaacttccaagtggaatgctggttatcagcaatgcaactgaaggagatggcgggctttatcgctgcgtagtggaaagtggtgggccaccaaagtatagtgatgaagttgaattgaaggttcttccagatcctgaggtgatatcagacttggtatttttgaaacagccttctcccttagtcagagtcattggtcaggatgtagtgttgccatgtgttgcttcaggacttcctactccaaccattaaatggatgaaaaatgaggaggcacttgacacagaaagctctgaaagattggtattgctggcaggtggtagcctggagatcagtgatgttactgaggatgatgctgggacttatttttgtatagctgataatggaaatgagacaattgaagctcaagcagagcttacagtgcaagctcaacctgaattcctgaagcagcctactaatatatatgctcacgaatctatggatattgtatttgaatgtgaagtgactggaaaaccaactccaactgtgaagtgggtcaaaaatggggatatggttatcccaagtgattattttaagattgtaaaggaacataatcttcaagttttgggtctggtgaaatcagatgaagggttctatcagtgcattgctgaaaatgatgttggaaatgcacaagctggagcccaactgataatccttgaacatgcaccagccacaacgggaccactgccttcagctcctcgggatgtcgtggcctccctggtctctacccgcttcatcaaattgacgtggcggacacctgcatcagatcctcacggagacaaccttacctactctgtgttctacaccaaggaagggattgctagggaacgtgttgagaataccagtcacccaggagagatgcaagtaaccattcaaaacctaatgccagcgaccgtgtacatctttagagttatggctcaaaataagcatggctcaggagagagttcagctccactgcgagtagaaacacaacctgaggttcagctccctggcccagcacctaaccttcgtgcatatgcagcttcgcctacctccatcactgttacgtgggaaacaccagtgtctggcaatggggaaattcagaattataaattgtactacatggaaaaggggactgataaagaacaggatgttgatgtttcaagtcactcttacaccattaatgggttgaaaaaatatacagagtatagtttccgagtggtggcctacaataaacatggtcctggagtttccacaccagatgttgctgttcgaacattgtcagatgttcccagtgctgctcctcagaatctgtccttggaagtgagaaattcaaagagtattatgattcactggcagccacctgctccagccacacaaaatgggcagattactggctacaagattcgctaccgaaaggcctcccgaaagagtgatgtcactgagaccttggtaagcgggacacagctgtctcagctgattgaaggtcttgatcgggggactgagtataatttccgagtggctgctctaacaatcaatggtacaggcccggcaactgactggctgtctgctgaaacttttgaaagtgacctagatgaaactcgtgttcctgaagtgcctagctctcttcacgtacgcccgctcgttactagcatcgtagtgagctggactcctccagagaatcagaacattgtggtcagaggttacgccattggttatggcattggcagccctcatgcccagaccatcaaagtggactataaacagcgctattacaccattgaaaatctggatcccagctctcactatgtgattaccctgaaagcatttaataacgtgggtgaaggcatccccctgtatgagagtgctgtgaccaggcctcacacagacacttctgaagttgatttatttgttattaatgctccatacactccagtgccagatcccactcccatgatgccaccagtgggagttcaggcttccattctgagtcatgacaccatcaggattacgtgggcagacaactcgctgcccaagcaccagaagattacagactcccgatactacaccgtccgatggaaaaccaacatcccagcaaacaccaagtacaagaatgcaaatgcaaccactttgagttatttggtgactggtttaaagccgaatacactctatgaattctctgtgatggtgaccaaaggtcgaagatcaagtacatggagtatgacagcccatgggaccacctttgaattagttccgacttctccacccaaggatgtgactgttgtgagtaaagaggggaaacctaagaccataattgtgaattggcagcctccctccgaagccaatggcaaaattacaggttacatcatatattacagtacagatgtgaatgcagagatacatgactgggttattgagcctgttgtgggaaacagactgactcaccagatacaagagttaactcttgacacaccatactacttcaaaatccaggcacggaactcaaagggcatgggacccatgtctgaagctgtccaattcagaacacctaaagcctcagggtctggagggaaaggaagccggctgccagacctaggatccgactacaaacctccaatgagcggcagtaacagccctcatgggagccccacctctcctctggacagtaatatgctgctggtcataattgtttctgttggcgtcatcaccatcgtggtggttgtgattatcgctgtcttttgtacccgtcgtaccacctctcaccagaaaaagaaacgagctgcctgcaaatcagtgaatggctctcataagtacaaagggaattccaaagatgtgaaacctccagatctctggatccatcatgagagactggagctgaaacccattgataagtctccagacccaaaccccatcatgactgatactccaattcctcgcaactctcaagatatcacaccagttgacaactccatggacagcaatatccatcaaaggcgaaattcatacagagggcatgagtcagaggacagcatgtctacactggctggaaggcgaggaatgagaccaaaaatgatgatgccctttgactcccagccaccccagcctgtgattagtgcccatcccatccattccctcgataaccctcaccatcatttccactccagcagcctcgcttctccagctcgcagtcatctctaccacccgggcagcccatggcccattggcacatccatgtccctttcagacagggccaattccacagaatccgttcgaaatacccccagcactgacaccatgccagcctcttcgtctcaaacatgctgcactgatcaccaggaccctgaaggtgctaccagctcctcttacttggccagctcccaagaggaagattcaggccagagtcttcccactgcccatgttcgcccttcccacccattgaagagcttcgccgtgccagcaatcccgcctccaggacctcccacctatgatcctgcattgccaagcacaccattactgtcccagcaagctctgaaccatcacattcactcagtgaagacagcctccatcgggactctaggaaggagccggcctcctatgccagtggttgttcccagtgcccctgaagtgcaggagaccacaaggatgttggaagactccgagagtagctatgaaccagatgagctgaccaaagagatggcccacctggaaggactaatgaaggacctaaacgctatcacaacagcatgacgaccttcaccaggacctgact

SEQ ID NO: 158306 - DNA, 4315 bp, Homo sapiens
  Payload ID: 10987
  Gene Symbol: NEO1
  Gene Name: neogenin 1
  Uniprot ID: Q92859
  ENST ID: ENST00000560262
  CDS Start-End: 67-4293
gggagggaaggaggcaagggctccgcggcgctgtcgccgccgctgccgctcactctcggggaagagatggcggcggagcggggagcccggcgactcctcagcaccccctccttctggctctactgcctgctgctgctcgggcgccgggcgccgggcgccgcggccgccaggagcggctccgcgccgcagtccccaggagccagcattcgaacgttcactccattttattttctggtggagccggtggatacactctcagttagaggctcttctgttatattaaactgttcagcatattctgagccttctccaaaaattgaatggaaaaaagatggaacttttttaaacttagtatcagatgatcgacgccagcttctcccggatggatctttatttatcagcaatgtggtgcattccaaacacaataaacctgatgaaggttattatcagtgtgtggccactgttgagagtcttggaactattatcagtagaacagcgaagctcatagtagcaggtcttccaagatttaccagccaaccagaaccttcctcagtttatgctgggaacaatgcaattctgaattgtgaagttaatgcagatttggtcccatttgtgaggtgggaacagaacagacaaccccttcttctggatgatagagttatcaaacttccaagtggaatgctggttatcagcaatgcaactgaaggagatggcgggctttatcgctgcgtagtggaaagtggtgggccaccaaagtatagtgatgaagttgaattgaaggttcttccagatcctgaggtgatatcagacttggtatttttgaaacagccttctcccttagtcagagtcattggtcaggatgtagtgttgccatgtgttgcttcaggacttcctactccaaccattaaatggatgaaaaatgaggaggcacttgacacagaaagctctgaaagattggtattgctggcaggtggtagcctggagatcagtgatgttactgaggatgatgctgggacttatttttgtatagctgataatggaaatgagacaattgaagctcaagcagagcttacagtgcaagctcaacctgaattcctgaagcagcctactaatatatatgctcacgaatctatggatattgtatttgaatgtgaagtgactggaaaaccaactccaactgtgaagtgggtcaaaaatggggatatggttatcccaagtgattattttaagattgtaaaggaacataatcttcaagttttgggtctggtgaaatcagatgaagggttctatcagtgcattgctgaaaatgatgttggaaatgcacaagctggagcccaactgataatccttgaacatgcaccagccacaacgggaccactgccttcagctcctcgggatgtcgtggcctccctggtctctacccgcttcatcaaattgacgtggcggacacctgcatcagatcctcacggagacaaccttacctactctgtgttctacaccaaggaagggattgctagggaacgtgttgagaataccagtcacccaggagagatgcaagtaaccattcaaaacctaatgccagcgaccgtgtacatctttagagttatggctcaaaataagcatggctcaggagagagttcagctccactgcgagtagaaacacaacctgaggttcagctccctggcccagcacctaaccttcgtgcatatgcagcttcgcctacctccatcactgttacgtgggaaacaccagtgtctggcaatggggaaattcagaattataaattgtactacatggaaaaggggactgataaagaacaggatgttgatgtttcaagtcactcttacaccattaatgggttgaaaaaatatacagagtatagtttccgagtggtggcctacaataaacatggtcctggagtttccacaccagatgttgctgttcgaacattgtcagatgttcccagtgctgctcctcagaatctgtccttggaagtgagaaattcaaagagtattatgattcactggcagccacctgctccagccacacaaaatgggcagattactggctacaagattcgctaccgaaaggcctcccgaaagagtgatgtcactgagaccttggtaagcgggacacagctgtctcagctgattgaaggtcttgatcgggggactgagtataatttccgagtggctgctctaacaatcaatggtacaggcccggcaactgactggctgtctgctgaaacttttgaaagtgacctagatgaaactcgtgttcctgaagtgcctagctctcttcacgtacgcccgctcgttactagcatcgtagtgagctggactcctccagagaatcagaacattgtggtcagaggttacgccattggttatggcattggcagccctcatgcccagaccatcaaagtggactataaacagcgctattacaccattgaaaatctggatcccagctctcactatgtgattaccctgaaagcatttaataacgtgggtgaaggcatccccctgtatgagagtgctgtgaccaggcctcacacagacacttctgaagttgatttatttgttattaatgctccatacactccagtgccagatcccactcccatgatgccaccagtgggagttcaggcttccattctgagtcatgacaccatcaggattacgtgggcagacaactcgctgcccaagcaccagaagattacagactcccgatactacaccgtccgatggaaaaccaacatcccagcaaacaccaagtacaagaatgcaaatgcaaccactttgagttatttggtgactggtttaaagccgaatacactctatgaattctctgtgatggtgaccaaaggtcgaagatcaagtacatggagtatgacagcccatgggaccacctttgaattagttccgacttctccacccaaggatgtgactgttgtgagtaaagaggggaaacctaagaccataattgtgaattggcagcctccctccgaagccaatggcaaaattacaggttacatcatatattacagtacagatgtgaatgcagagatacatgactgggttattgagcctgttgtgggaaacagactgactcaccagatacaagagttaactcttgacacaccatactacttcaaaatccaggcacggaactcaaagggcatgggacccatgtctgaagctgtccaattcagaacacctaaagcggactcctctgataaaatgcctaatgatcaagcctcagggtctggagggaaaggaagccggctgccagacctaggatccgactacaaacctccaatgagcggcagtaacagccctcatgggagccccacctctcctctggacagtaatatgctgctggtcataattgtttctgttggcgtcatcaccatcgtggtggttgtgattatcgctgtcttttgtacccgtcgtaccacctctcaccagaaaaagaaacgagctgcctgcaaatcagtgaatggctctcataagtacaaagggaattccaaagatgtgaaacctccagatctctggatccatcatgagagactggagctgaaacccattgataagtctccagacccaaaccccatcatgactgatactccaattcctcgcaactctcaagatatcacaccagttgacaactccatggacagcaatatccatcaaaggcgaaattcatacagagggcatgagtcagaggacagcatgtctacactggctggaaggcgaggaatgagaccaaaaatgatgatgccctttgactcccagccaccccagcaatccgttcgaaatacccccagcactgacaccatgccagcctcttcgtctcaaacatgctgcactgatcaccaggaccctgaaggtgctaccagctcctcttacttggccagctcccaagaggaagattcaggccagagtcttcccactgcccatgttcgcccttcccacccattgaagagcttcgccgtgccagcaatcccgcctccaggacctcccacctatgatcctgcattgccaagcacaccattactgtcccagcaagctctgaaccatcacattcactcagtgaagacagcctccatcgggactctaggaaggagccggcctcctatgccagtggttgttcccagtgcccctgaagtgcaggagaccacaaggatgttggaagactccgagagtagctatgaaccagatgagctgaccaaagagatggcccacctggaaggactaatgaaggacctaaacgctatcacaacagcatgacgaccttcaccaggacctgact

SEQ ID NO: 158307 - DNA, 5895 bp, Homo sapiens
  Payload ID: 10987
  Gene Symbol: NEO1
  Gene Name: neogenin 1
  ENST ID: ENST00000560328
  CDS Start-End: 1-3393
ggaaatgagacaattgaagctcaagcagagcttacagtgcaagctcaacctgaattcctgaagcagcctactaatatatatgctcacgaatctatggatattgtatttgaatgtgaagtgactggaaaaccaactccaactgtgaagtgggtcaaaaatggggatatggttatcccaagtgattattttaagattgtaaaggaacataatcttcaagttttgggtctggtgaaatcagatgaagggttctatcagtgcattgctgaaaatgatgttggaaatgcacaagctggagcccaactgataatccttgaacatgatgttgccatcccaacattacctcccacttcactgaccagtgccactactgaccatctagcaccagccacaacgggaccactgccttcagctcctcgggatgtcgtggcctccctggtctctacccgcttcatcaaattgacgtggcggacacctgcatcagatcctcacggagacaaccttacctactctgtgttctacaccaaggaagggattgctagggaacgtgttgagaataccagtcacccaggagagatgcaagtaaccattcaaaacctaatgccagcgaccgtgtacatctttagagttatggctcaaaataagcatggctcaggagagagttcagctccactgcgagtagaaacacaacctgaggttcagctccctggcccagcacctaaccttcgtgcatatgcagcttcgcctacctccatcactgttacgtgggaaacaccagtgtctggcaatggggaaattcagaattataaattgtactacatggaaaaggggactgataaagaacaggatgttgatgtttcaagtcactcttacaccattaatgggttgaaaaaatatacagagtatagtttccgagtggtggcctacaataaacatggtcctggagtttccacaccagatgttgctgttcgaacattgtcagatgttcccagtgctgctcctcagaatctgtccttggaagtgagaaattcaaagagtattatgattcactggcagccacctgctccagccacacaaaatgggcagattactggctacaagattcgctaccgaaaggcctcccgaaagagtgatgtcactgagaccttggtaagcgggacacagctgtctcagctgattgaaggtcttgatcgggggactgagtataatttccgagtggctgctctaacaatcaatggtacaggcccggcaactgactggctgtctgctgaaacttttgaaagtgacctagatgaaactcgtgttcctgaagtgcctagctctcttcacgtacgcccgctcgttactagcatcgtagtgagctggactcctccagagaatcagaacattgtggtcagaggttacgccattggttatggcattggcagccctcatgcccagaccatcaaagtggactataaacagcgctattacaccattgaaaatctggatcccagctctcactatgtgattaccctgaaagcatttaataacgtgggtgaaggcatccccctgtatgagagtgctgtgaccaggcctcacacagtgccagatcccactcccatgatgccaccagtgggagttcaggcttccattctgagtcatgacaccatcaggattacgtgggcagacaactcgctgcccaagcaccagaagattacagactcccgatactacaccgtccgatggaaaaccaacatcccagcaaacaccaagtacaagaatgcaaatgcaaccactttgagttatttggtgactggtttaaagccgaatacactctatgaattctctgtgatggtgaccaaaggtcgaagatcaagtacatggagtatgacagcccatgggaccacctttgaattagttccgacttctccacccaaggatgtgactgttgtgagtaaagaggggaaacctaagaccataattgtgaattggcagcctccctccgaagccaatggcaaaattacaggttacatcatatattacagtacagatgtgaatgcagagatacatgactgggttattgagcctgttgtgggaaacagactgactcaccagatacaagagttaactcttgacacaccatactacttcaaaatccaggcacggaactcaaagggcatgggacccatgtctgaagctgtccaattcagaacacctaaagcctcagggtctggagggaaaggaagccggctgccagacctaggatccgactacaaacctccaatgagcggcagtaacagccctcatgggagccccacctctcctctggacagtaatatgctgctggtcataattgtttctgttggcgtcatcaccatcgtggtggttgtgattatcgctgtcttttgtacccgtcgtaccacctctcaccagaaaaagaaacgagctgcctgcaaatcagtgaatggctctcataagtacaaagggaattccaaagatgtgaaacctccagatctctggatccatcatgagagactggagctgaaacccattgataagtctccagacccaaaccccatcatgactgatactccaattcctcgcaactctcaagatatcacaccagttgacaactccatggacagcaatatccatcaaaggcgaaattcatacagagggcatgagtcagaggacagcatgtctacactggctggaaggcgaggaatgagaccaaaaatgatgatgccctttgactcccagccaccccagcctgtgattagtgcccatcccatccattccctcgataaccctcaccatcatttccactccagcagcctcgcttctccagctcgcagtcatctctaccacccgggcagcccatggcccattggcacatccatgtccctttcagacagggccaattccacagaatccgttcgaaatacccccagcactgacaccatgccagcctcttcgtctcaaacatgctgcactgatcaccaggaccctgaaggtgctaccagctcctcttacttggccagctcccaagaggaagattcaggccagagtcttcccactgcccatgttcgcccttcccacccattgaagagcttcgccgtgccagcaatcccgcctccaggacctcccacctatgatcctgcattgccaagcacaccattactgtcccagcaagctctgaaccatcacattcactcagtgaagacagcctccatcgggactctaggaaggagccggcctcctatgccagtggttgttcccagtgcccctgaagtgcaggagaccacaaggatgttggaagactccgagagtagctatgaaccagatgagctgaccaaagagatggcccacctggaaggactaatgaaggacctaaacgctatcacaacagcatgacgaccttcaccaggacctgacttcaaacctgagtctggaagtcttggaacttacccttgaaaacaaggaattgtacagagtacgagaggacagcacttgagaacacagaatgagccagcagactggccagcgcctctgtgtagggctggctccaggcatggccacctgccttcccctggtcagcctggaagaagcctgtgtcgaggcagcttccctttgcctgctgatattctgcaggactgggcaccatgggccaaaattttgtgtccagggaagaggcgagaagtgcaacctgcatttcactttgtggtcaggccgtgtctttgtgctgtgactgcatcacctttatggagtgtagacattggcatttatgtacaattttatttgtgtcttattttattttaccttcaaaaacaaaaacgccatccaaaaccaaggaagtccttggtgttctccacaagtggttgacatttgactgcttgttccaattatgtatggaaagtctttgacagtgtgggtcgttcctggggttggcttgttttttggtttcatttttattttttaattctgagtcattgcatcctctaccagctgttaatccatcactctgagggggaggaaatgttgcattgctgtttgtaagctttttttattatttttttattataattattaaaggcctgactctttcctctcatcactgtgagattacagatctatttgaattgaatgaaatgtaacattgaaaagacttgtttgttgctttctgtgcagtttcagtattggggcgggtggggggctgggggttggtaataggaaatggaggggctgctgaggtcctgtgaatgtttctgtcattgtactttcttccagaagcctgcagagaatggaagcatcttctttattgtcctttcctggcatgtccatccttattgtcactacgttgcaactggagtttgatttggatctggttttaaaattcttctgtgcaatagatgggtttgaggatttagcggccctgatgtcttggtcatagcctggtaagaatgtccatgctgaggagccagatgttgtatttctaactgcctgagtcacacagaatagggtaagagcctgaccccattctgtaaatcagaaagcaaggatggagaccctttcctgctgctattattggctctctttgaggaagttggaggttaaggaaggaacttgtttgtttccgtatacgactccttcttctctctagttcagtcttcagccagtccagcgctctcttccacacttcagagccccttcagagaaagcattagcaggaatgagacaaggcagagctgcagtgccccctgaggcttccacacatctttctgaatattatttttcaagtaacaagggcagggacagcggaaacagctgcccaccccccccatcccagcagctcagctaagccctgatgagaatgaagccacaggagttgtctgaggtgaacccagccgctcagccacacatggaagccattgcctttgcacatagttcttgggttctttttcctaaaaaggtaaggagctgaggtgtgtggttttttaatattaagaatatataatggaaaacacacgactgacgctcaggcatcttcccctactccccaacagatccccagaagacagcgtggaaggcagtgtagacagtaaatcgggcttcagttctatagccaagaagagatcagctgctgaaaccaccagtgggtaccccaggccacctgcctttgaacttggggatttgccatgtttgatcttgtcacatacttgcttttttacaagatgaactctttgtatttatgatttggggggcaatgaaaggtgcaatgcaggaactgctgctgccgagctcgctggtcacatgggggtgccaggcgggattctggaaaaccagtgcacttaaactgatcctgaagagagctgtcccagcactctggccaccaggagggccagattccccagaaactaccttttgcccaaagaacatgctcagtatttggggcatttcctcccacaaaccctgactgcttctgttacctcagggccttggtacctggatactgccacagaattggggcgggtgggggaggggcctatttttaaataaaataactgttcaaagttgggggttttttaaaaaattaagaaaaaggaaagctattctgtattgcaccttttcacaatttaatacattttcttacattttcctgtgattttcgaaactaaaccattgtgtgtcctgtagtgtcctggttgagctgccgctcagcagcttcctcggggggatttggaacacctgtgtctgtcgccgcactgcctgtgggaggggcccagagggctgctgggactggcgtctgtacacacttgtttggccttttctgtagttgatgctgtaaactctatggctttttaaaaacgatttcatgtttttatttagtattggaaatccaatacacttttttaatcc

SEQ ID NO: 158308 - DNA, 2522 bp, Homo sapiens
  Payload ID: 10988
  Gene Symbol: NOV
  Gene Name: nephroblastoma overexpressed
  Uniprot ID: P48745
  ENST ID: ENST00000259526
  CDS Start-End: 228-1301
acagccaattgccatggcaaccccggggttcgttccacttccccacccagccgatctcccccctcctccctgcactgcagccaaccggcttgtgcgcgtcccaggagcgcgctataaaacctgtgctgggcgtgatcggcaagcaccggaccagggggaaggcgagcagtgccaatctacagcgaagaaagtctcgtttggtaaaagcgagaggggaaagcctgagcatgcagagtgtgcagagcacgagcttttgtctccgaaagcagtgcctttgcctgaccttcctgcttctccatctcctgggacaggtcgctgcgactcagcgctgccctccccagtgcccgggccggtgccctgcgacgccgccgacctgcgcccccggggtgcgcgcggtgctggacggctgctcatgctgtctggtgtgtgcccgccagcgtggcgagagctgctcagatctggagccatgcgacgagagcagtggcctctactgtgatcgcagcgcggaccccagcaaccagactggcatctgcacggcggtagagggagataactgtgtgttcgatggggtcatctaccgcagtggagagaaatttcagccaagctgcaaattccagtgcacctgcagagatgggcagattggctgtgtgccccgctgtcagctggatgtgctactgcctgagcctaactgcccagctccaagaaaagttgaggtgcctggagagtgctgtgaaaagtggatctgtggcccagatgaggaggattcactgggaggccttacccttgcagcttacaggccagaagccaccctaggagtagaagtctctgactcaagtgtcaactgcattgaacagaccacagagtggacagcatgctccaagagctgtggtatggggttctccacccgggtcaccaataggaaccgtcaatgtgagatgctgaaacagactcggctctgcatggtgcggccctgtgaacaagagccagagcagccaacagataagaaaggaaaaaagtgtctccgcaccaagaagtcactcaaagccatccacctgcagttcaagaactgcaccagcctgcacacctacaagcccaggttctgtggggtctgcagtgatggccgctgctgcactccccacaataccaaaaccatccaggcagagtttcagtgctccccagggcaaatagtcaagaagccagtgatggtcattgggacctgcacctgtcacaccaactgtcctaagaacaatgaggccttcctccaggagctggagctgaagactaccagagggaaaatgtaacctgtcactcaagaagcacacctacagagcacctgtagctgctgcgccacccaccatcaaaggaatataagaaaagtaatgaagaatcacgatttcatccttgaatcctatgtattttcctaatgtgatcatatgaggacctttatatctgtcttttatttaacaaaaaatgtaattaactgtaaacttggaatcaaggtaagctcaggatatggcttaggaatgacttactttcctgtggttttattacaaatgcaaatttctataaatttaagaaaacaagtatataatttactttgtagactgtttcacattgcactcatcatattttgttgtgcactagtgcaattccaagaaaatatcactgtaatgagtcagtgaagtctagaatcatacttaacatttcattgtacaagtattacaaccatatattgaggttcattgggaagattctctattggctccctttttgggtaaaccagctctgaacttccaagctccaaatccaaggaaacatgcagctcttcaacatgacatccagagatgactattacttttctgtttagttttacactaggaaacgtgttgtatctacagtaatgaaatgtttactaagtggactggtgtcataaactttctccatttaagacacattgactcctttccaatagaaagaaactaaacagaaaactcccaatacaaagatgactggtccctcatagccctcagacatttatatattggaagctgctgaggcccccaagttttttaattaagcagaaacagcatattagcagggattctctcatctaactgatgagtaaactgaggcccaaagcacttgcttacatcctctgatagctgtttcaaatgtgcattttgtggaattttgagaaaaatagagcaaaatcaacatgactggtggtgagagaccacacattttatgagagtttggaattattgtagacatgcccaaaacttatccttgggccataattatgaaaactcatgatcaagatatatgtgtatacatacatgtatctggtttgtcaggctacaaggtaggctgcaaaattaaatctagacattcttttaatgccaccacacgtgttccgcttctctcttttaaagtatttataaaaatataaattgtacattttgtaaaatattatgtttgatttctctacttgtcatatcactaaataaacacgattttattgc

SEQ ID NO: 158309 - DNA, 3003 bp, Homo sapiens
  Payload ID: 10989
  Gene Symbol: NPNT
  Gene Name: nephronectin
  Uniprot ID: Q6UXI9
  ENST ID: ENST00000305572
  CDS Start-End: 203-1732
gggagggggctccgggcgccgcgcagcagacctgctccggccgcgcgcctcgccgctgtcctccgggagcggcagcagtagcccgggcggcgagggctgggggttcctcgagactctcagaggggcgcctcccatcggcgcccaccaccccaacctgttcctcgcgcgccactgcgctgcgccccaggacccgctgcccaacatggattttctcctggcgctggtgctggtatcctcgctctacctgcaggcggccgccgagttcgacgggaggtggcccaggcaaatagtgtcatcgattggcctatgtcgttatggtgggaggattgactgctgctggggctgggctcgccagtcttggggacagtgtcagcctgtgtgccaaccacgatgcaaacatggtgaatgtatcgggccaaacaagtgcaagtgtcatcctggttatgctggaaaaacctgtaatcaagatctaaatgagtgtggcctgaagccccggccctgtaagcacaggtgcatgaacacttacggcagctacaagtgctactgtctcaacggatatatgctcatgccggatggttcctgctcaagtgccctgacctgctccatggcaaactgtcagtatggctgtgatgttgttaaaggacaaatacggtgccagtgcccatcccctggcctgcagctggctcctgatgggaggacctgtgtagatgttgatgaatgtgctacaggaagagcctcctgccctagatttaggcaatgtgtcaacacttttgggagctacatctgcaagtgtcataaaggcttcgatctcatgtatattggaggcaaatatcaatgtcatgacatagacgaatgctcacttggtcagtatcagtgcagcagctttgctcgatgttataacatacgtgggtcctacaagtgcaaatgtaaagaaggataccagggtgatggactgacttgtgtgtatatcccaaaagttatgattgaaccttcaggtccaattcatgtaccaaagggaaatggtaccattttaaagggtgacacaggaaataataattggattcctgatgttggaagtacttggtggcctccgaagacaccatatattcctcctatcattaccaacaggcctacttctaagccaacaacaagacctacaccaaagccaacaccaattcctactccaccaccaccaccacccctgccaacagagctcagaacacctctaccacctacaaccccagaaaggccaaccaccggactgacaactatagcaccagctgccagtacacctccaggagggattacagttgacaacagggtacagacagaccctcagaaacccagaggagatgtgttcagtgttctggtacacagttgtaattttgaccatggactttgtggatggatcagggagaaagacaatgacttgcactgggaaccaatcagggacccagcaggtggacaatatctgacagtgtcggcagccaaagccccagggggaaaagctgcacgcttggtgctacctctcggccgcctcatgcattcaggggacctgtgcctgtcattcaggcacaaggtgacggggctgcactctggcacactccaggtgtttgtgagaaaacacggtgcccacggagcagccctgtggggaagaaatggtggccatggctggaggcaaacacagatcaccttgcgaggggctgacatcaagagcgaatcacaaagatgattaaagggttggaaaaaaagatctatgatggaaaattaaaggaactgggattattgagcctggagaagagaagactgaggggcaaaccattgatggttttcaagtatatgaagggttggcacagagagggtggcgaccagctgttctccatatgcactaagaatagaacaagaggaaactggcttagactagagtataagggagcatttcttggcaggggccattgttagaatacttcataaaaaaagaagtgtgaaaatctcagtatctctctctctttctaaaaaattagataaaaatttgtctatttaagatggttaaagatgttcttacccaaggaaaagtaacaaattatagaatttcccaaaagatgttttgatcctactagtagtatgcagtgaaaatctttagaactaaataatttggacaaggcttaatttaggcatttccctcttgacctcctaatggagagggattgaaaggggaagagcccaccaaatgctgagctcactgaaatatctctcccttatggcaatcctagcagtattaaagaaaaaaggaaactatttattccaaatgagagtatgatggacagatattttagtatctcagtaatgtcctagtgtggcggtggttttcaatgtttcttcatgttaaaggtataagcctttcatttgttcaatggatgatgtttcagatttttttttttttaagagatccttcaaggaacacagttcagagagattttcatcgggtgcattctctctgcttcgtgtgtgacaagttatcttggctgctgagaaagagtgccctgccccacaccggcagacctttccttcacctcatcagtatgattcagtttctcttatcaattggactctcccaggttccacagaacagtaatattttttgaacaataggtacaatagaaggtcttctgtcatttaacctggtaaaggcagggctggagggggaaaataaatcattaagcctttgagtaacggcagaatatatggctgtagatccatttttaatggttcatttcctttatggtcatataactgcacagctgaagatgaaaggggaaaataaatgaaaattttacttttcgatgccaatgatacattgcactaaactgatggaagaagttatccaaagtactgtataacatcttgtttattatttaatgttttctaaaataaaaaatgttagtggttttccaaatggcctaataaaaacaattatttgtaaataaaaacactgttagtaat

SEQ ID NO: 158310 - DNA, 4598 bp, Homo sapiens
  Payload ID: 10989
  Gene Symbol: NPNT
  Gene Name: nephronectin
  Uniprot ID: Q6UXI9
  ENST ID: ENST00000379987
  CDS Start-End: 217-1914
agctagaagggagcgggagggggctccgggcgccgcgcagcagacctgctccggccgcgcgcctcgccgctgtcctccgggagcggcagcagtagcccgggcggcgagggctgggggttcctcgagactctcagaggggcgcctcccatcggcgcccaccaccccaacctgttcctcgcgcgccactgcgctgcgccccaggacccgctgcccaacatggattttctcctggcgctggtgctggtatcctcgctctacctgcaggcggccgccgagttcgacgggaggtggcccaggcaaatagtgtcatcgattggcctatgtcgttatggtgggaggattgactgctgctggggctgggctcgccagtcttggggacagtgtcagcctgtgtgccaaccacgatgcaaacatggtgaatgtatcgggccaaacaagtgcaagtgtcatcctggttatgctggaaaaacctgtaatcaagatctaaatgagtgtggcctgaagccccggccctgtaagcacaggtgcatgaacacttacggcagctacaagtgctactgtctcaacggatatatgctcatgccggatggttcctgctcaagtgccctgacctgctccatggcaaactgtcagtatggctgtgatgttgttaaaggacaaatacggtgccagtgcccatcccctggcctgcagctggctcctgatgggaggacctgtgtagatgttgatgaatgtgctacaggaagagcctcctgccctagatttaggcaatgtgtcaacacttttgggagctacatctgcaagtgtcataaaggcttcgatctcatgtatattggaggcaaatatcaatgtcatgacatagacgaatgctcacttggtcagtatcagtgcagcagctttgctcgatgttataacatacgtgggtcctacaagtgcaaatgtaaagaaggataccagggtgatggactgacttgtgtgtatatcccaaaagttatgattgaaccttcaggtccaattcatgtaccaaagggaaatggtaccattttaaagggtgacacaggaaataataattggattcctgatgttggaagtacttggtggcctccgaagacaccatatattcctcctatcattaccaacaggcctacttctaagccaacaacaagacctacaccaaagccaacaccaattcctactccaccaccaccaccacccctgccaacagagctcagaacacctctaccacctacaaccccagaaaggccaaccaccggactgacaactatagcaccagctgccagtacacctccaggagggattacagttgacaacagggtacagacagaccctcagaaacccagaggagatgtgttcattccacggcaaccttcaaatgacttgtttgaaatatttgaaatagaaagaggagtcagtgcagacgatgaagcaaaggatgatccaggtgttctggtacacagttgtaattttgaccatggactttgtggatggatcagggagaaagacaatgacttgcactgggaaccaatcagggacccagcaggtggacaatatctgacagtgtcggcagccaaagccccagggggaaaagctgcacgcttggtgctacctctcggccgcctcatgcattcaggggacctgtgcctgtcattcaggcacaaggtgacggggctgcactctggcacactccaggtgtttgtgagaaaacacggtgcccacggagcagccctgtggggaagaaatggtggccatggctggaggcaaacacagatcaccttgcgaggggctgacatcaagagcgtcgtcttcaaaggtgaaaaaaggcgtggtcacactggggagattggattagatgatgtgagcttgaaaaaaggccactgctctgaagaacgctaacaactccagaactaacaatgaactcctatgttgctctatcctctttttccaattctcatcttctctcctcttctcccttttatcaggcctaggagaagagtgggtcagtgggtcagaaggaagtctatttggtgacccaggtttttctggcctgcttttgtgcaatcccaatgaacagtgataccctccttgaaatacaggggcatcgcagacacatcaaagccatctgtgggtgttgccttccatcctgtgtctctttcaggaaggcattcagcatgcgtgagccataccatcctccatcctgattacaaggtgctccttgtagcaaattatgagagtgagttacgggagcagtttttaaaagaaatctttgcagatggctatgatgttatgtgttcggtgttgtaccatgagtagtattgacttcccttgagatatgatgtacaatgtgcttgtgaaattgacttaccctcttcacttaagttagttctggcctgacctgaactctgacttttactgccattcactttataaaataagggtgtgtaacatatcaagatacatttatttttatctgttttttttttcctgttaaagacaattatgtagagtgggcacgtaatccctccttagtagtattgtgttttgtgtaaatgtgctattgatattaagtatttacatgttccaaatatttacagactctagttgcaaggtaaagggcagcttgtgatctcaaaaaaatacatggtgaaatgtcatccagttccatgaccttatattggcagcagtaggaaattggcagaagtgttgggttgtggtaacggagtgatgaatttttttttaatggccttgagtttgatctctgcaaaggataggaaacctttaggaagacaagaaactgcagttaatttagaactgtcactgtttcaagttacactttaaaaccacagcttttaccatcataacatggctctggtaatatgtaggaagctttataaaagttttggttgattcagaaaaaggatcctgttgcagagtgagaggaagcatagggggaaactccattggaacagattttcacacaacgttttaaattgatataagtttaggcagttgtagttcataacttatgttgctcatgttgtgctgtgtcaggatgggataggaagcaagtcccatgcttagaggcatgggatgtgttggaacgggatttacacacactggaggagcagggcaagttggaattctaagatccatgaacccccaactgtatttcctccctgcatattttaccaatatattaaaaaacaatgtaacttttaaaaggcatcattcctgaggtttgtcttaatttctgattaagtaatcagaatattttctgctatttttgccaggaatcacaaagatgattaaagggttggaaaaaaagatctatgatggaaaattaaaggaactgggattattgagcctggagaagagaagactgaggggcaaaccattgatggttttcaagtatatgaagggttggcacagagagggtggcgaccagctgttctccatatgcactaagaatagaacaagaggaaactggcttagactagagtataagggagcatttcttggcaggggccattgttagaatacttcataaaaaaagaagtgtgaaaatctcagtatctctctctctttctaaaaaattagataaaaatttgtctatttaagatggttaaagatgttcttacccaaggaaaagtaacaaattatagaatttcccaaaagatgttttgatcctactagtagtatgcagtgaaaatctttagaactaaataatttggacaaggcttaatttaggcatttccctcttgacctcctaatggagagggattgaaaggggaagagcccaccaaatgctgagctcactgaaatatctctcccttatggcaatcctagcagtattaaagaaaaaaggaaactatttattccaaatgagagtatgatggacagatattttagtatctcagtaatgtcctagtgtggcggtggttttcaatgtttcttcatgttaaaggtataagcctttcatttgttcaatggatgatgtttcagatttttttttttttaagagatccttcaaggaacacagttcagagagattttcatcgggtgcattctctctgcttcgtgtgtgacaagttatcttggctgctgagaaagagtgccctgccccacaccggcagacctttccttcacctcatcagtatgattcagtttctcttatcaattggactctcccaggttccacagaacagtaatattttttgaacaataggtacaatagaaggtcttctgtcatttaacctggtaaaggcagggctggagggggaaaataaatcattaagcctttgagtaacggcagaatatatggctgtagatccatttttaatggttcatttcctttatggtcatataactgcacagctgaagatgaaaggggaaaataaatgaaaattttacttttcgatgccaatgatacattgcactaaactgatggaagaagttatccaaagtactgtataacatcttgtttattatttaatgttttctaaaataaaaaatgttagtggttttccaaatggcctaataaaaacaattatttgtaaataaaaacactgttagtaatacca

SEQ ID NO: 158311 - DNA, 2481 bp, Homo sapiens
  Payload ID: 10989
  Gene Symbol: NPNT
  Gene Name: nephronectin
  Uniprot ID: Q6UXI9
  ENST ID: ENST00000427316
  CDS Start-End: 213-2000
agaagggagcgggagggggctccgggcgccgcgcagcagacctgctccggccgcgcgcctcgccgctgtcctccgggagcggcagcagtagcccgggcggcgagggctgggggttcctcgagactctcagaggggcgcctcccatcggcgcccaccaccccaacctgttcctcgcgcgccactgcgctgcgccccaggacccgctgcccaacatggattttctcctggcgctggtgctggtatcctcgctctacctgcaggcggccgccgagttcgacgggaggtggcccaggcaaatagtgtcatcgattggcctatgtcgttatggtgggaggattgactgctgctggggctgggctcgccagtcttggggacagtgtcagcctgtgtgccaaccacgatgcaaacatggtgaatgtatcgggccaaacaagtgcaagtgtcatcctggttatgctggaaaaacctgtaatcaagacgagcacatcccagctcctcttgaccaaggcagtgaacagcctcttttccaacccctggatcaccaagccacaagtttgccttcaagggatctaaatgagtgtggcctgaagccccggccctgtaagcacaggtgcatgaacacttacggcagctacaagtgctactgtctcaacggatatatgctcatgccggatggttcctgctcaagtgccctgacctgctccatggcaaactgtcagtatggctgtgatgttgttaaaggacaaatacggtgccagtgcccatcccctggcctgcagctggctcctgatgggaggacctgtgtagatgttgatgaatgtgctacaggaagagcctcctgccctagatttaggcaatgtgtcaacacttttgggagctacatctgcaagtgtcataaaggcttcgatctcatgtatattggaggcaaatatcaatgtcatgacatagacgaatgctcacttggtcagtatcagtgcagcagctttgctcgatgttataacatacgtgggtcctacaagtgcaaatgtaaagaaggataccagggtgatggactgacttgtgtgtatatcccaaaagttatgattgaaccttcaggtccaattcatgtaccaaagggaaatggtaccattttaaagggtgacacaggaaataataattggattcctgatgttggaagtacttggtggcctccgaagacaccatatattcctcctatcattaccaacaggcctacttctaagccaacaacaagacctacaccaaagccaacaccaattcctactccaccaccaccaccacccctgccaacagagctcagaacacctctaccacctacaaccccagaaaggccaaccaccggactgacaactatagcaccagctgccagtacacctccaggagggattacagttgacaacagggtacagacagaccctcagaaacccagaggagatgtgttcattccacggcaaccttcaaatgacttgtttgaaatatttgaaatagaaagaggagtcagtgcagacgatgaagcaaaggatgatccaggtgttctggtacacagttgtaattttgaccatggactttgtggatggatcagggagaaagacaatgacttgcactgggaaccaatcagggacccagcaggtggacaatatctgacagtgtcggcagccaaagccccagggggaaaagctgcacgcttggtgctacctctcggccgcctcatgcattcaggggacctgtgcctgtcattcaggcacaaggtgacggggctgcactctggcacactccaggtgtttgtgagaaaacacggtgcccacggagcagccctgtggggaagaaatggtggccatggctggaggcaaacacagatcaccttgcgaggggctgacatcaagagcgtcgtcttcaaaggtgaaaaaaggcgtggtcacactggggagattggattagatgatgtgagcttgaaaaaaggccactgctctgaagaacgctaacaactccagaactaacaatgaactcctatgttgctctatcctctttttccaattctcatcttctctcctcttctcccttttatcaggcctaggagaagagtgggtcagtgggtcagaaggaagtctatttggtgacccaggtttttctggcctgcttttgtgcaatcccaatgaacagtgataccctccttgaaatacaggggcatcgcagacacatcaaagccatctgtgggtgttgccttccatcctgtgtctctttcaggaaggcattcagcatgcgtgagccataccatcctccatcctgattacaaggtgctccttgtagcaaattatgagagtgagttacgggagcagtttttaaaagaaatctttgcagatggctatgatgttatgtgttcggtgttgtaccatgagtagtattgacttcccttgagatatgatgtacaatgtgcttgtgaaattgacttaccctcttcactta

SEQ ID NO: 158312 - DNA, 2419 bp, Homo sapiens
  Payload ID: 10989
  Gene Symbol: NPNT
  Gene Name: nephronectin
  Uniprot ID: Q6UXI9
  ENST ID: ENST00000453617
  CDS Start-End: 214-1962
tagaagggagcgggagggggctccgggcgccgcgcagcagacctgctccggccgcgcgcctcgccgctgtcctccgggagcggcagcagtagcccgggcggcgagggctgggggttcctcgagactctcagaggggcgcctcccatcggcgcccaccaccccaacctgttcctcgcgcgccactgcgctgcgccccaggacccgctgcccaacatggattttctcctggcgctggtgctggtatcctcgctctacctgcaggcggccgccgagttcgacgggaggtggcccaggcaaatagtgtcatcgattggcctatgtcgttatggtgggaggattgactgctgctggggctgggctcgccagtcttggggacagtgtcagcctttctacgtcttaaggcagagaatagccaggataaggtgccagctcaaagctgtgtgccaaccacgatgcaaacatggtgaatgtatcgggccaaacaagtgcaagtgtcatcctggttatgctggaaaaacctgtaatcaagatctaaatgagtgtggcctgaagccccggccctgtaagcacaggtgcatgaacacttacggcagctacaagtgctactgtctcaacggatatatgctcatgccggatggttcctgctcaagtgccctgacctgctccatggcaaactgtcagtatggctgtgatgttgttaaaggacaaatacggtgccagtgcccatcccctggcctgcagctggctcctgatgggaggacctgtgtagatgttgatgaatgtgctacaggaagagcctcctgccctagatttaggcaatgtgtcaacacttttgggagctacatctgcaagtgtcataaaggcttcgatctcatgtatattggaggcaaatatcaatgtcatgacatagacgaatgctcacttggtcagtatcagtgcagcagctttgctcgatgttataacatacgtgggtcctacaagtgcaaatgtaaagaaggataccagggtgatggactgacttgtgtgtatatcccaaaagttatgattgaaccttcaggtccaattcatgtaccaaagggaaatggtaccattttaaagggtgacacaggaaataataattggattcctgatgttggaagtacttggtggcctccgaagacaccatatattcctcctatcattaccaacaggcctacttctaagccaacaacaagacctacaccaaagccaacaccaattcctactccaccaccaccaccacccctgccaacagagctcagaacacctctaccacctacaaccccagaaaggccaaccaccggactgacaactatagcaccagctgccagtacacctccaggagggattacagttgacaacagggtacagacagaccctcagaaacccagaggagatgtgttcattccacggcaaccttcaaatgacttgtttgaaatatttgaaatagaaagaggagtcagtgcagacgatgaagcaaaggatgatccaggtgttctggtacacagttgtaattttgaccatggactttgtggatggatcagggagaaagacaatgacttgcactgggaaccaatcagggacccagcaggtggacaatatctgacagtgtcggcagccaaagccccagggggaaaagctgcacgcttggtgctacctctcggccgcctcatgcattcaggggacctgtgcctgtcattcaggcacaaggtgacggggctgcactctggcacactccaggtgtttgtgagaaaacacggtgcccacggagcagccctgtggggaagaaatggtggccatggctggaggcaaacacagatcaccttgcgaggggctgacatcaagagcgtcgtcttcaaaggtgaaaaaaggcgtggtcacactggggagattggattagatgatgtgagcttgaaaaaaggccactgctctgaagaacgctaacaactccagaactaacaatgaactcctatgttgctctatcctctttttccaattctcatcttctctcctcttctcccttttatcaggcctaggagaagagtgggtcagtgggtcagaaggaagtctatttggtgacccaggtttttctggcctgcttttgtgcaatcccaatgaacagtgataccctccttgaaatacaggggcatcgcagacacatcaaagccatctgtgggtgttgccttccatcctgtgtctctttcaggaaggcattcagcatgcgtgagccataccatcctccatcctgattacaaggtgctccttgtagcaaattatgagagtgagttacgggagcagtttttaaaagaaatctttgcagatggctatgatgttatgtgttcggtgttgtaccatgagtagtattgacttcccttgagatatgatgtacaatgtgcttgtg

SEQ ID NO: 158313 - DNA, 1354 bp, Homo sapiens
  Payload ID: 10989
  Gene Symbol: NPNT
  Gene Name: nephronectin
  ENST ID: ENST00000504787
  CDS Start-End: 1-313
tggactttgtggatggatcagggagaaagacaatgacttgcactgggaaccaatcagggacccagcaggaatcacaaagatgattaaagggttggaaaaaaagatctatgatggaaaattaaaggaactgggattattgagcctggagaagagaagactgaggggcaaaccattgatggttttcaagtatatgaagggttggcacagagagggtggcgaccagctgttctccatatgcactaagaatagaacaagaggaaactggcttagactagagtataagggagcatttcttggcaggggccattgttagaatacttcataaaaaaagaagtgtgaaaatctcagtatctctctctctttctaaaaaattagataaaaatttgtctatttaagatggttaaagatgttcttacccaaggaaaagtaacaaattatagaatttcccaaaagatgttttgatcctactagtagtatgcagtgaaaatctttagaactaaataatttggacaaggcttaatttaggcatttccctcttgacctcctaatggagagggattgaaaggggaagagcccaccaaatgctgagctcactgaaatatctctcccttatggcaatcctagcagtattaaagaaaaaaggaaactatttattccaaatgagagtatgatggacagatattttagtatctcagtaatgtcctagtgtggcggtggttttcaatgtttcttcatgttaaaggtataagcctttcatttgttcaatggatgatgtttcagatttttttttttttaagagatccttcaaggaacacagttcagagagattttcatcgggtgcattctctctgcttcgtgtgtgacaagttatcttggctgctgagaaagagtgccctgccccacaccggcagacctttccttcacctcatcagtatgattcagtttctcttatcaattggactctcccaggttccacagaacagtaatattttttgaacaataggtacaatagaaggtcttctgtcatttaacctggtaaaggcagggctggagggggaaaataaatcattaagcctttgagtaacggcagaatatatggctgtagatccatttttaatggttcatttcctttatggtcatataactgcacagctgaagatgaaaggggaaaataaatgaaaattttacttttcgatgccaatgatacattgcactaaactgatggaagaagttatccaaagtactgtataacatcttgtttattatttaatgttttctaaaataaaaaatgttagtggttttccaaatggcctaataaaaacaattatttgtaaataaaaacactgttagtaat

SEQ ID NO: 158314 - DNA, 2362 bp, Homo sapiens
  Payload ID: 10989
  Gene Symbol: NPNT
  Gene Name: nephronectin
  Uniprot ID: Q6UXI9
  ENST ID: ENST00000514622
  CDS Start-End: 213-1823
agaagggagcgggagggggctccgggcgccgcgcagcagacctgctccggccgcgcgcctcgccgctgtcctccgggagcggcagcagtagcccgggcggcgagggctgggggttcctcgagactctcagaggggcgcctcccatcggcgcccaccaccccaacctgttcctcgcgcgccactgcgctgcgccccaggacccgctgcccaacatggattttctcctggcgctggtgctggtatcctcgctctacctgcaggcggccgccgagttcgacgggaggtggcccaggcaaatagtgtcatcgattggcctatgtcgttatggtgggaggattgactgctgctggggctgggctcgccagtcttggggacagtgtcagcctgtgtgccaaccacgatgcaaacatggtgaatgtatcgggccaaacaagtgcaagtgtcatcctggttatgctggaaaaacctgtaatcaagatctaaatgagtgtggcctgaagccccggccctgtaagcacaggtgcatgaacacttacggcagctacaagtgctactgtctcaacggatatatgctcatgccggatggttcctgctcaagtgccctgacctgctccatggcaaactgtcagtatggctgtgatgttgttaaaggacaaatacggtgccagtgcccatcccctggcctgcagctggctcctgatgggaggacctgtgtagatgttgatgaatgtgctacaggaagagcctcctgccctagatttaggcaatgtgtcaacacttttgggagctacatctgcaagtgtcataaaggcttcgatctcatgtatattggaggcaaatatcaatgtcatgacatagacgaatgctcacttggtcagtatcagtgcagcagctttgctcgatgttataacatacgtgggtcctacaagtgcaaatgtaaagaaggataccagggtgatggactgacttgtgtgtatatcccaaaagttatgattgaaccttcaggtccaattcatgtaccaaagggaaatggtaccattttaaagggtgacacaggaaataataattggattcctgatgttggaagtacttggtggcctccgaagacaccatatattcctcctatcattaccaacaggcctacttctaagccaacaacaagacctacaccaaagccaacaccaattcctactccaccaccaccaccacccctgccaacagagctcagaacacctctaccacctacaaccccagaaaggccaaccaccggactgacaactatagcaccagctgccagtacacctccaggagggattacagttgacaacagggtacagacagaccctcagaaacccagaggagatgtgttcagtgttctggtacacagttgtaattttgaccatggactttgtggatggatcagggagaaagacaatgacttgcactgggaaccaatcagggacccagcaggtggacaatatctgacagtgtcggcagccaaagccccagggggaaaagctgcacgcttggtgctacctctcggccgcctcatgcattcaggggacctgtgcctgtcattcaggcacaaggtgacggggctgcactctggcacactccaggtgtttgtgagaaaacacggtgcccacggagcagccctgtggggaagaaatggtggccatggctggaggcaaacacagatcaccttgcgaggggctgacatcaagagcgtcgtcttcaaaggtgaaaaaaggcgtggtcacactggggagattggattagatgatgtgagcttgaaaaaaggccactgctctgaagaacgctaacaactccagaactaacaatgaactcctatgttgctctatcctctttttccaattctcatcttctctcctcttctcccttttatcaggcctaggagaagagtgggtcagtgggtcagaaggaagtctatttggtgacccaggtttttctggcctgcttttgtgcaatcccaatgaacagtgataccctccttgaaatacaggggcatcgcagacacatcaaagccatctgtgggtgttgccttccatcctgtgtctctttcaggaaggcattcagcatgcgtgagccataccatcctccatcctgattacaaggtgctccttgtagcaaattatgagagtgagttacgggagcagtttttaaaagaaatctttgcagatggctatgatgttatgtgttcggtgttgtaccatgagtagtattgacttcccttgagatatgatgtacaatgtgcttgtgaaattgacttaccctcttcacttaagttagttctggcctgacctgaactctgacttttactgccattcactttataaaataa

SEQ ID NO: 158315 - DNA, 2187 bp, Homo sapiens
  Payload ID: 10989
  Gene Symbol: NPNT
  Gene Name: nephronectin
  Uniprot ID: Q6UXI9
  ENST ID: ENST00000506666
  CDS Start-End: 161-1861
gcgcgcctcgccgctgtcctccgggagcggcagcagtagcccgggcggcgagggctgggggttcctcgagactctcagaggggcgcctcccatcggcgcccaccaccccaacctgttcctcgcgcgccactgcgctgcgccccaggacccgctgcccaacatggattttctcctggcgctggtgctggtatcctcgctctacctgcaggcggccgccgagttcgacgggaggtggcccaggcaaatagtgtcatcgattggcctatgtcgttatggtgggaggattgactgctgctggggctgggctcgccagtcttggggacagtgtcagcctgtgtgccaaccacgatgcaaacatggtgaatgtatcgggccaaacaagtgcaagtgtcatcctggttatgctggaaaaacctgtaatcaagacgagcacatcccagctcctcttgaccaaggcagtgaacagcctcttttccaacccctggatcaccaagccacaagtttgccttcaagggatctaaatgagtgtggcctgaagccccggccctgtaagcacaggtgcatgaacacttacggcagctacaagtgctactgtctcaacggatatatgctcatgccggatggttcctgctcaagtgccctgacctgctccatggcaaactgtcagtatggctgtgatgttgttaaaggacaaatacggtgccagtgcccatcccctggcctgcagctggctcctgatgggaggacctgtgtagatgttgatgaatgtgctacaggaagagcctcctgccctagatttaggcaatgtgtcaacacttttgggagctacatctgcaagtgtcataaaggcttcgatctcatgtatattggaggcaaatatcaatgtcatgacatagacgaatgctcacttggtcagtatcagtgcagcagctttgctcgatgttataacatacgtgggtcctacaagtgcaaatgtaaagaaggataccagggtgatggactgacttgtgtgtatatcccaaaagttatgattgaaccttcaggtccaattcatgtaccaaagggaaatggtaccattttaaagggtgacacaggaaataataattggattcctgatgttggaagtacttggtggcctccgaagacaccatatattcctcctatcattaccaacaggcctacttctaagccaacaacaagacctacaccaaagccaacaccaattcctactccaccaccaccaccacccctgccaacagagctcagaacacctctaccacctacaaccccagaaaggccaaccaccggactgacaactatagcaccagctgccagtacacctccaggagggattacagttgacaacagggtacagacagaccctcagaaacccagaggagatgtgttcagtgttctggtacacagttgtaattttgaccatggactttgtggatggatcagggagaaagacaatgacttgcactgggaaccaatcagggacccagcaggtggacaatatctgacagtgtcggcagccaaagccccagggggaaaagctgcacgcttggtgctacctctcggccgcctcatgcattcaggggacctgtgcctgtcattcaggcacaaggtgacggggctgcactctggcacactccaggtgtttgtgagaaaacacggtgcccacggagcagccctgtggggaagaaatggtggccatggctggaggcaaacacagatcaccttgcgaggggctgacatcaagagcgtcgtcttcaaaggtgaaaaaaggcgtggtcacactggggagattggattagatgatgtgagcttgaaaaaaggccactgctctgaagaacgctaacaactccagaactaacaatgaactcctatgttgctctatcctctttttccaattctcatcttctctcctcttctcccttttatcaggcctaggagaagagtgggtcagtgggtcagaaggaagtctatttggtgacccaggtttttctggcctgcttttgtgcaatcccaatgaacagtgataccctccttgaaatacaggggcatcgcagacacatcaaagccatctgtgggtgttgccttccatcctgtgtctctttcaggaaggcattcagcatgcgtgagccataccatcctccatcctgattacaaggtgctccttgtagc

SEQ ID NO: 158316 - DNA, 1829 bp, Homo sapiens
  Payload ID: 10989
  Gene Symbol: NPNT
  Gene Name: nephronectin
  ENST ID: ENST00000503451
  CDS Start-End: 1-1829
atggattttctcctggcgctggtgctggtatcctcgctctacctgcaggcggccgccgagttcgacgggaggtggcccaggcaaatagtgtcatcgattggcctatgtcgttatggtgggaggattgactgctgctggggctgggctcgccagtcttggggacagtgtcagcctttctacgtcttaaggcagagaatagccaggataaggtgccagctcaaagctgtgtgccaaccacgatgcaaacatggtgaatgtatcgggccaaacaagtgcaagtgtcatcctggttatgctggaaaaacctgtaatcaagacgagcacatcccagctcctcttgaccaaggcagtgaacagcctcttttccaacccctggatcaccaagccacaagtttgccttcaagggatctaaatgagtgtggcctgaagccccggccctgtaagcacaggtgcatgaacacttacggcagctacaagtgctactgtctcaacggatatatgctcatgccggatggttcctgctcaagtgccctgacctgctccatggcaaactgtcagtatggctgtgatgttgttaaaggacaaatacggtgccagtgcccatcccctggcctgcagctggctcctgatgggaggacctgtgtagatgttgatgaatgtgctacaggaagagcctcctgccctagatttaggcaatgtgtcaacacttttgggagctacatctgcaagtgtcataaaggcttcgatctcatgtatattggaggcaaatatcaatgtcatgacatagacgaatgctcacttggtcagtatcagtgcagcagctttgctcgatgttataacatacgtgggtcctacaagtgcaaatgtaaagaaggataccagggtgatggactgacttgtgtgtatatcccaaaagttatgattgaaccttcaggtccaattcatgtaccaaagggaaatggtaccattttaaagggtgacacaggaaataataattggattcctgatgttggaagtacttggtggcctccgaagacaccatatattcctcctatcattaccaacaggcctacttctaagccaacaacaagacctacaccaaagccaacaccaattcctactccaccaccaccaccacccctgccaacagagctcagaacacctctaccacctacaaccccagaaaggccaaccaccggactgacaactatagcaccagctgccagtacacctccaggagggattacagttgacaacagggtacagacagaccctcagaaacccagaggagatgtgttcattccacggcaaccttcaaatgacttgtttgaaatatttgaaatagaaagaggagtcagtgcagacgatgaagcaaaggatgatccaggtgttctggtacacagttgtaattttgaccatggactttgtggatggatcagggagaaagacaatgacttgcactgggaaccaatcagggacccagcaggtggacaatatctgacagtgtcggcagccaaagccccagggggaaaagctgcacgcttggtgctacctctcggccgcctcatgcattcaggggacctgtgcctgtcattcaggcacaaggtgacggggctgcactctggcacactccaggtgtttgtgagaaaacacggtgcccacggagcagccctgtggggaagaaatggtggccatggctggaggcaaacacagatcaccttgcgaggggctgacatcaagagcgtcgtcttcaaaggtgaaaaaaggcgtggtcacactggggagattggattagatgatgtgagcttgaaaaaaggccactgctctga

SEQ ID NO: 158317 - DNA, 353 bp, Homo sapiens
  Payload ID: 10989
  Gene Symbol: NPNT
  Gene Name: nephronectin
  ENST ID: ENST00000505917
  CDS Start-End: 1-80
acaatgacttgcactgggaaccaatcagggacccagcagacaattgtagctgtctgcatgcaggtggacttgacttgtagcaactggagacaaggtgtagttctccatgtgtctgagattccagaactagactcaattgtggttccagatcaaatcagcctgcagagaatggctgttccctggtgcacatggagttgagcggagcagcacacttgggcacaggggttggccgtcagctcactgtcctgctgccaccctccaccacctcagaggctgctgtaactttgagaaaataacctttgaacctcagtctctacaatgcttaaataaagagaacattcaattagagaaaa

SEQ ID NO: 158318 - DNA, 543 bp, Homo sapiens
  Payload ID: 10989
  Gene Symbol: NPNT
  Gene Name: nephronectin
  ENST ID: ENST00000504304
  CDS Start-End: 360-543
actcatccctagaggggcagtcctgtcctaatgtgctcgggagttgagctgatagagacagaaacagtctgctcatttcttcttcaaaacccgactggagagccaaatatttcttttggtggcccaggcaaatagtgtcatcgattggcctatgtcgttatggtgggaggattgactgctgctggggctgggctcgccagtcttggggacagtgtcagcctgtgtgccaaccacgatgcaaacatggtgaatgtatcgggccaaacaagtgcaagtgtcatcctggttatgctggaaaaacctgtaatcaagatctaaatgagtgtggcctgaagccccggccctgtaagcacaggtgcatgaacacttacggcagctacaagtgctactgtctcaacggatatatgctcatgccggatggttcctgctcaagtgccctgacctgctccatggcaaactgtcagtatggctgtgatgttgttaaaggacaaatacggtgccagtgcccatcccctggcctgcagctggctcctgatgggagga

SEQ ID NO: 158319 - DNA, 1377 bp, Homo sapiens
  Payload ID: 10989
  Gene Symbol: NPNT
  Gene Name: nephronectin
  ENST ID: ENST00000514837
  CDS Start-End: 1-1360
gtggcccaggcaaatagtgtcatcgattggcctatgtcgttatggtgggaggattgactgctgctggggctgggctcgccagtcttggggacagtgtcagcctgtgtgccaaccacgatgcaaacatggtgaatgtatcgggccaaacaagtgcaagtgtcatcctggttatgctggaaaaacctgtaatcaagatctaaatgagtgtggcctgaagccccggccctgtaagcacaggtgcatgaacacttacggcagctacaagtgctactgtctcaacggatatatgctcatgccggatggttcctgctcaagtgccctgacctgctccatggcaaactgtcagtatggctgtgatgttgttaaaggacaaatacggtgccagtgcccatcccctggcctgcagctggctcctgatgggaggacctgtgtagatgttgatgaatgtgctacaggaagagcctcctgccctagatttaggcaatgtgtcaacacttttgggagctacatctgcaagtgtcataaaggcttcgatctcatgtatattggaggcaaatatcaatgtcatgacatagacgaatgctcacttggtcagtatcagtgcagcagctttgctcgatgttataacatacgtgggtcctacaagtgcaaatgtaaagaaggataccagggtgatggactgacttgtgtgtatatcccaaaagttatgattgaaccttcaggtccaattcatgtaccaaagggaaatggtaccattttaaagggtgacacaggaaataataattggattcctgatgttggaagtacttggtggcctccgaagacaccatatattcctcctatcattaccaacaggcctacttctaagccaacaacaagacctacaccaaagccaacaccaattcctactccaccaccaccaccacccctgccaacagagctcagaacacctctaccacctacaaccccagaaaggccaaccaccggactgacaactatagcaccagctgccagtacacctccaggagggattacagttgacaacagggtacagacagaccctcagaaacccagaggagatgtgttcattccacggcaaccttcaaatgacttgtttgaaatatttgaaatagaaagaggagtcagtgcagacgatgaagcaaaggatgatccaggtgttctggtacacagttgtaattttgaccatggactttgtggatggatcagggagaaagacaatgacttgcactgggaaccaatcagggacccagcagagatccttcaaggaacacagttcagagagattttcatcgggtgcattctctctgcttcgtgtgtgacaagttatcttggctgctgagaaagagtgccctgccc

SEQ ID NO: 158320 - DNA, 3756 bp, Homo sapiens
  Payload ID: 10990
  Gene Symbol: NPHP1
  Gene Name: nephronophthisis 1 (juvenile)
  Uniprot ID: O15259
  ENST ID: ENST00000316534
  CDS Start-End: 75-2276
gatggcgtcaccttctggcgccgccggttggtttccctggcaactggagcaatcagagcaccgcagccagggagatgctggcgagacgacagcgagatcctctccaggccctgcggcgccgcaatcaggagctgaagcaacaggttgatagtttgctttctgagagccaactgaaagaagctctagaacccaataaaagacaacatatttatcaaagatgtatccagttaaagcaggcaatagatgaaaataaaaatgctcttcaaaaattaagcaaagctgatgaatctgcacctgttgcaaactataatcagagaaaagaagaggagcatactcttttggacaagcttacccaacaactgcagggccttgctgtgacaataagcagagaaaatataactgaagttggggcacctactgaagaagaggaagaaagtgaaagtgaagatagtgaagacagtggtggggaggaagaagatgcagaggaggaagaggaagagaaagaggaaaatgaatctcacaaatggtcaaccggtgaagaatacatcgctgttggagattttactgctcagcaagttggagatcttacatttaagaaaggggaaattctccttgtaattgaaaaaaaacctgatggttggtggatagctaaggatgccaaaggaaatgaaggtcttgttcccagaacctacctagagccttatagtgaagaagaagaaggccaagagtcaagtgaagagggcagtgaagaagatgtagaggcggtggatgaaacagcagatggagcagaagttaagcaaagaactgatccccactggagtgctgttcagaaagcgatttcagaggcgggcatcttctgtcttgttaatcatgtctcgttttgctacctaatagttctgatgcgaaataggatggagactgtggaagacaccaatggatctgaaacagggttcagggcatggaatgtacagagcagaggacgtatatttctggtttctaagcctgtgctccaacagataaacactgttgatgtgttaactacgatgggagctattcctgcagggttcaggccttccacgctctcacagcttctggaggaagggaatcaatttcgagcaaattacttcttacaaccagagctcatgccttcacaactggccttcagagatctgatgtgggatgctacagaaggcactattaggtcgagaccaagtcgtatttcattgattctgacattatggagctgtaaaatgattcctcttccaggaatgagcatacaggttctcagcagacatgtacgcctctgtctatttgatggtaataaggttctgagcaacattcatacagtcagagccacatggcaacctaaaaagcccaaaacatggaccttttctccccaggttactcgcatcttaccatgtttgcttgatggtgattgctttatcaggtctaattctgcatctccagatcttggaatattatttgaacttggaatttcttatattcgcaattcaactggtgaaagaggagagttaagctgtggctgggtgtttcttaaactttttgatgccagtggagttcctattccagcaaaaacttatgagcttttcttgaatggtggtactccttatgaaaaaggtattgaagtggacccttcaatatccagaagagcacacggcagtgttttctaccagattatgacaatgagaaggcagcctcaacttctagtgaaactgagatccttgaacagaagatcaagaaatgtactaagtctactgccagaaacattaattggaaatatgtgttctattcacttgttgatattttatcgacaaattcttggagatgtgctcctgaaagacaggatgagcttgcaaagtactgatttaattagccatcccatgctggccaccttccccatgctcttggagcagcctgatgtgatggatgctctcaggagttcgtgggctggaaaagaaagcacattaaaaagatcagagaagagagacaaagagttcctgaagtccacgtttctcctggtttaccatgactgcgtgctcccacttctccactccacacgcctacccccattcaggtgggcagaagaagagactgagactgcacggtggaaagttatcactgacttccttaagcaaaaccaagaaaaccagggcgccctccaagctctgctgtcaccagacggagttcatgaaccttttgacctttcagagcagacctatgacttcttgggtgaaatgagaaagaatgcagtgtgacagtggcagcctctagccctcagcttcccacggaatcagatggatcctccacgattacgtgaataaaatgatggaaccaaaaatcactgtcactttacaacttaggttttactcttttctttctacagaccatatttttaaagaaatgtttatacaataatttaaatattttttaaaaccataaaataaatttttataaggaatactgttatatctaaatttaaacagtatttattttttcaaaaacagctacttaagttaatggtatagatttctataaaagcaagattttgtcaaaaactaaatttatgattattcaagaaagtgaaaaaaacaacctacagaatgggaaaacatatttgcaaatcatctaactgataaaggtctagtatccaaaatatttaaatttatgagtgttaataaaatttatcttgttcaatgaagaggaagttaaagtgatccatttgagaaagttgtatcacttaattcagtctgatacttgaatgtgatttacccctaattaagtacaaaaacagagtcgcttttgccttttcaaatcaagaaaataagtgctctgtcaaaagcacaaaaagaaactttcaggcactggagagtggagtcgactcaccctttcaggccttgttgcatctcagataaacctgtgactgctggtaaaataatgtcccaagcctttccttttagtgataaacagtagcagcctgcgttaattgagcacctactgtgtgtctgagcatttctcattagcccagttaatcctcacacctactgtaggagataggtactgttgttttttattaccgccgaagaaacaggccagataagtgaagtaatttgcctaaggtcacagctaataagtggcacagctaatattcccagtaaagataccatgtataattttctacaacctaagatgttctgccttatcggggcgaaccttttaggattccatgtgaaaataaaatatgaggaaaagtttaacctaaataattagaatcccattagaggtacttttttttgatggcatgctgccttaaaagagccatttatttttagagatctgtcatattatgaaagttctgggctatcttagctaacttatcctaaacccttaacctaaatttaacttgagccccagtctcagaaattaacatggtatgaaggtgtttccaggccaggcgcggtggctcacgcctgtaatcccaacactttgggaggccgaggtgggtggatcacctgaggtcaggagtttgagaccagcctggccaacactatctgtactaaaaacacaaaattagctgggcgtggtagtgcgtgcctgtaatcccagctacttgggaggctgaggtagaagaattgtttgaacctgggaggtggaggttgcagtgagccaagatcgtgccattgcactccagcctaggcaacaagagtgaaactccatctcaaaaaaaaaaaaaaaaaa

SEQ ID NO: 158321 - DNA, 1932 bp, Homo sapiens
  Payload ID: 10990
  Gene Symbol: NPHP1
  Gene Name: nephronophthisis 1 (juvenile)
  Uniprot ID: O15259
  ENST ID: ENST00000355301
  CDS Start-End: 5-1849
ggagatgctggcgagacgacagcgagatcctctccaggccctgcggcgccgcaatcaggagctgaagcaacaggttgatagtttgctttctgagagccaactgaaagaagctctagaacccaataaaagacaacatatttatcaaagagttggggcacctactgaagaagaggaagaaagtgaaagtgaagatagtgaagacagtggtggggaggaagaagatgcagaggaggaagaggaagagaaagaggaaaatgaatctcacaaatggtcaaccggtgaagaatacatcgctgttggagattttactgctcagcaagttggagatcttacatttaagaaaggggaaattctccttgtaattgaaaaaaaacctgatggttggtggatagctaaggatgccaaaggaaatgaaggtcttgttcccagaacctacctagagccttatagtgaagaagaagaaggccaagagtcaagtgaagagggcagtgaagaagatgtagaggcggtggatgaaacagcagatggagcagaagttaagcaaagaactgatccccactggagtgctgttcagaaagcgatttcagagataaacactgttgatgtgttaactacgatgggagctattcctgcagggttcaggccttccacgctctcacagcttctggaggaagggaatcaatttcgagcaaattacttcttacaaccagagctcatgccttcacaactggccttcagagatctgatgtgggatgctacagaaggcactattaggtcgagaccaagtcgtatttcattgattctgacattatggagctgtaaaatgattcctcttccaggaatgagcatacaggttctcagcagacatgtacgcctctgtctatttgatggtaataaggttctgagcaacattcatacagtcagagccacatggcaacctaaaaagcccaaaacatggaccttttctccccaggttactcgcatcttaccatgtttgcttgatggtgattgctttatcaggtctaattctgcatctccagatcttggaatattatttgaacttggaatttcttatattcgcaattcaactggtgaaagaggagagttaagctgtggctgggtgtttcttaaactttttgatgccagtggagttcctattccagcaaaaacttatgagcttttcttgaatggtggtactccttatgaaaaaggtattgaagtggacccttcaatatccagaagagcacacggcagtgttttctaccagattatgacaatgagaaggcagcctcaacttctagtgaaactgagatccttgaacagaagatcaagaaatgtactaagtctactgccagaaacattaattggaaatatgtgttctattcacttgttgatattttatcgacaaattcttggagatgtgctcctgaaagacaggatgagcttgcaaagtactgatttaattagccatcccatgctggccaccttccccatgctcttggagcagcctgatgtgatggatgctctcaggagttcgtgggctggaaaagaaagcacattaaaaagatcagagaagagagacaaagagttcctgaagtccacgtttctcctggtttaccatgactgcgtgctcccacttctccactccacacgcctacccccattcaggtgggcagaagaagagactgagactgcacggtggaaagttatcactgacttccttaagcaaaaccaagaaaaccagggcgccctccaagctctgctgtcaccagacggagttcatgaaccttttgacctttcagagcagacctatgacttcttgggtgaaatgagaaagaatgcagtgtgacagtggcagcctctagccctcagcttcccacggaatcagatggatcctccacgattacgtgaataaaatgatggaaccaaaaa

SEQ ID NO: 158322 - DNA, 2752 bp, Homo sapiens
  Payload ID: 10990
  Gene Symbol: NPHP1
  Gene Name: nephronophthisis 1 (juvenile)
  Uniprot ID: O15259
  ENST ID: ENST00000393272
  CDS Start-End: 99-2297
ggggctgggaggcgggcgcacatcgatggcgtcaccttctggcgccgccggttggtttccctggcaactggagcaatcagagcaccgcagccagggagatgctggcgagacgacagcgagatcctctccaggccctgcggcgccgcaatcaggagctgaagcaacaggttgatagtttgctttctgagagccaactgaaagaagctctagaacccaataaaagacaacatatttatcaaagatgtatccagttaaagcaggcaatagatgaaaataaaaatgctcttcaaaaattaagcaaagctgatgaatctgcacctgttgcaaactataatcagagaaaagaagaggagcatactcttttggacaagcttacccaacaactgcagggccttgctgtgacaataagcagagaaaatataactgaagttggggcacctactgaagaagaggaagaaagtgaaagtgaagatagtgaagacagtggtggggaggaagaagatgcagaggaggaagaggaagagaaagaggaaaatgaatctcacaaatggtcaaccggtgaagaatacatcgctgttggagattttactgctcagcaagttggagatcttacatttaagaaaggggaaattctccttgtaattgaaaaaaaacctgatggttggtggatagctaaggatgccaaaggaaatgaaggtcttgttcccagaacctacctagagccttatagtgaagaagaagaaggccaagagtcaagtgaagagggcagtgaagaagatgtagaggcggtggatgaaacagcagatggagcagaagttaagcaaagaactgatccccactggagtgctgttcagaaagcgatttcagaggcgggcatcttctgtcttgttaatcatgtctcgttttgctacctaatagttctgatgcgaaataggatggagactgtggaagacaccaatggatctgaaacagggttcagggcatggaatgtacagagcagaggacgtatatttctggtttctaagcctgtgctccaaataaacactgttgatgtgttaactacgatgggagctattcctgcagggttcaggccttccacgctctcacagcttctggaggaagggaatcaatttcgagcaaattacttcttacaaccagagctcatgccttcacaactggccttcagagatctgatgtgggatgctacagaaggcactattaggtcgagaccaagtcgtatttcattgattctgacattatggagctgtaaaatgattcctcttccaggaatgagcatacaggttctcagcagacatgtacgcctctgtctatttgatggtaataaggttctgagcaacattcatacagtcagagccacatggcaacctaaaaagcccaaaacatggaccttttctccccaggttactcgcatcttaccatgtttgcttgatggtgattgctttatcaggtctaattctgcatctccagatcttggaatattatttgaacttggaatttcttatattcgcaattcaactggtgaaagaggagagttaagctgtggctgggtgtttcttaaactttttgatgccagtggagttcctattccagcaaaaacttatgagcttttcttgaatggtggtactccttatgaaaaaggtattgaagtggacccttcaatatccagaagagcacacggcagtgttttctaccagattatgacaatgagaaggcagcctcaacttctagtgaaactgagatccttgaacagaagatcaagaaatgtactaagtctactgccagaaacattaattggaaatatgtgttctattcacttgttgatattttatcgacaaattcttggagatgtgctcctgaaagacaggatgagcttgcaaagtactgatttaattagccatcccatgctggccaccttccccatgctcttggagcagcctgatgtgatggatgctctcaggagttcgtgggctggaaaagaaagcacattaaaaagatcagagaagagagacaaagagttcctgaagtccacgtttctcctggtttaccatgactgcgtgctcccacttctccactccacacgcctacccccattcaggtgggcagaagaagagactgagactgcacggtggaaagttatcactgacttccttaagcaaaaccaagaaaaccagggcgccctccaagctctgctgtcaccagacggagttcatgaaccttttgacctttcagagcagacctatgacttcttgggtgaaatgagaaagaatgcagtgtgacagtggcagcctctagccctcagcttcccacggaatcagatggatcctccacgattacgtgaataaaatgatggaaccaaaaatcactgtcactttacaacttaggttttactcttttctttctacagaccatatttttaaagaaatgtttatacaataatttaaatattttttaaaaccataaaataaatttttataaggaatactgttatatctaaatttaaacagtatttattttttcaaaaacagctacttaagttaatggtatagatttctataaaagcaagattttgtcaaaaactaaatttatgattattcaagaaagtgaaaaaaacaacctacagaatgggaaaacatatttgcaaatcatctaactgataaaggtctagtatccaaaatatttaaatttatgagtgttaataaaatttatcttgttcaatgaagaggaagttaaa

SEQ ID NO: 158323 - DNA, 2513 bp, Homo sapiens
  Payload ID: 10990
  Gene Symbol: NPHP1
  Gene Name: nephronophthisis 1 (juvenile)
  Uniprot ID: O15259
  ENST ID: ENST00000445609
  CDS Start-End: 25-2058
aatcagagcaccgcagccagggagatgctggcgagacgacagcgagatcctctccaggccctgcggcgccgcaatcaggagctgaagcaacaggttgatagtttgctttctgagagccaactgaaagaagctctagaacccaataaaagacaacatatttatcaaagatgtatccagttaaagcaggcaatagatgaaaataaaaatgctcttcaaaaattaagcaaagctgatgaatctgcacctgttgcaaactataatcagagaaaagaagaggagcatactcttttggacaagcttacccaacaactgcagggccttgctgtgacaataagcagagaaaatataactgaagttggggcacctactgaagaagaggaagaaagtgaaagtgaagatagtgaagacagtggtggggaggaagaagatgcagaggaggaagaggaagagaaagaggaaaatgaatctcacaaatggtcaaccggtgaagaatacatcgctgttggagattttactgctcagcaagttggagatcttacatttaagaaaggggaaattctccttgtaattgaaaaaaaacctgatggttggtggatagctaaggatgccaaaggaaatgaaggtcttgttcccagaacctacctagagccttatagtgaagaagaagaaggccaagagtcaagtgaagagggcagtgaagaagatgtagaggcggtggatgaaacagcagatggagcagaagttaagcaaagaactgatccccactggagtgctgttcagaaagcgatttcagagcagataaacactgttgatgtgttaactacgatgggagctattcctgcagggttcaggccttccacgctctcacagcttctggaggaagggaatcaatttcgagcaaattacttcttacaaccagagctcatgccttcacaactggccttcagagatctgatgtgggatgctacagaaggcactattaggtcgagaccaagtcgtatttcattgattctgacattatggagctgtaaaatgattcctcttccaggaatgagcatacaggttctcagcagacatgtacgcctctgtctatttgatggtaataaggttctgagcaacattcatacagtcagagccacatggcaacctaaaaagcccaaaacatggaccttttctccccaggttactcgcatcttaccatgtttgcttgatggtgattgctttatcaggtctaattctgcatctccagatcttggaatattatttgaacttggaatttcttatattcgcaattcaactggtgaaagaggagagttaagctgtggctgggtgtttcttaaactttttgatgccagtggagttcctattccagcaaaaacttatgagcttttcttgaatggtggtactccttatgaaaaaggtattgaagtggacccttcaatatccagaagagcacacggcagtgttttctaccagattatgacaatgagaaggcagcctcaacttctagtgaaactgagatccttgaacagaagatcaagaaatgtactaagtctactgccagaaacattaattggaaatatgtgttctattcacttgttgatattttatcgacaaattcttggagatgtgctcctgaaagacaggatgagcttgcaaagtactgatttaattagccatcccatgctggccaccttccccatgctcttggagcagcctgatgtgatggatgctctcaggagttcgtgggctggaaaagaaagcacattaaaaagatcagagaagagagacaaagagttcctgaagtccacgtttctcctggtttaccatgactgcgtgctcccacttctccactccacacgcctacccccattcaggtgggcagaagaagagactgagactgcacggtggaaagttatcactgacttccttaagcaaaaccaagaaaaccagggcgccctccaagctctgctgtcaccagacggagttcatgaaccttttgacctttcagagcagacctatgacttcttgggtgaaatgagaaagaatgcagtgtgacagtggcagcctctagccctcagcttcccacggaatcagatggatcctccacgattacgtgaataaaatgatggaaccaaaaatcactgtcactttacaacttaggttttactcttttctttctacagaccatatttttaaagaaatgtttatacaataatttaaatattttttaaaaccataaaataaatttttataaggaatactgttatatctaaatttaaacagtatttattttttcaaaaacagctacttaagttaatggtatagatttctataaaagcaagattttgtcaaaaactaaatttatgattattcaagaaagtgaaaaaaacaacctacagaatgggaaaacatatttgcaaatcatctaactgataaaggtctagtatccaaaatatttaaatttatgagtgttaataaaatttatcttgttcaatgaagaggaagttaaa

SEQ ID NO: 158324 - DNA, 357 bp, Homo sapiens
  Payload ID: 10990
  Gene Symbol: NPHP1
  Gene Name: nephronophthisis 1 (juvenile)
  ENST ID: ENST00000422492
  CDS Start-End: 1-143
atttaattagccatcccatgctggccaccttccccatgctcttggagcagcctgatgtgatggatgctctcaggagttcgtgggctggaaaagaaagcacattaaaaagatcagagaaggtaaaatatgagtctccacactgaactccatatttgcagtacctggtgtttgcttgcctattctaatcatgtctcttttttagcaaaagtagccatagtcataatccctcttaaccagggaaactgtttcattatggctgcaaaaacacattccaagagggttacgcatgatcgttagctaatgtgagaaggaatacttgttcaagacagccatttcagattactgagttttatttaa

SEQ ID NO: 158325 - DNA, 2246 bp, Homo sapiens
  Payload ID: 10990
  Gene Symbol: NPHP1
  Gene Name: nephronophthisis 1 (juvenile)
  ENST ID: ENST00000417665
  CDS Start-End: 28-2163
agcaatcagagcaccgcagccagggagatgctggcgagacgacagcgagatcctctccaggccctgcggcgccgcaatcaggagctgaagcaacaggttgatagtttgctttctgagagccaactgaaagaagctctagaacccaataaaagacaacatatttatcaaagatgtatccagttaaagcaggcaatagatgaaaataaaaatgctcttcaaaaattaagcaaagctgatgaatctgcacctgttgcaaactataatcagagaaaagaagaggagcatactcttttggacaagcttacccaacaactgcagggccttgctgtgacaataagcagagaaaatataactgaagttggggcacctactgaagaagaggaagaaagtgaaagtgaagatagtgaagacagtggtggggaggaagaagatgcagaggaggaagaggaagagaaagaggaaaatgaatctcacaaatggtcaaccggtgaagaatacatcgctgttggagattttactgctcagcaagttggagatcttacatttaagaaaggggaaattctccttgtaattgaaaaaaaacctgatggttggtggatagctaaggatgccaaaggaaatgaaggtcttgttcccagaacctacctagagccttatagtgaagaagaagaaggccaagagtcaagtgaagagggcagtgaagaagatgtagaggcggtggatgaaacagcagatggagcagaagttaagcaaagaactgatccccactggagtgctgttcagaaagcgatttcagagataaacactgttgatgtgttaactacgatgggagctattcctgcagggttcaggccttccacgctctcacagcttctggaggaagggaatcaatttcgagcaaattacttcttacaaccagagctcatgccttcacaactggccttcagagatctgatgtgggatgctacagaaggcactattaggtcgagaccaagtcgtatttcattgattctgacattatggagctgtaaaatgattcctcttccaggaatgagcatacaggttctcagcagacatgtacgcctctgtctatttgatggtaataaggttctgagcaacattcatacagtcagagccacatggcaacctaaaaagcccaaaacatggaccttttctccccaggttactcgcatcttaccatgtttgcttgatggtgattgctttatcaggtctaattctgcatctccagatcttggaatattatttgaacttggaatttcttatattcgcaattcaactggtgaaagaggagagttaagctgtggctgggtgtttcttaaactttttgatgccagtggagttcctattccagcaaaaacttatgagcttttcttgaatggtggtactccttatgaaaaaggtattgaagtggacccttcaatatccagaagagcacacggcagtgttttctaccagattatgacaatgagaaggcagcctcaacttctagtgaaactgagatccttgaacagaagatcaagaaatgtactaagtctactgccagaaacattaattggaaatatgtgttctattcacttgttgatattttatcgacaaattcttggagatgtgctcctgaaagacaggatgagcttgcaaagtactgatttaattagccatcccatgctggccaccttccccatgctcttggagcagcctgatgtgatggatgctctcaggagttcgtgggctggaaaagaaagcacattaaaaagatcagagaagctctcaaagcctgtatcaccaagagaagggaaaaaaaaatggcctgagctgtaccatatattgaaaacaatgcattgctcctgcttaccttgctataaaatcatgagagacaaagagttcctgaagtccacgtttctcctggtttaccatgactgcgtgctcccacttctccactccacacgcctacccccattcaggtgggcagaagaagagactgagactgcacggtggaaagttatcactgacttccttaagcaaaaccaagaaaaccagggcgccctccaagctctgctgtcaccagacggagttcatgaaccttttgacctttcagagcagacctatgacttcttgggtgaaatgagaaagaatgcagtgtgacagtggcagcctctagccctcagcttcccacggaatcagatggatcctccacgattacgtgaataaaatgatggaaccaaaaa

SEQ ID NO: 158326 - DNA, 486 bp, Homo sapiens
  Payload ID: 10990
  Gene Symbol: NPHP1
  Gene Name: nephronophthisis 1 (juvenile)
  ENST ID: ENST00000449600
  CDS Start-End: 1-137
cgagacgacagcgagatcctctccaggccctgcggcgccgcaatcaggagctgaagcaacagaggacacctgaagctgaatatggaacagattttctattcggtgtctgtaggacaagtaatcaacagcccctctgagtcaggcctgtgatgactggctctatcactaggttgatagtttgctttctgagagccaactgaaagaagctctagaacccaataaaagacaacatatttatcaaagatgtatccagttaaagcaggcaatagatgaaaataaaaatgctcttcaaaaattaagcaaagtgaggaaattgaagctctcagtggtgaagcatccatgcctcttctgtcaataagtggcagaacttgggattggtgcctgtctcattgactttaaagccgatcttctgtcagaacatatctcttactgactatggaaggtctataatacttagcaagaaaataaaagagaaacctaaaacaa

SEQ ID NO: 158327 - DNA, 742 bp, Homo sapiens
  Payload ID: 10990
  Gene Symbol: NPHP1
  Gene Name: nephronophthisis 1 (juvenile)
  ENST ID: ENST00000418527
  CDS Start-End: 32-397
ctggagcaatcagagcaccgcagccagggagatgctggcgagacgacagcgagatcctctccaggccctgcggcgccgcaatcaggagctgaagcaacaggttgatagtttgctttctgagagccaactgaaagaagctctagaacccaataaaagacaacatatttatcaaagatgtatccagttaaagcaggcaatagatgaaaataaaaatgctcttcaaaaattaagcaaagctgatgaatctgcacctgttgcaaactataatcagagaaaagaagaggagcatactcttttggacaagcttacccaacaactgcagggccttgctgtgacaataagcagagaaaatataactgagtatgcttcctttctacctttcttttttcttttttaaagatatatcaccaatagctttaatgtttaactcaaagacatatagcagtatagatataaacaaatgacactaacaatagaatcagtcaacatttatttattgtgtataatagaaggtgttagatcccatgagagatggaaagaagtgtaagtcatagtctctgccctcaggcaatttataatttagttgaaacaaaacagagatctgaaaagctaaatgaacaaatgttagaaaataaagatgatatatttaatgtcaatgttgatgtgtaaaagggaaatgatttggaatgtctacttgcattgttctccctttcataaacattctttaaaaatttgaagcaaa

SEQ ID NO: 158328 - DNA, 4362 bp, Homo sapiens
  Payload ID: 10991
  Gene Symbol: NPHP3
  Gene Name: nephronophthisis 3 (adolescent)
  Uniprot ID: Q7Z494
  ENST ID: ENST00000337331
  CDS Start-End: 88-4080
gttccgttcctctgccccaccccgtcccgttccgttccgctgcccagtcctgctggtactcactaggtagtagcggcaacggacgccatggggaccgcctcgtcgctcgtgagccccgcgggcggggaagtgatcgaggacacgtacggggcgggcggcggcgaggcctgcgagatcccggtggaggtgaagcccaaggcccgcctgctgcgcaactcgttccgccgaggcgcgggggcggcagcaggggccgggcccgggtcgctgccccgcggggtgggcgcgggcgggctgctgggggccagcttcaagtccactggctcgtcggtgccagagctggagtacgcggcggccgagtacgagcggctcaggaaggagtacgagatctttcgcgtcagcaagaaccaggagttgttgtccatgggccgccgcgaggccaagctggacacggagaacaagcggctgcgggccgaactgcaggcacttcaaaaaacgtatcagaagatacttcgagaaaaagaaagtgctttagaagcgaaataccaagcaatggagagagcagcaacatttgaacatgacagagataaagttaaaaggcaattcaagatttttagggagaccaaagaaaatgaaattcaggacttactgagggccaagagggagttggagagcaaacttcagaggctacaggctcagggtatccaagtatttgatcctggggagtctgattcagatgacaactgtacagatgtcactgctgctggaacccaatgtgaatattggactggcggagccttgggaagtgaaccttccataggaagcatgatccagcttcagcagtccttcagaggccctgagtttgcccatagttctatagatgtggaaggaccctttgcaaatgttaatagagatgactgggatattgctgtagctagtttattacaagttactcctctgttttcacattctctgtggagtaacactgtcagatgttacctcatttatacagatgaaacccagcctgagatggatcttttccttaaggactattcacctaaacttaagagaatgtgcgagacaatgggatattttttccatgctgtttattttccaatagatgttgaaaatcaatacctcactgtaagaaaatgggaaattgagaaaagttctttagttattttatttattcacttaacattaccaagccttttattggaagactgtgaagaagcttttctgaaaaaccctgaaggaaaacctcgattaatctttcatcgtttggaagatggaaaagtcagttctgactctgtccagcaattgattgatcaagtttctaatctaaacaagaccagcaaagccaagatcattgatcactcaggagatcctgcagaaggagtatataaaacttatatttgtgtagaaaagattattaaacaggacatactgggttttgagaacacagacttggagactaaggatttgggcagtgaggattccattccagaagaagatgattttggtgatgttctgtgggacatacatgatgaacaagagcaaatggaaacttttcagcaggcttctaattcagcccatgagttgggatttgagaaatattaccaacgccttaatgatctagtggcagcaccagccccgattccacctcttctcgtgtctggaggaccaggttctgggaagtctcttcttttatcaaagtggattcaattacaacagaagaattcccccaacacactgattctttcccattttgtgggaaggcccatgtcaaccagctcagagtcctccttgattattaaacgactaactctaaagttgatgcagcactcttggtcagtctctgctctgacactggatcctgctaagcttctggaagaatttccacgttggctggaaaaactctctgctcgtcatcaaggcagcatcatcatcgttattgattctatagatcaagttcagcaagttgaaaaacacatgaaatggctgatagatccactgccagtgaatgtaagagtaattgtttctgtgaatgtagaaacatgccctccagcatggaggttgtggcctacacttcatcttgatcccttaagtccaaaagatgcaaaatctattataattgcagaatgccactctgtagacattaaattgagtaaagagcaggagaagaagctagaacgacactgtcgttctgctacaacctgcaatgccctttatgtcacccttttcggcaaaatgatcgcgcgtgctgggagagcaggcaatttagataaaatccttcatcagtgtttccagtgtcaagatactctttcattatatagacttgttctgcactctatccgggagtccatggcaaatgatgtggataaagagctaatgaagcagatcctctgccttgtcaatgttagtcacaatggtgtgagtgaatcagaactgatggaactctatcctgagatgtcctggactttcttgacctcccttattcacagtttatacaaaatgtgtttgttgacttatggatgtggcttgcttaggtttcaacatctgcaggcttgggaaacagtgagattggagtacctggaaggccccactgttacttcttcatacaggcaaaagctaatcaactatttcaccttgcagctaagtcaggacagagtgacttggagaagtgcagatgaactcccgtggctttttcagcagcagggaagtaaacagaagctgcatgattgccttcttaatctctttgtgtctcaaaacctttataaaaggggacactttgctgagttgctgagttattggcagtttgttggcaaagacaaaagtgcaatggcaacagaatacttcgattcattgaagcagtatgagaaaaactgcgaaggcgaggacaacatgagttgcttagctgatctttatgaaaccttggggcgatttctcaaggatctaggccttctcagtcaggccatagtacctttgcagaggtctttagagattcgagaaacagctttagatcccgatcacccaagagtagcccagtccctccaccaactagcaagtgtatacgtgcagtggaagaagtttggcaatgcagaacaactgtataaacaggcgttggaaatctcagaaaatgcttatggtgcggaccatccatatactgctcgtgaacttgaagcacttgcaactttgtaccagaaacaaaataaatatgaacaagctgaacattttaggaaaaaatcctttaaaattcatcagaaagctataaagaaaaaaggcaacttgtacggatttgcccttttacgtagacgggctttacagttagaagagcttacattaggtaaggacacacctgataatgctcggaccctcaatgaactgggtgttctctactatcttcaaaataacctggaaacagctgaccagtttctgaagcgttccttagaaatgagggagcgagttctaggaccagatcaccctgactgtgctcagtctttgaataatctggcagctctatgcaatgaaaagaaacagtatgataaagcagaagaactttatgaaagagctttagatattcggagacgtgcattagctcctgatcacccttctttggcatatacggtgaagcatcttgccatcttgtataagaaaatggggaaacttgacaaagctgtacctttgtatgaattggctgttgaaattcgacagaaatcttttggcccaaagcaccctagtgtagctactgccttggtgaacttagctgttctttatagccaaatgaaaaaacacgttgaagctttgccattatatgaaagagcattaaagatttatgaagatagcctgggtcggatgcatcctcgagttggagaaacactgaaaaatttagctgtgcttagctatgaaggaggagattttgaaaaagctgctgaattatacaaaagggcaatggaaataaaagaagcagaaacatcactcttgggtggaaaagctccttcacgccattcatcaagtggagacacgtttagcttaaaaacagctcattctcctaatgttttccttcagcaaggacaaaggtaatagcagcagttagaattctttgcaaatgtaccttaagacaaaataattaaacatttggaacatttgaatttgaaactttaaaaaaatgttgtacgaaattttactacgtgtgatttaactgctatttgtatgaagttgtattggattacattaagttggaattgtgattatgtctgttttagttgtttaaaagaattttcctattatatggtatccaaggatgtagacacattagaattataagaagacatgaggagcaaatcatgaagagcggattggtct

SEQ ID NO: 158329 - DNA, 1616 bp, Homo sapiens
  Payload ID: 10991
  Gene Symbol: NPHP3
  Gene Name: nephronophthisis 3 (adolescent)
  ENST ID: ENST00000469232
  CDS Start-End: 1-372
gccaagctggacacggagaacaagcggctgcgggccgaactgcaggcacttcaaaaaacgtatcagaagatacttcgagaaaaagaaagtgctttagaagcgaaataccaagcaatggagagagcagcaacatttgaacatgacagagataaagttaaaaggcaattcaagatttttagggagaccaaagaaaatgaaattcaggacttactgagggccaagagggagttggagagcaaacttcagaggctacaggctcagggtatccaagtatttgatcctggggagtctgattcagatgacaactgtacagatgtcactgtatcattggaatctgaccaacatcctggaatttttattgctaacttttaaggaaaaaaaatgaaggccgggcacggtggcttatgcctgtaataccagcactttgggaggccaaggcgggcggatcacgaggtcaaaagatcaagaccatcctggccaacatgctgctggaacccaatgtgaatattggactggcggagccttgggaagtgaaccttccataggaagcatgatccagcttcagcagtccttcagaggccctgagtttgcccatagttctatagatgtggaaggaccctttgcaaatgttaatagagatgactgggatattgctgtagctagtttattacaagttactcctctgttttcacattctctgtggagtaacactgtcagatgttacctcatttatacagatgaaacccagcctgagatggatcttttccttaaggactattcacctaaacttaagagaatgtgcgagacaatgggatattttttccatgctgtttattttccaatagatgttgaaaatcaatacctcactgtaagaaaatgggaaattgagaaaagttctttagttattttatttattcacttaacattaccaagccttttattggaagactgtgaagaagcttttctgaaaaaccctgaaggaaaacctcgattaatctttcatcgtttggaagatggaaaagtcagttctgactctgtccagcaattgattgatcaagtttctaatctaaacaagaccagcaaagccaagatcattgatcactcaggagatcctgcagaaggagtatataaaacttatatttgtgtagaaaagattattaaacaggacatactgggttttgagaacacagacttggagactaaggatttgggcagtgaggattccattccagaagaagatgattttggtgatgttctgtgggacatacatgatgaacaagagcaaatggaaacttttcagcaggcttctaattcagcccatgagttgggatttgagaaatattaccaacgccttaatgatctagtggcagcaccagccccgattccacctcttctcgtgtctggaggaccaggttctgggaagtctcttcttttatcaaagtggattcaattacaacagaagaattcccccaacacactgattctttcccattttgtgggaaggcccatgtcaaccagctcagagtcctccttgattattaaacgactaactctaaagttgatgcagcactcttggtcagtctctgctctgacactggatcctgctaagcttctgg

SEQ ID NO: 158330 - DNA, 3852 bp, Homo sapiens
  Payload ID: 10991
  Gene Symbol: NPHP3
  Gene Name: nephronophthisis 3 (adolescent)
  ENST ID: ENST00000465756
  CDS Start-End: 50-1666
gctgcccagtcctgctggtactcactaggtagtagcggcaacggacgccatggggaccgcctcgtcgctcgtgagccccgcgggcggggaagtgatcgaggacacgtacggggcgggcggcggcgaggcctgcgagatcccggtggaggcacttcaaaaaacgtatcagaagatacttcgagaaaaagaaagtgctttagaagcgaaataccaagcaatggagagagcagcaacatttgaacatgacagagataaagttaaaaggcaattcaagatttttagggagaccaaagaaaatgaaattcaggacttactgagggccaagagggagttggagagcaaacttcagaggctacaggctcagggtatccaagtatttgatcctggggagtctgattcagatgacaactgtacagatgtcactgctgctggaacccaatgtgaatattggactggcggagccttgggaagtgaaccttccataggaagcatgatccagcttcagcagtccttcagaggccctgagtttgcccatagttctatagatgtggaaggaccctttgcaaatgttaatagagatgactgggatattgctgtagctagtttattacaagttactcctctgttttcacattctctgtggagtaacactgtcagatgttacctcatttatacagatgaaacccagcctgagatggatcttttccttaaggactattcacctaaacttaagagaatgtgcgagacaatgggatattttttccatgctgtttattttccaatagatgttgaaaatcaatacctcactgtaagaaaatgggaaattgagaaaagttctttagttattttatttattcacttaacattaccaagccttttattggaagactgtgaagaagcttttctgaaaaaccctgaaggaaaacctcgattaatctttcatcgtttggaagatggaaaagtcagttctgactctgtccagcaattgattgatcaagtttctaatctaaacaagaccagcaaagccaagatcattgatcactcaggagatcctgcagaaggagtatataaaacttatatttgtgtagaaaagattattaaacaggacatactgggttttgagaacacagacttggagactaaggatttgggcagtgaggattccattccagaagaagatgattttggtgatgttctgtgggacatacatgatgaacaagagcaaatggaaacttttcagcaggcttctaattcagcccatgagttgggatttgagaaatattaccaacgccttaatgatctagtggcagcaccagccccgattccacctcttctcgtgtctggaggaccaggttctgggaagtctcttcttttatcaaagtggattcaattacaacagaagaattcccccaacacactgattctttcccattttgtgggaaggcccatgtcaaccagctcagagtcctccttgattattaaacgactaactctaaagttgatgcagcactcttggtcagtctctgctctgacactggatcctgctaagcttctggaagaatttccacgttggctggaaaaactctctgctcgtcatcaaggcagcatcatcatcgttattgattctatagatcaagttcaggttgtggcctacacttcatcttgatcccttaagtccaaaagatgcaaaatctattataattgcagaatgccactctgtagacattaaattgagtaaagagcagtgctgggagagcaggcaatttagataaaatccttcatcagtgtttccagtgtcaagatactctttcattatatagacttgttctgcactctatccgggagtccatggcaaatgatgtggataaagagctaatgaagcagatcctctgccttgtcaatgttagtcacaatggtgtgagtgaatcagaactgatggaactctatcctgagatgtcctggactttcttgacctcccttattcacagtttatacaaaatgtgtttgttgacttatggatgtggcttgcttaggtttcaacatctgcaggcttgggaaacagtgagattggagtacctggaaggccccactgttacttcttcatacaggcaaaagctaatcaactatttcaccttgcagctaagtcaggacagagtgacttggagaagtgcagatgaactcccgtggctttttcagcagcagggaagtaaacagaagctgcatgattgccttcttaatctctttgtgtctcaaaacctttataaaaggggacactttgctgagttgctgagttattggcagtttgttggcaaagacaaaagtgcaatggcaacagaatacttcgattcattgaagcagtatgagaaaaactgcgaaggcgaggacaacatgagttgcttagctgatctttatgaaaccttggggcgatttctcaaggatctaggccttctcagtcaggccatagtacctttgcagaggtctttagagattcgagaaacagctttagatcccgatcacccaagagtagcccagtccctccaccaactagcaagtgtatacgtgcagtggaagaagtttggcaatgcagaacaactgtataaacaggcgttggaaatctcagaaaatgcttatggtgcggaccatccatatactgctcgtgaacttgaagcacttgcaactttgtaccagaaacaaaataaatatgaacaagctgaacattttaggaaaaaatcctttaaaattcatcagaaagctataaagaaaaaaggcaacttgtacggatttgcccttttacgtagacgggctttacagttagaagagcttacattaggtaaggacacacctgataatgctcggaccctcaatgaactgggtgttctctactatcttcaaaataacctggaaacagctgaccagtttctgaagcgttccttagaaatgagggagcgagttctaggaccagatcaccctgactgtgctcagtctttgaataatctggcagctctatgcaatgaaaagaaacagtatgataaagcagaagaactttatgaaagagctttagatattcggagacgtgcattagctcctgatcacccttctttggcatatacggtgaagcatcttgccatcttgtataagaaaatggggaaacttgacaaagctgtacctttgtatgaattggctgttgaaattcgacagaaatcttttggcccaaagcaccctagtgtagctactgccttggtgaacttagctgttctttatagccaaatgaaaaaacacgttgaagctttgccattatatgaaagagcattaaagatttatgaagatagcctgggtcggatgcatcctcgagttggagaaacactgaaaaatttagctgtgcttagctatgaaggaggagattttgaaaaagctgctgaattatacaaaagggcaatggaaataaaagaagcagaaacatcactcttgggtggaaaagctccttcacgccattcatcaagtggagacacgtttagcttaaaaacagctcattctcctaatgttttccttcagcaaggacaaaggtaatagcagcagttagaattctttgcaaatgtaccttaagacaaaataattaaacatttggaacatttgaatttgaaactttaaaaaaatgttgtacgaaattttactacgtgtgatttaactgctatttgtatgaagttgtattggattacattaagttggaattgtgattatgtctgttttagttgtttaaaagaattttcctattatatggtatccaaggatgtagacacattagaattataagaagacatgaggagcaaatcatgaagagcggattggtctttg

SEQ ID NO: 158331 - DNA, 721 bp, Homo sapiens
  Payload ID: 10991
  Gene Symbol: NPHP3
  Gene Name: nephronophthisis 3 (adolescent)
  ENST ID: ENST00000512094
  CDS Start-End: 1-264
gaaaagaaacagtatgataaagcagaagaactttatgaaagagctttagatattcggagacgtgcattagctcctgatcacccttctttggcatatacggtgaagcatcttgccatcttgtataagaaaatggggaaacttgacaaagctgtacctttgtatgaattggctgttgaaattcgacagaaatcttttggcccaaagcaccctagtgtagctactgccttggtgaacttagctgttctttatagccaaatgctatgaaggaggagattttgaaaaagctgctgaattatacaaaagggcaatggaaataaaagaagcagaaacatcactcttgggtggaaaagctccttcacgccattcatcaagtggagacacgtttagcttaaaaacagctcattctcctaatgttttccttcagcaaggacaaaggtaatagcagcagttagaattctttgcaaatgtaccttaagacaaaataattaaacatttggaacatttgaatttgaaactttaaaaaaatgttgtacgaaattttactacgtgtgatttaactgctatttgtatgaagttgtattggattacattaagttggaattgtgattatgtctgttttagttgtttaaaagaattttcctattatatggtatccaaggatgtagacacattagaattataagaagacatgaggagcaaatcatgaagagcggattggtct

SEQ ID NO: 158332 - DNA, 4994 bp, Homo sapiens
  Payload ID: 10992
  Gene Symbol: NPHP4
  Gene Name: nephronophthisis 4
  Uniprot ID: O75161
  ENST ID: ENST00000378156
  CDS Start-End: 267-4547
gacgcgaggcgggttcttggactgagtgtgcggcgcggtgcgccgccttccgaggctcctcccgcgggtggcagcggacggggcgcgcccctcggccagtcctcggtcctcaggcttgtggctccgttgagcaccggccgccgggcctctgggtccgtcgagtggagactctctgaaaagcgtgggctccgtggcctccggcgcggccgcggcgggtcggtctcctagatcatccgggaagcccacgggaccctcaggcgggcaggatgaacgactggcacaggatcttcacccaaaacgtgcttgtccctccccacccacagagagcgcgccagccttggaaggaatccacggcattccagtgtgtcctcaagtggctggacggaccggtaattaggcagggcgtgctggaggtactgtcagaggttgaatgccatctgcgagtgtctttctttgatgtcacctaccggcacttctttgggaggacgtggaaaaccacagtgaagccgacgaagagaccgccgtccaggatcgtctttaatgagcccttgtattttcacacatccctaaaccaccctcatatcgtggctgtggtggaagtggtcgctgagggcaagaaacgggatgggagcctccagacattgtcctgtgggtttggaattcttcggatcttcagcaaccagccggactctcctatctctgcttcccaggacaaaaggttgcggctgtaccatggcacccccagagccctcctgcacccgcttctccaggaccccgcagagcaaaacagacacatgaccctcattgagaactgcagcctgcagtacacgctgaagccacacccggccctggagcctgcgttccaccttcttcctgagaaccttctggtgtctggtctgcagcagatacctggcctgcttccagctcatggagaatccggcgacgctctccgaaagcctcgcctccagaagcccatcacggggcacttggatgacttattcttcaccctgtacccctccctggagaagtttgaggaagagctgctggagctccacgtccaggaccacttccaggagggatgtggcccactggacggtggtgccctggagatcctggagcggcgcctgcgtgtgggcgtgcacaatggtctgggcttcgtgcagaggccgcaggtcgttgtactggtgcctgagatggatgtggccttgacgcgctcagctagcttcagcaggaaagtggtctcctcttccaagaccagctccgggagccaagctctggttttgagaagccgcctccgcctcccagagatggtcggccaccctgcatttgcggtcatcttccagctggagtacgtgttcagcagccctgcaggagtggacggcaatgcagcttcggtcacctctctgtccaacctggcatgcatgcacatggtccgctgggctgtttggaaccccttgctggaagctgattctggaagggtgaccctgcctctgcagggtgggatccagcccaacccctcgcactgtctggtctacaaggtaccctcagccagcatgagctctgaagaggtgaagcaggtggagtcgggtacactccggttccagttctcgctgggctcagaagaacacctggatgcacccacggagcctgtcagtggccccaaagtggagcggcggccttccaggaaaccacccacgtccccttcgagcccgccagcgccagtacctcgagttctcgctgccccgcagaactcacctgtgggaccagggttgtcaatttcccagctggcggcctccccgcggtccccgactcagcactgcttggccaggcctacttcacagctaccccatggctctcaggcctccccggcccaggcacaggagttcccgttggaggccggtatctcccacctggaagccgacctgagccagacctccctggtcctggaaacatccattgccgaacagttacaggagctgccgttcacgcctttgcatgcccctattgttgtgggaacccagaccaggagctctgcagggcagccctcgagagcctccatggtgctcctgcagtcctccggctttcccgagattctggatgccaataaacagccagccgaggctgtcagcgctacagaacctgtgacgtttaaccctcagaaggaagaatcagattgtctacaaagcaacgagatggtgctacagtttcttgcctttagcagagtggcccaggactgccgaggaacatcatggccaaagactgtgtatttcaccttccagttctaccgcttcccacccgcaacgacgccacgactgcagctggtccagctggatgaggccggccagcccagctctggcgccctgacccacatcctcgtgcctgtgagcagagatggcacctttgatgctgggtctcctggcttccagctgaggtacatggtgggccctgggttcctgaagccaggtgagcggcgctgctttgcccgctacctggccgtgcagaccctgcagattgacgtctgggacggagactccctgctgctcatcggatctgctgccgtccagatgaagcatctcctccgccaaggccggccggctgtgcaggcctcccacgagcttgaggtcgtggcaactgaatacgagcaggacaacatggtggtgagtggagacatgctggggtttggccgcgtcaagcccatcggcgtccactcggtggtgaagggccggctgcacctgactttggccaacgtgggtcacccgtgtgaacagaaagtgagaggttgtagcacattgccaccgtccagatctcgggtcatctcaaacgatggagccagccgcttctctggaggcagcctcctcacgactggaagctcaaggcgaaaacacgtggtgcaagcacagaagctggcggacgtggacagtgagctggctgccatgctactgacccatgcccggcagggcaaggggccccaggacgtcagccgcgagtcggatgccacccgcaggcgtaagctggagcggatgaggtctgtgcgcctgcaggaggccgggggagacttgggccggcgcgggacgagcgtgttggcgcagcagagcgtccgcacacagcacttgcgggacctacaggtcatcgccgcctaccgggaacgcacgaaggccgagagcatcgccagcctgctgagcctggccatcaccacggagcacacgctccacgccacgctgggggtcgccgagttctttgagtttgtgcttaagaacccccacaacacacagcacacggtgactgtggagatcgacaaccccgagctcagcgtcatcgtggacagtcaggagtggagggacttcaagggtgctgctggcctgcacacaccggtggaggaggacatgttccacctgcgtggcagcctggccccccagctctacctgcgcccccacgagaccgcccacgtccccttcaagttccagagcttctctgcagggcagctggccatggtgcaggcctctcctgggttgagcaacgagaagggcatggacgccgtgtcaccttggaagtccagcgcagtgcccactaaacacgccaaggtcttgttccgagcgagtggtggcaagcccatcgccgtgctctgcctgactgtggagctgcagccccacgtggtggaccaggtcttccgcttctatcacccggagctctccttcctgaagaaggccatccgcctgccgccctggcacacatttccaggtgctccggtgggaatgcttggtgaggaccccccagtccatgttcgctgcagcgacccgaacgtcatctgtgagacccagaatgtgggccccggggaaccacgggacatatttctgaaggtggccagtggtccaagcccggagatcaaagacttctttgtcatcatttactcggatcgctggctggcgacacccacacagacgtggcaggtctacctccactccctgcagcgcgtggatgtctcctgcgtcgcaggccagctgacccgcctgtcccttgtccttcgggggacacagacagtgaggaaagtgagagctttcacctctcatccccaggagctgaagacagaccccaaaggtgtcttcgtgctgccgcctcgtggggtgcaggacctgcatgttggcgtgaggccccttagggccggcagccgctttgtccatctcaacctggtggacgtggattgccaccagctggtggcctcctggctcgtgtgcctctgctgccgccagccgctcatctccaaggcctttgagatcatgttggctgcgggcgaagggaagggtgtcaacaagaggatcacctacaccaacccctacccctcccggaggacattccacctgcacagcgaccacccggagctgctgcggttcagagaggactccttccaggtcgggggtggagagacctacaccatcggcttgcagtttgcgcctagtcagagagtgggtgaggaggagatcctgatctacatcaatgaccatgaggacaaaaacgaagaggcattttgcgtgaaggtcatctaccagtgagggcttgagggtgacgtccttcctgcggcacccagctggggcctgtctgtgcccctcctgccctgcaggctgtcctccccgcctctctgcagcctttcacttcagtgcccacctggctgacctgtgcacttggctgaggaagcagagaccgagcgctggtcattttgtagtacctgcatccagcttagctgctgctgacacccagcaggcctgggttccgtgagcgcgaactccgtggtggtgggtctggctctggtgctgccatctacgcatgtgggaccctcgttatcgctgttgctcaaaatgtattttatgaatcatcctaaatgagaaaattatgtttttcttactggattttgtacaaacataatctattatttgctatgcaatattttatgctggtattatatctgttttttaaattgttgaacaaaatactaaactttt

SEQ ID NO: 158333 - DNA, 4213 bp, Homo sapiens
  Payload ID: 10992
  Gene Symbol: NPHP4
  Gene Name: nephronophthisis 4
  ENST ID: ENST00000378169
  CDS Start-End: 243-1031
agtgtgcggcgcggtgcgccgccttccgaggctcctcccgcgggtggcagcggacggggcgcgcccctcggccagtcctcggtcctcaggcttgtggctccgttgagcaccggccgccgggcctctgggtccgtcgagtggagactctctgaaaagcgtgggctccgtggcctccggcgcggccgcggcgggtcggtctcctagatcatccgggaagcccacgggaccctcaggcgggcaggatgaacgactggcacaggatcttcacccaaaacgtgcttgtccctccccacccacagagagcgcgccagccttggaaggaatccacggcattccagtgtgtcctcaagtggctggacggaccggtaattaggcagggcgtgctggaggtactgtcagaggttgaatgccatctgcgagtgtctttctttgatgtcacctaccggcacttctttgggaggacgtggaaaaccacagtgaagccgacgaagagaccgccgtccaggatcgtctttaatgagcccttgtattttcacacatccctaaaccaccctcatatcgtggctgtggtggaagtggtcgctgagggcaagaaacgggatgggagcctccagacattgtcctgtgggtttggaattcttcggatcttcagcaaccagccggactctcctatctctgcttcccaggacaaaaggttgcggctgtaccatggcacccccagagccctcctgcacccgcttctccaggaccccgcagagcaaaacagacacatgaccctcattgagaactgcagcctgcagtacacgctgaagccacacccggccctggagcctgcgttccaccttcttcctgagaaccttctggtgtctggtctgcagcagatacctggcctgcttccagctcatggagaatccgggatgtggcccactggacggtggtgccctggagatcctggagcggcgcctgcgtgtgggcgtgcacaatggtctgggcttcgtgcagaggccgcaggtcgttgtactggtgcctgagatggatgtggccttgacgcgctcagctagcttcagcaggaaagtggtctcctcttccaagaccagctccgggagccaagctctggttttgagaagccgcctccgcctcccagagatggtcggccaccctgcatttgcggtcatcttccagctggagtacgtgttcagcagccctgcaggagtggacggcaatgcagcttcggtcacctctctgtccaacctggcatgcatgcacatggtccgctgggctgtttggaaccccttgctggaagctgattctggaagggtgaccctgcctctgcagggtgggatccagcccaacccctcgcactgtctggtctacaaggtaccctcagccagcatgagctctgaagaggtgaagcaggtggagtcgggtacactccggttccagttctcgctgggctcagaagaacacctggatgcacccacggagcctgtcagtggccccaaagtggagcggcggccttccaggaaaccacccacgtccccttcgagagttcccgttggaggccggtatctcccacctggaagccgacctgagccagacctccctggtcctggaaacatccattgccgaacagttacaggagctgccgttcacgcctttgcatgcccctattgttgtgggaacccagaccaggagctctgcagggcagccctcgagagcctccatggtgctcctgcagtcctccggctttcccgagattctggatgccaataaacagccagccgaggctgtcagcgctacagaacctgtgacgtttaaccctcagaaggaagaatcagattgtctacaaagcaacgagatggtgctacagtttcttgcctttagcagagtggcccaggactgccgaggaacatcatggccaaagactgtgtatttcaccttccagttctaccgcttcccacccgcaacgacgccacgactgcagctggtccagctggatgaggccggccagcccagctctggcgccctgacccacatcctcgtgcctgtgagcagagatggcacctttgatgctgggtctcctggcttccagctgaggtacatggtgggccctgggttcctgaagccaggtgagcggcgctgctttgcccgctacctggccgtgcagaccctgcagattgacgtctgggacggagactccctgctgctcatcggatctgctgccgtccagatgaagcatctcctccgccaaggccggccggctgtgcaggcctcccacgagcttgaggtcgtggcaactgaatacgagcaggacaacatggtggtgagtggagacatgctggggtttggccgcgtcaagcccatcggcgtccactcggtggtgaagggccggctgcacctgactttggccaacgtgggtcacccgtgtgaacagaaagtgagaggttgtagcacattgccaccgtccagatctcgggtcatctcaaacgatggagccagccgcttctctggaggcagcctcctcacgactggaagctcaaggcgaaaacacgtggtgcaagcacagaagctggcggacgtggacagtgagctggctgccatgctactgacccatgcccggcagggcaaggggccccaggacgtcagccgcgagtcggatgccacccgcaggcgtaagctggagcggatgaggtctgtgcgcctgcaggaggccgggggagacttgggccggcgcgggacgagcgtgttggcgcagcagagcgtccgcacacagcacttgcgggacctacaggtcatcgccgcctaccgggaacgcacgaaggccgagagcatcgccagcctgctgagcctggccatcaccacggagcacacgctccacgccacgctgggggtcgccgagttctttgagtttgtgcttaagaacccccacaacacacagcacacggtgactgtggagatcgacaaccccgagctcagcgtcatcgtggacagtcaggagtggagggacttcaagggtgctgctggcctgcacacaccggtggaggaggacatgttccacctgcgtggcagcctggccccccagctctacctgcgcccccacgagaccgcccacgtccccttcaagttccagagcttctctgcagggcagctggccatggtgcaggcctctcctgggttgagcaacgagaagggcatggacgccgtgtcaccttggaagtccagcgcagtgcccactaaacacgccaaggtcttgttccgagcgagtggtggcaagcccatcgccgtgctctgcctgactgtggagctgcagccccacgtggtggaccaggtcttccgcttctatcacccggagctctccttcctgaagaaggccatccgcctgccgccctggcacacatttccaggtgctccggtgggaatgcttggtgaggaccccccagtccatgttcgctgcagcgacccgaacgtcatctgtgagacccagaatgtgggccccggggaaccacgggacatatttctgaaggtggccagtggtccaagcccggagatcaaagacttctttgtcatcatttactcggatcgctggctggcgacacccacacagacgtggcaggtctacctccactccctgcagcgcgtggatgtctcctgcgtcgcaggccagctgacccgcctgtcccttgtccttcgggggacacagacagtgaggaaagtgagagctttcacctctcatccccaggagctgaagacagaccccaaaggtgtcttcgtgctgccgcctcgtggggtgcaggacctgcatgttggcgtgaggccccttagggccggcagccgctttgtccatctcaacctggtggacgtggattgccaccagctggtggcctcctggctcgtgtgcctctgctgccgccagccgctcatctccaaggcctttgagatcatgttggctgcgggcgaagggaagggtgtcaacaagaggatcacctacaccaacccctacccctcccggaggacattccacctgcacagcgaccacccggagctgctgcggttcagagaggactccttccaggtcgggggtggagagacctacaccatcggcttgcagtttgcgcctagtcagagagtgggtgaggaggagatcctgatctacatcaatgaccatgaggacaaaaacgaagaggcattttgcgtgaaggtcatctaccagtga

SEQ ID NO: 158334 - DNA, 5548 bp, Homo sapiens
  Payload ID: 10992
  Gene Symbol: NPHP4
  Gene Name: nephronophthisis 4
  Uniprot ID: O75161
  ENST ID: ENST00000489180
  CDS Start-End: 269-3004
gtgacgcgaggcgggttcttggactgagtgtgcggcgcggtgcgccgccttccgaggctcctcccgcgggtggcagcggacggggcgcgcccctcggccagtcctcggtcctcaggcttgtggctccgttgagcaccggccgccgggcctctgggtccgtcgagtggagactctctgaaaagcgtgggctccgtggcctccggcgcggccgcggcgggtcggtctcctagatcatccgggaagcccacgggaccctcaggcgggcaggatgaacgactggcacaggatcttcacccaaaacgtgcttgtccctccccacccacagagagcgcgccagccttggaaggaatccacggcattccagtgtgtcctcaagtggctggacggaccggtaattaggcagggcgtgctggaggtactgtcagaggttgaatgccatctgcgagtgtctttctttgatgtcacctaccggcacttctttgggaggacgtggaaaaccacagtgaagccgacgaagagaccgccgtccaggatcgtctttaatgagcccttgtattttcacacatccctaaaccaccctcatatcgtggctgtggtggaagtggtcgctgagggcaagaaacgggatgggagcctccagacattgtcctgtgggtttggaattcttcggatcttcagcaaccagccggactctcctatctctgcttcccaggacaaaaggttgcggctgtaccatggcacccccagagccctcctgcacccgcttctccaggaccccgcagagcaaaacagacacatgaccctcattgagaactgcagcctgcagtacacgctgaagccacacccggccctggagcctgcgttccaccttcttcctgagaaccttctggtgtctggtctgcagcagatacctggcctgcttccagctcatggagaatccggcgacgctctccgaaagcctcgcctccagaagcccatcacggggcacttggatgacttattcttcaccctgtacccctccctggagaagtttgaggaagagctgctggagctccacgtccaggaccacttccaggagggatgtggcccactggacggtggtgccctggagatcctggagcggcgcctgcgtgtgggcgtgcacaatggtctgggcttcgtgcagaggccgcaggtcgttgtactggtgcctgagatggatgtggccttgacgcgctcagctagcttcagcaggaaagtggtctcctcttccaagaccagctccgggagccaagctctggttttgagaagccgcctccgcctcccagagatggtcggccaccctgcatttgcggtcatcttccagctggagtacgtgttcagcagccctgcaggagtggacggcaatgcagcttcggtcacctctctgtccaacctggcatgcatgcacatggtccgctgggctgtttggaaccccttgctggaagctgattctggaagggtgaccctgcctctgcagggtgggatccagcccaacccctcgcactgtctggtctacaaggtaccctcagccagcatgagctctgaagaggtgaagcaggtggagtcgggtacactccggttccagttctcgctgggctcagaagaacacctggatgcacccacggagcctgtcagtggccccaaagtggagcggcggccttccaggaaaccacccacgtccccttcgagcccgccagcgccagtacctcgagttctcgctgccccgcagaactcacctgtgggaccagggttgtcaatttcccagctggcggcctccccgcggtccccgactcagcactgcttggccaggcctacttcacagctaccccatggctctcaggcctccccggcccaggcagagttcccgttggaggccggtatctcccacctggaagccgacctgagccagacctccctggtcctggaaacatccattgccgaacagttacaggagctgccgttcacgcctttgcatgcccctattgttgtgggaacccagaccaggagctctgcagggcagccctcgagagcctccatggtgctcctgcagtcctccggctttcccgagattctggatgccaataaacagccagccgaggctgtcagcgctacagaacctgtgacgtttaaccctcagaaggaagaatcagattgtctacaaagcaacgagatggtgctacagtttcttgcctttagcagagtggcccaggactgccgaggaacatcatggccaaagactgtgtatttcaccttccagttctaccgcttcccacccgcaacgacgccacgactgcagctggtccagctggatgaggccggccagcccagctctggcgccctgacccacatcctcgtgcctgtgagcagagatggcacctttgatgctgggtctcctggcttccagctgaggtacatggtgggccctgggttcctgaagccaggtgagcggcgctgctttgcccgctacctggccgtgcagaccctgcagattgacgtctgggacggagactccctgctgctcatcggatctgctgccgtccagatgaagcatctcctccgccaaggccggccggctgtgcaggcctcccacgagcttgaggtcgtggcaactgaatacgagcaggacaacatggtggtgagtggagacatgctggggtttggccgcgtcaagcccatcggcgtccactcggtggtgaagggccggctgcacctgactttggccaacgtgggtcacccgtgtgaacagaaagtgagaggttgtagcacattgccaccgtccagatctcgggtcatctcaaacgatggagccagccgcttctctggaggcagcctcctcacgactggaagctcaaggcgctgggctctgcaggcgactgtgctgtttggagaagtgggaaccctgccagtggcatttgtgtctggttggctgctcatctgcaagggaaggagaaatggagagaaggtcaggaggaacatagactgattttcaaaacaagttgaagtaccctatgttgtgaacagaagaaagaagccaattatggagcttgggaaagaaagacctggtttggagaggaagacctgggtttggtgaaaatgtgtttcacagcagggaggctctgaagtttttctatccccttaaaatgaaaacacgtggtgcaagcacagaagctggcggacgtggacagtgagctggctgccatgctactgacccatgcccggcagggcaaggggccccaggacgtcagccgcgagtcggatgccacccgcaggcgtaagctggagcggatgaggtctgtgcgcctgcaggaggccgggggagacttgggccggcgcgggacgagcgtgttgtaaactcagcagggctgccactcagcctccctgccagcaaggcgttggtgctcaaaggtggatgcagacgcctcggtccctccctaggctcagttcagtctgatggggcgaggaagaggcatggtgagaagacacgggcacagcctgtcagaggttccactcctgaaaagctctgaggatgaaattctgatggaggccccaagtgtgaaaggccagctccaatccccctgcaaaggaacagccagagccttggatgttggaaagcgcagcagagcgtccgcacacagcacttgcgggacctacaggtcatcgccgcctaccgggaacgcacgaaggccgagagcatcgccagcctgctgagcctggccatcaccacggagcacacgctccacgccacgctgggggtcgccgagttctttgagtttgtgcttaagaacccccacaacacacagcacacggtgactgtggagatcgacaaccccgagctcagcgtcatcgtggacagtcaggagtggagggacttcaagggtgctgctggcctgcacacaccggtggaggaggacatgttccacctgcgtggcagcctggccccccagctctacctgcgcccccacgagaccgcccacgtccccttcaagttccagagcttctctgcagggcagctggccatggtgcaggcctctcctgggttgagcaacgagaagggcatggacgccgtgtcaccttggaagtccagcgcagtgcccactaaacacgccaaggtcttgttccgagcgagtggtggcaagcccatcgccgtgctctgcctgactgtggagctgcagccccacgtggtggaccaggtcttccgcttctatcacccggagctctccttcctgaagaaggccatccgcctgccgccctggcacacatttccaggtgctccggtgggaatgcttggtgaggaccccccagtccatgttcgctgcagcgacccgaacgtcatctgtgagacccagaatgtgggccccggggaaccacgggacatatttctgaaggtggccagtggtccaagcccggagatcaaagacttctttgtcatcatttactcggatcgctggctggcgacacccacacagacgtggcaggtctacctccactccctgcagcgcgtggatgtctcctgcgtcgcaggccagctgacccgcctgtcccttgtccttcgggggacacagacagtgaggaaagtgagagctttcacctctcatccccaggagctgaagacagaccccaaaggtgtcttcgtgctgccgcctcgtggggtgcaggacctgcatgttggcgtgaggccccttagggccggcagccgctttgtccatctcaacctggtggacgtggattgccaccagctggtggcctcctggctcgtgtgcctctgctgccgccagccgctcatctccaaggcctttgagatcatgttggctgcgggcgaagggaagggtgtcaacaagaggatcacctacaccaacccctacccctcccggaggacattccacctgcacagcgaccacccggagctgctgcggttcagagaggactccttccaggtcgggggtggagagacctacaccatcggcttgcagtttgcgcctagtcagagagtgggtgaggaggagatcctgatctacatcaatgaccatgaggacaaaaacgaagaggcattttgcgtgaaggtcatctaccagtgagggcttgagggtgacgtccttcctgcggcacccagctggggcctgtctgtgcccctcctgccctgcaggctgtcctccccgcctctctgcagcctttcacttcagtgcccacctggctgacctgtgcacttggctgaggaagcagagaccgagcgctggtcattttgtagtacctgcatccagcttagctgctgctgacacccagcaggcctgggttccgtgagcgcgaactccgtggtggtgggtctggctctggtgctgccatctacgcatgtgggaccctcgttatcgctgttgctcaaaatgtattttatgaatcatcctaaatgagaaaattatgtttttcttactggattttgtacaaacataatctattatttgctatgcaatattttatgctggtattatatctgttttttaaattgttgaacaaaatactaaacttttacacg

SEQ ID NO: 158335 - DNA, 1192 bp, Homo sapiens
  Payload ID: 10992
  Gene Symbol: NPHP4
  Gene Name: nephronophthisis 4
  ENST ID: ENST00000466897
  CDS Start-End: 1-415
cgagatggtgctacagtttcttgcctttagcagagtggcccaggactgccgaggaacatcatggccaaagactgtgtatttcaccttccagttctaccgcttcccacccgcaacgacgccacgactgcagctggtccagctggatgaggccggccagcccagctctggcgccctgacccacatcctcgtgcctgtgagcagagatggcacctttgatgctgggtctcctggcttccagctgaggtacatggtgggccctgggttcctgaagccaggtgagcggcgctgctttgcccgctacctggccgtgcagaccctgcagattgacgtctgggacggagactccctgctgctcatcggatctgctgccgtccagatgaaggagacttctcatatcttctcagtctcccagtgactgaggttccggaatcatcgatgtctatgcagtgatcgtatgcagtgtagacgagtgtggcaaagcgaccagggtctgcggcgaccggaagcccccagacccacaagggaagggtcagcatctcctccgccaaggccggccggctgtgcaggcctcccacgagcttgaggtcgtggcaactgaatacgagcaggacaacatggtggtgagtggagacatgctggggtttggccgcgtcaagcccatcggcgtccactcggtggtgaagggccggctgcacctgactttggccaacgtgggagagacttccctgtgcctcatgatggaggacagacaagggaagtgttcctaacttccctgcagcccgggaggaggagagtgaagaggcgcatttcttctcggcccagcaccatgactttgtagaaaatggtgccccgggattgctcgttagagggcctgagcaaagccctggacttcactccacgtccaggactgtggtgggtgggacaggtgggttgggtggctcaggagggtcccacctgggacgttccaggggcttcgactgaggcctatgctgggataggggctgctgatggggtgtcaagggacacaaggctgggtgcctgcctgtgcgcacctcagggcagaggaccgacatgggaccctgtagggccagtgacaagctcactgaacctcccgagggtcctctggaacgtttgggatttttcagggcagaattgaaaacacaataaaactaagccgtgtgatgtttctgaa

SEQ ID NO: 158336 - DNA, 3004 bp, Homo sapiens
  Payload ID: 10992
  Gene Symbol: NPHP4
  Gene Name: nephronophthisis 4
  Uniprot ID: O75161
  ENST ID: ENST00000622020
  CDS Start-End: 269-3004
gtgacgcgaggcgggttcttggactgagtgtgcggcgcggtgcgccgccttccgaggctcctcccgcgggtggcagcggacggggcgcgcccctcggccagtcctcggtcctcaggcttgtggctccgttgagcaccggccgccgggcctctgggtccgtcgagtggagactctctgaaaagcgtgggctccgtggcctccggcgcggccgcggcgggtcggtctcctagatcatccgggaagcccacgggaccctcaggcgggcaggatgaacgactggcacaggatcttcacccaaaacgtgcttgtccctccccacccacagagagcgcgccagccttggaaggaatccacggcattccagtgtgtcctcaagtggctggacggaccggtaattaggcagggcgtgctggaggtactgtcagaggttgaatgccatctgcgagtgtctttctttgatgtcacctaccggcacttctttgggaggacgtggaaaaccacagtgaagccgacgaagagaccgccgtccaggatcgtctttaatgagcccttgtattttcacacatccctaaaccaccctcatatcgtggctgtggtggaagtggtcgctgagggcaagaaacgggatgggagcctccagacattgtcctgtgggtttggaattcttcggatcttcagcaaccagccggactctcctatctctgcttcccaggacaaaaggttgcggctgtaccatggcacccccagagccctcctgcacccgcttctccaggaccccgcagagcaaaacagacacatgaccctcattgagaactgcagcctgcagtacacgctgaagccacacccggccctggagcctgcgttccaccttcttcctgagaaccttctggtgtctggtctgcagcagatacctggcctgcttccagctcatggagaatccggcgacgctctccgaaagcctcgcctccagaagcccatcacggggcacttggatgacttattcttcaccctgtacccctccctggagaagtttgaggaagagctgctggagctccacgtccaggaccacttccaggagggatgtggcccactggacggtggtgccctggagatcctggagcggcgcctgcgtgtgggcgtgcacaatggtctgggcttcgtgcagaggccgcaggtcgttgtactggtgcctgagatggatgtggccttgacgcgctcagctagcttcagcaggaaagtggtctcctcttccaagaccagctccgggagccaagctctggttttgagaagccgcctccgcctcccagagatggtcggccaccctgcatttgcggtcatcttccagctggagtacgtgttcagcagccctgcaggagtggacggcaatgcagcttcggtcacctctctgtccaacctggcatgcatgcacatggtccgctgggctgtttggaaccccttgctggaagctgattctggaagggtgaccctgcctctgcagggtgggatccagcccaacccctcgcactgtctggtctacaaggtaccctcagccagcatgagctctgaagaggtgaagcaggtggagtcgggtacactccggttccagttctcgctgggctcagaagaacacctggatgcacccacggagcctgtcagtggccccaaagtggagcggcggccttccaggaaaccacccacgtccccttcgagcccgccagcgccagtacctcgagttctcgctgccccgcagaactcacctgtgggaccagggttgtcaatttcccagctggcggcctccccgcggtccccgactcagcactgcttggccaggcctacttcacagctaccccatggctctcaggcctccccggcccaggcagagttcccgttggaggccggtatctcccacctggaagccgacctgagccagacctccctggtcctggaaacatccattgccgaacagttacaggagctgccgttcacgcctttgcatgcccctattgttgtgggaacccagaccaggagctctgcagggcagccctcgagagcctccatggtgctcctgcagtcctccggctttcccgagattctggatgccaataaacagccagccgaggctgtcagcgctacagaacctgtgacgtttaaccctcagaaggaagaatcagattgtctacaaagcaacgagatggtgctacagtttcttgcctttagcagagtggcccaggactgccgaggaacatcatggccaaagactgtgtatttcaccttccagttctaccgcttcccacccgcaacgacgccacgactgcagctggtccagctggatgaggccggccagcccagctctggcgccctgacccacatcctcgtgcctgtgagcagagatggcacctttgatgctgggtctcctggcttccagctgaggtacatggtgggccctgggttcctgaagccaggtgagcggcgctgctttgcccgctacctggccgtgcagaccctgcagattgacgtctgggacggagactccctgctgctcatcggatctgctgccgtccagatgaagcatctcctccgccaaggccggccggctgtgcaggcctcccacgagcttgaggtcgtggcaactgaatacgagcaggacaacatggtggtgagtggagacatgctggggtttggccgcgtcaagcccatcggcgtccactcggtggtgaagggccggctgcacctgactttggccaacgtgggtcacccgtgtgaacagaaagtgagaggttgtagcacattgccaccgtccagatctcgggtcatctcaaacgatggagccagccgcttctctggaggcagcctcctcacgactggaagctcaaggcgctgggctctgcaggcgactgtgctgtttggagaagtgggaaccctgccagtggcatttgtgtctggttggctgctcatctgcaagggaaggagaaatggagagaaggtcaggaggaacatagactga

SEQ ID NO: 158337 - DNA, 3741 bp, Homo sapiens
  Payload ID: 10993
  Gene Symbol: NPHS1
  Gene Name: nephrosis 1, congenital, Finnish type (nephrin)
  Uniprot ID: O60500
  ENST ID: ENST00000353632
  CDS Start-End: 2-3607
gatggccctggggacgacgctcagggcttctctcctgctcctggggctgctgactgaaggcctggcgcagttggcgattcctgcctccgttccccggggcttctgggccctgcctgaaaacctgacggtggtggagggggcctcagtggagctgcgttgtggggtcagcacccctggcagtgcggtgcaatgggccaaagatgggctgctcctgggccccgaccccaggatcccaggcttcccgaggtaccgcctggaaggggaccctgctagaggtgaattccacctgcacatcgaggcctgtgacctcagcgatgacgcggagtatgagtgccaggtcggccgctctgagatggggcccgagctcgtgtctcccagagtgatcctctccatcctggttcctcccaagctgctcctgctgaccccagaggcaggcaccatggtcacctgggtagctgggcaggagtacgtggtcaactgtgtgtctggggacgcgaagccagcacctgacatcaccattctcctgagtggacagacaatatctgacatctctgcaaacgtgaacgagggctcccagcagaaactcttcactgtggaggccacagccagggtgacaccccggagctcagataataggcagttgctggtctgtgaggcgtctagcccagcactggaggcccccatcaaggcctcattcaccgtgaatgttctgttccctccaggaccccctgtcatcgagtggccaggcctggatgaggggcacgtgcgggcaggacagagcttggagctgccgtgcgtggcccgagggggtaatcccttagccacactgcagtggctgaagaatggccagccggtgtccacagcgtggggcacagagcacacccaggcggtggcccgcagtgtgctggtgatgaccgtgaggccagaagaccatggagcgcagctcagctgcgaggcccacaacagcgtgtctgcagggacccaggagcacggcatcacactgcaggtcacctttccccctagtgccattattatcttgggatctgcatcccagactgagaacaagaacgtgacactctcctgtgtcagcaagtccagtcgcccgcgggttctgctacgatggtggctgggctggcggcagctgctgcccatggaggagacagtcatggatggactgcatggcggtcacatctccatgtccaacctgacattcctggcgcggcgggaggacaacggtctgaccctcacatgtgaggccttcagtgaagccttcaccaaggagaccttcaagaagtcgctcatcctgaacgtaaaatatcccgcccagaaactgtggattgagggtcccccagagggccagaagctccgggctgggacccgggtgaggctggtgtgtttggctatcgggggcaacccagagccctccctcatgtggtacaaggactcgcgcaccgtgaccgagtcgcggctgccgcaggagtcgcggcgcgtgcatctcggcagcgtggagaaatctgggagcaccttctcccgagagctggtgctggtcacagggccgtcggacaaccaggccaagttcacgtgcaaggctggacagctcagcgcgtccacgcagctggcggtgcagtttcccccaactaacgtgacgatcctggccaacgcatccgcactgcgcccgggagacgccttaaacttgacatgcgtcagcgtcagcagcaatccgccggtcaacttgtcctgggacaaggaaggggagaggctggagggcgtggccgccccaccccggagagccccattcaaaggctccgccgccgccaggagcgtccttctgcaagtgtcatcccgcgatcatggccagcgcgtgacctgccgcgcccacagcgccgagctccgcgaaaccgtgagctccttctatcgcctcaacgtactgtaccgtccagagttcctgggggagcaggtgctggtggtgaccgcggtggagcagggcgaggcgttgctgcccgtgtccgtgtccgctaaccccgcccccgaggccttcaactggaccttccgcggctatcgcctcagtccagcgggcggcccccggcatcgcatcctgtccagcggggctctgcatctgtggaatgtgacccgcgcggacgacggcctctatcagctgcactgccagaactctgagggcaccgcggaagcgcggctgcggctggacgtgcactatgctcccaccatccgtgccctccaggaccccactgaggtgaacgtcgggggttctgtggacatagtctgcactgtcgatgccaatcccatcctcccgggcatgttcaactgggagagactgggagaagatgaggaggaccagagcctggatgacatggagaagatatccaggggaccaacggggcgcctgcggattcaccatgccaaactggcccaggctggcgcttaccagtgcattgtggacaatggggtggcgcctccagcacgacggctgctccgtcttgttgtcagatttgccccccaggtggagcaccccactcccctaactaaggtggctgcagctggagacagcaccagttctgccaccctccactgccgtgcccgaggtgtccccaacatcgttttcacttggacaaaaaacggggtccctctggatctccaagatcccaggtacacggagcacacataccaccagggtggtgtccacagcagcctcctgaccattgccaacgtgtctgccgcccaggattacgccctcttcacatgtacagccaccaacgcccttggctcggaccaaaccaacattcaacttgtcagcatcagccgccctgaccctccatcaggattaaaggttgtgagtctgaccccacactccgtggggctggagtggaagcctggctttgatgggggcctgccacagaggttctgcatcaggtatgaggccctggggactccagggttccactatgtggatgtcgtaccaccccaggccaccaccttcacgctgactggtctacagccttctacaagatacagggtctggctgctggccagtaatgccttgggggacagtggactggctgacaaagggacccagcttcccatcactaccccaggtctccaccagccttctggagaacctgaagaccagctgcccacagagccaccttcaggcatctcagagaagacagaggcagggtcggaagaggaccgagtcaggaacgaatatgaggagagccagtggacaggagagcgggacactcagagctccacggtcagcacaacagaggcagagccgtattaccgctccctgagggacttcagcccccagctgcccccgacgcaggaggaggtgtcttattcccgaggtttcacaggtgaagatgaggatatggccttccctgggcacttgtatgatgaggtagaaagaacgtaccccccgtctggagcctggggacccctctacgatgaagtgcagatgggaccctgggacctccactggcctgaagacacatatcaggatccaagaggaatctatgaccaggtggccggagacttggacactctggaacccgattctctgcccttcgagctgaggggacatctggtgtaagagccctctcaaccccattgtcctgcacctgcaggaatttacactccactggtctctctcattacagcctgggccgagctggttaggtgagctccataaaacccaaagggacttggtgtcaggagaggacatgg

SEQ ID NO: 158338 - DNA, 4276 bp, Homo sapiens
  Payload ID: 10993
  Gene Symbol: NPHS1
  Gene Name: nephrosis 1, congenital, Finnish type (nephrin)
  Uniprot ID: O60500
  ENST ID: ENST00000378910
  CDS Start-End: 1-3726
atggccctggggacgacgctcagggcttctctcctgctcctggggctgctgactgaaggcctggcgcagttggcgattcctgcctccgttccccggggcttctgggccctgcctgaaaacctgacggtggtggagggggcctcagtggagctgcgttgtggggtcagcacccctggcagtgcggtgcaatgggccaaagatgggctgctcctgggccccgaccccaggatcccaggcttcccgaggtaccgcctggaaggggaccctgctagaggtgaattccacctgcacatcgaggcctgtgacctcagcgatgacgcggagtatgagtgccaggtcggccgctctgagatggggcccgagctcgtgtctcccagagtgatcctctccatcctggttcctcccaagctgctcctgctgaccccagaggcaggcaccatggtcacctgggtagctgggcaggagtacgtggtcaactgtgtgtctggggacgcgaagccagcacctgacatcaccattctcctgagtggacagacaatatctgacatctctgcaaacgtgaacgagggctcccagcagaaactcttcactgtggaggccacagccagggtgacaccccggagctcagataataggcagttgctggtctgtgaggcgtctagcccagcactggaggcccccatcaaggcctcattcaccgtgaatgttctgttccctccaggaccccctgtcatcgagtggccaggcctggatgaggggcacgtgcgggcaggacagagcttggagctgccgtgcgtggcccgagggggtaatcccttagccacactgcagtggctgaagaatggccagccggtgtccacagcgtggggcacagagcacacccaggcggtggcccgcagtgtgctggtgatgaccgtgaggccagaagaccatggagcgcagctcagctgcgaggcccacaacagcgtgtctgcagggacccaggagcacggcatcacactgcaggtcacctttccccctagtgccattattatcttgggatctgcatcccagactgagaacaagaacgtgacactctcctgtgtcagcaagtccagtcgcccgcgggttctgctacgatggtggctgggctggcggcagctgctgcccatggaggagacagtcatggatggactgcatggcggtcacatctccatgtccaacctgacattcctggcgcggcgggaggacaacggtctgaccctcacatgtgaggccttcagtgaagccttcaccaaggagaccttcaagaagtcgctcatcctgaacgtaaaatatcccgcccagaaactgtggattgagggtcccccagagggccagaagctccgggctgggacccgggtgaggctggtgtgtttggctatcgggggcaacccagagccctccctcatgtggtacaaggactcgcgcaccgtgaccgagtcgcggctgccgcaggagtcgcggcgcgtgcatctcggcagcgtggagaaatctgggagcaccttctcccgagagctggtgctggtcacagggccgtcggacaaccaggccaagttcacgtgcaaggctggacagctcagcgcgtccacgcagctggcggtgcagtttcccccaactaacgtgacgatcctggccaacgcatccgcactgcgcccgggagacgccttaaacttgacatgcgtcagcgtcagcagcaatccgccggtcaacttgtcctgggacaaggaaggggagaggctggagggcgtggccgccccaccccggagagccccattcaaaggctccgccgccgccaggagcgtccttctgcaagtgtcatcccgcgatcatggccagcgcgtgacctgccgcgcccacagcgccgagctccgcgaaaccgtgagctccttctatcgcctcaacgtactgtaccgtccagagttcctgggggagcaggtgctggtggtgaccgcggtggagcagggcgaggcgttgctgcccgtgtccgtgtccgctaaccccgcccccgaggccttcaactggaccttccgcggctatcgcctcagtccagcgggcggcccccggcatcgcatcctgtccagcggggctctgcatctgtggaatgtgacccgcgcggacgacggcctctatcagctgcactgccagaactctgagggcaccgcggaagcgcggctgcggctggacgtgcactatgctcccaccatccgtgccctccaggaccccactgaggtgaacgtcgggggttctgtggacatagtctgcactgtcgatgccaatcccatcctcccgggcatgttcaactgggagagactgggagaagatgaggaggaccagagcctggatgacatggagaagatatccaggggaccaacggggcgcctgcggattcaccatgccaaactggcccaggctggcgcttaccagtgcattgtggacaatggggtggcgcctccagcacgacggctgctccgtcttgttgtcagatttgccccccaggtggagcaccccactcccctaactaaggtggctgcagctggagacagcaccagttctgccaccctccactgccgtgcccgaggtgtccccaacatcgttttcacttggacaaaaaacggggtccctctggatctccaagatcccaggtacacggagcacacataccaccagggtggtgtccacagcagcctcctgaccattgccaacgtgtctgccgcccaggattacgccctcttcacatgtacagccaccaacgcccttggctcggaccaaaccaacattcaacttgtcagcatcagccgccctgaccctccatcaggattaaaggttgtgagtctgaccccacactccgtggggctggagtggaagcctggctttgatgggggcctgccacagaggttctgcatcaggtatgaggccctggggactccagggttccactatgtggatgtcgtaccaccccaggccaccaccttcacgctgactggtctacagccttctacaagatacagggtctggctgctggccagtaatgccttgggggacagtggactggctgacaaagggacccagcttcccatcactaccccaggtctccaccagccttctggagaacctgaagaccagctgcccacagagccaccttcaggaccctcggggctgcccctgctgcctgtgctgttcgctcttggggggcttctgctcctctccaatgcctcctgtgtcgggggggtcctctggcagcggagactcaggcgtcttgctgagggcatctcagagaagacagaggcagggtcggaagaggaccgagtcaggaacgaatatgaggagagccagtggacaggagagcgggacactcagagctccacggtcagcacaacagaggcagagccgtattaccgctccctgagggacttcagcccccagctgcccccgacgcaggaggaggtgtcttattcccgaggtttcacaggtgaagatgaggatatggccttccctgggcacttgtatgatgaggtagaaagaacgtaccccccgtctggagcctggggacccctctacgatgaagtgcagatgggaccctgggacctccactggcctgaagacacatatcaggatccaagaggaatctatgaccaggtggccggagacttggacactctggaacccgattctctgcccttcgagctgaggggacatctggtgtaagagccctctcaaccccattgtcctgcacctgcaggaatttacactccactggtctctctcattacagcctgggccgagctggttaggtgagctccataaaacccaaagggacttggtgtcaggagaggacatggagggggctgagtgacagagatggttcagctggtaccagagtagaaacaaggtgcatcctggggttggctttagaaactaaacttctccaaaaggacagggcagattgtaaacgtcgtctcaaaaatgaaatgctgccgggtgcggtgactcacgcctataatcccagcactttgggaggctgaggcgggtggatcacctgaggtcaggagttcgagaccagcctggccaacatggtaaaactccatttctactaaaaatataaaaaattagccaggagtagtggcgcatgcctgtagtcccagctacttgggaggctgatgcatgagaattgcttgaacccaggaggcggaggttgcagtgagctgagatcacgccactgcactccagcctgggcgacagagcgagattctgtctc

SEQ ID NO: 158339 - DNA, 1855 bp, Homo sapiens
  Payload ID: 10994
  Gene Symbol: NPHS2
  Gene Name: nephrosis 2, idiopathic, steroid-resistant (podocin)
  Uniprot ID: Q9NP85
  ENST ID: ENST00000367615
  CDS Start-End: 70-1221
cacagggactgcgctcccgtgcccctagcgctcccgcgctgctgctccagccgcccggcagctctgaggatggagaggagggcgcggagctcctccagggagtcccgcgggcgaggcggcaggactccgcacaaggagaacaagagggcaaaggccgagaggagcggcggaggccgcgggcgccaggaggctgggcccgagccgtcgggctccggacgggcggggaccccgggggagccccgagcgcccgccgccacggtggtggacgtggatgaggtccgaggctccggcgaggagggcaccgaggtggtggcgctgttggagagcgagcggcccgaggaaggtaccaaatcctccggcttaggggcctgtgagtggcttcttgtcctcatttccctgctcttcatcatcatgaccttccctttttccatctggttctgcgtaaaggttgtacaagagtatgaaagagtaattatattccgactgggacatctgcttcctggaagagccaaaggccctggtcttttcttttttttgccctgcctggatacctaccacaaggttgaccttcgtctccaaactctggagataccttttcatgagatcgtgaccaaagacatgtttataatggagatagatgccatttgctactaccgaatggaaaatgcctctcttctcctaagcagtcttgctcatgtatctaaagctgtgcaattccttgtgcaaaccactatgaagcgtctcctagcacatcgatccctcactgaaattcttctagagaggaagagcatcgcccaagatgcaaaggttgccttggattcagtgacctgtatttggggaatcaaagtggagagaatagaaattaaagatgtgaggttgccagctgggcttcagcactcactggctgtggaggctgaagcgcaaagacaagccaaagtgcggatgattgctgcagaagcggaaaaggctgcttctgagtccctgaggatggcagctgagattctgtcaggcacccctgctgccgttcagcttcgatacctccacacccttcagtctctgtccacagagaagccttccactgtggttttacctttgccatttgacctactgaattgcctgtcttctcccagcaacagaactcagggaagcctccccttcccaagtccttccaaacctgttgagccactaaatcctaaaaagaaagactctcccatgttataggaaggatggggcataatgtgactgtaaaggggcctgccatagaaaagtcacatgcctgagggagacactctgtcctcattccctgcccttcctttggttgccatatggaatggccatggaatgcacgaagtcacaatgcaccatccatgagaagacggtgaaatgatgtaatgacagagaaggcagacaacatgtttccgtgactcatctagtcagagcaattatgggaaacagctttggtcaacattctactttggaaagaattttgagtctagatgtggttaaattttgacttctgggaacttggttcagatgtccctttcactgtatgtcctctgacccctttggcaaggttgccacagctcccacagcccttcctacaagcacctatcattgggcttgtcacactctattgctcttctgtcccaaagatgcagtcttctctccaatgatactaccaagtcttagttttcctcaaccacactcaatctttttgctccaccctgaattcctcacacctaaccctgatagttacctaaagtgacacttaaatgtttcagagtgaatgcaaaaaagagagatgtacttggagtcggatatacaatttatccctaattaaagcatttaaaaggaa

SEQ ID NO: 158340 - DNA, 1670 bp, Homo sapiens
  Payload ID: 10994
  Gene Symbol: NPHS2
  Gene Name: nephrosis 2, idiopathic, steroid-resistant (podocin)
  Uniprot ID: Q9NP85
  ENST ID: ENST00000367616
  CDS Start-End: 89-1036
cgcggacccgcagcgactccacagggactgcgctcccgtgcccctagcgctcccgcgctgctgctccagccgcccggcagctctgaggatggagaggagggcgcggagctcctccagggagtcccgcgggcgaggcggcaggactccgcacaaggagaacaagagggcaaaggccgagaggagcggcggaggccgcgggcgccaggaggctgggcccgagccgtcgggctccggacgggcggggaccccgggggagccccgagcgcccgccgccacggtggtggacgtggatgaggtccgaggctccggcgaggagggcaccgaggtggtggcgctgttggagagcgagcggcccgaggaaggtaccaaatcctccggcttaggggcctgtgagtggcttcttgtcctcatttccctgctcttcatcatcatgaccttccctttttccatctggttctgcgtaaaggttgtacaagagtatgaaagagtaattatattccgactgggacatctgcttcctggaagagccaaaggccctggtcttttcttttttttgccctgcctggatacctaccacaaggttgaccttcgtctccaaactctggagataccttttcatgaggttgccttggattcagtgacctgtatttggggaatcaaagtggagagaatagaaattaaagatgtgaggttgccagctgggcttcagcactcactggctgtggaggctgaagcgcaaagacaagccaaagtgcggatgattgctgcagaagcggaaaaggctgcttctgagtccctgaggatggcagctgagattctgtcaggcacccctgctgccgttcagcttcgatacctccacacccttcagtctctgtccacagagaagccttccactgtggttttacctttgccatttgacctactgaattgcctgtcttctcccagcaacagaactcagggaagcctccccttcccaagtccttccaaacctgttgagccactaaatcctaaaaagaaagactctcccatgttataggaaggatggggcataatgtgactgtaaaggggcctgccatagaaaagtcacatgcctgagggagacactctgtcctcattccctgcccttcctttggttgccatatggaatggccatggaatgcacgaagtcacaatgcaccatccatgagaagacggtgaaatgatgtaatgacagagaaggcagacaacatgtttccgtgactcatctagtcagagcaattatgggaaacagctttggtcaacattctactttggaaagaattttgagtctagatgtggttaaattttgacttctgggaacttggttcagatgtccctttcactgtatgtcctctgacccctttggcaaggttgccacagctcccacagcccttcctacaagcacctatcattgggcttgtcacactctattgctcttctgtcccaaagatgcagtcttctctccaatgatactaccaagtcttagttttcctcaaccacactcaatctttttgctccaccctgaattcctcacacctaaccctgatagttacctaaagtgacacttaaatgtttcagagtgaatgcaaaaaagagagatgtacttggagtcggatatacaatttatccctaattaaagcatttaaaaggaa

SEQ ID NO: 158341 - DNA, 1047 bp, Homo sapiens
  Payload ID: 10995
  Gene Symbol: NGF
  Gene Name: nerve growth factor (beta polypeptide)
  Uniprot ID: P01138
  ENST ID: ENST00000369512
  CDS Start-End: 170-895
agagagcgctgggagccggaggggagcgcagcgagttttggccagtggtcgtgcagtccaaggggctggatggcatgctggacccaagctcagctcagcgtccggacccaataacagttttaccaagggagcagctttctatcctggccacactgaggtgcatagcgtaatgtccatgttgttctacactctgatcacagcttttctgatcggcatacaggcggaaccacactcagagagcaatgtccctgcaggacacaccatcccccaagcccactggactaaacttcagcattcccttgacactgcccttcgcagagcccgcagcgccccggcagcggcgatagctgcacgcgtggcggggcagacccgcaacattactgtggaccccaggctgtttaaaaagcggcgactccgttcaccccgtgtgctgtttagcacccagcctccccgtgaagctgcagacactcaggatctggacttcgaggtcggtggtgctgcccccttcaacaggactcacaggagcaagcggtcatcatcccatcccatcttccacaggggcgaattctcggtgtgtgacagtgtcagcgtgtgggttggggataagaccaccgccacagacatcaagggcaaggaggtgatggtgttgggagaggtgaacattaacaacagtgtattcaaacagtacttttttgagaccaagtgccgggacccaaatcccgttgacagcgggtgccggggcattgactcaaagcactggaactcatattgtaccacgactcacacctttgtcaaggcgctgaccatggatggcaagcaggctgcctggcggtttatccggatagatacggcctgtgtgtgtgtgctcagcaggaaggctgtgagaagagcctgacctgccgacacgctccctccccctgccccttctacactctcctgggcccctccctacctcaacctgtaaattattttaaattataaggactgcatggtaatttatagtttatacagttttaaagaatcattatttattaaatttttggaagc

SEQ ID NO: 158342 - DNA, 3417 bp, Homo sapiens
  Payload ID: 10996
  Gene Symbol: NGFR
  Gene Name: nerve growth factor receptor
  Uniprot ID: P08138
  ENST ID: ENST00000172229
  CDS Start-End: 126-1409
agagcgagccgagccgcggccagctccggcgggcagggggggcgctggagcgcagcgcagcgcagccccatcagtccgcaaagcggaccgagctggaagtcgagcgctgccgcgggaggcgggcgatgggggcaggtgccaccggccgcgccatggacgggccgcgcctgctgctgttgctgcttctgggggtgtcccttggaggtgccaaggaggcatgccccacaggcctgtacacacacagcggtgagtgctgcaaagcctgcaacctgggcgagggtgtggcccagccttgtggagccaaccagaccgtgtgtgagccctgcctggacagcgtgacgttctccgacgtggtgagcgcgaccgagccgtgcaagccgtgcaccgagtgcgtggggctccagagcatgtcggcgccgtgcgtggaggccgacgacgccgtgtgccgctgcgcctacggctactaccaggatgagacgactgggcgctgcgaggcgtgccgcgtgtgcgaggcgggctcgggcctcgtgttctcctgccaggacaagcagaacaccgtgtgcgaggagtgccccgacggcacgtattccgacgaggccaaccacgtggacccgtgcctgccctgcaccgtgtgcgaggacaccgagcgccagctccgcgagtgcacacgctgggccgacgccgagtgcgaggagatccctggccgttggattacacggtccacacccccagagggctcggacagcacagcccccagcacccaggagcctgaggcacctccagaacaagacctcatagccagcacggtggcaggtgtggtgaccacagtgatgggcagctcccagcccgtggtgacccgaggcaccaccgacaacctcatccctgtctattgctccatcctggctgctgtggttgtgggccttgtggcctacatagccttcaagaggtggaacagctgcaagcagaacaagcaaggagccaacagccggccagtgaaccagacgcccccaccagagggagaaaaactccacagcgacagtggcatctccgtggacagccagagcctgcatgaccagcagccccacacgcagacagcctcgggccaggccctcaagggtgacggaggcctctacagcagcctgcccccagccaagcgggaggaggtggagaagcttctcaacggctctgcgggggacacctggcggcacctggcgggcgagctgggctaccagcccgagcacatagactcctttacccatgaggcctgccccgttcgcgccctgcttgcaagctgggccacccaggacagcgccacactggacgccctcctggccgccctgcgccgcatccagcgagccgacctcgtggagagtctgtgcagtgagtccactgccacatccccggtgtgagcccaaccggggagcccccgccccgccccacattccgacaaccgatgctccagccaacccctgtggagcccgcacccccaccctttggggggggcccgcctggcagaactgagctcctctgggcaggacctcagagtccaggccccaaaaccacagccctgtcagtgcagcccgtgtggccccttcacttctgaccacacttcctgtccagagagagaagtgcccctgctgcctccccaaccctgcccctgccccgtcaccatctcaggccacctgcccccttctcccacactgctaggtgggccagcccctcccaccacagcaggtgtcatatatggggggccaacaccagggatggtactagggggaagtgacaaggccccagagactcagagggaggaatcgaggaaccagagccatggactctacactgtgaacttggggaacaagggtggcatcccagtggcctcaaccctccctcagcccctcttgccccccaccccagcctaagatgaagaggatcggaggcttgtcagagctgggaggggttttcgaagctcagcccacccccctcattttggatataggtcagtgaggcccagggagaggccatgattcgcccaaagccagacagcaacggggaggccaagtgcaggctggcaccgccttctctaaatgaggggcctcaggtttgcctgagggcgaggggagggtggcaggtgaccttctgggaaatggcttgaagccaagtcagctttgccttccacgctgtctccagacccccaccccttccccactgcctgcccacccgtggagatgggatgcttgcctagggcctggtccatgatggagtcaggtttggggttcgtggaaagggtgctgcttccctctgcctgtccctctcaggcatgcctgtgtgacatcagtggcatggctccagtctgctgccctccatcccgacatggacccggagctaacactggcccctagaatcagcctaggggtcagggaccaaggacccctcaccttgcaacacacagacacacgcacacacacacacaggaggagaaatctcacttttctccatgagttttttctcttgggctgagactggatactgcccggggcagctgccagagaagcatcggagggaattgaggtctgctcggccgtcttcactcgcccccgggtttggcgggccaaggactgccgaccgaggctggagctggcgtctgtcttcaagggcttacacgtggaggaatgctcccccatcctccccttccctgcaaacatggggttggctgggcccagaaggttgtgatgaagaaaagtgggccagtgtgggaatgcggcaagaaggaattgacttcgactgtgacctgtggggatttctcccagctctagacaaccctgcaaaggactgttttttcctgagcttggccagaagggggccatgaggcctcagtggactttccaccccctccctggcctgttctgttttgcctgaagttggagtgagtgtggctcccctctatttagcatgacaagccccaggcaggctgtgcgctgacaaccaccgctccccagcccagggttcccccagccctgtggaagggactaggagcactgtagtaaatggcaattctttgacctcaacctgtgatgaggggaggaaactcacctgctggcccctcacctgggcacctggggagtgggacagagtctgggtgtatttattttcctccccagcaggtggggagggggtttgggggcttgcaagtatgttttagcatgtgtttggttctggggcccctttttactccccttgagctgagatggaacccttttggcccccgagctgggggccatgagctccagacccccagcaaccctcctatcacctcccctccttgcctcctgtgtaatcatttcttgggccctcctgaaacttacacacaaaacgttaagtgatgaacattaaatagcaaagaaagaaaaatagtacaaa

SEQ ID NO: 158343 - DNA, 703 bp, Homo sapiens
  Payload ID: 10996
  Gene Symbol: NGFR
  Gene Name: nerve growth factor receptor
  ENST ID: ENST00000509200
  CDS Start-End: 691-703
gagtctggggctgcgcgccgctccccacctagctgcgcgacccgagcgccgcgcccaccgcgctccgtgggctcccgcgcctcgaagggtcgggatccggtctgagcctctcctggctctcggtgcaagccgctgggcacctaacgagacgggggcgcccggacgcctcggattctgtagcgcggtatcccgggccaccgactcggcaaaggtcggcgggtcctccgggtggtccgacgagattgtcagatgtggcctgctttatggccatgaaccgaatgccctggaaggtctggcaacggaggaggcgtcttcactctccccgccagcatctttcatcagagcactgcgccccaaattccggctttacagatacggagactgaggctctgagagtttaaacgacttggccaagatctcacagcaagttgggccagagtcgtggctagactccccgacctgattcccagctcggtgtcccttggaggtgccaaggaggcatgccccacaggcctgtacacacacagcggtgagtgctgcaaagcctgcaacctgggcgagggtgtggcccagccttgtggagccaaccagaccgtgtgtgagccctgcctggacagcgtgacgttctccgacgtggtgagcgcgaccgagccgtgcaagccgtgcaccgagtgcgtggggctccagagcatgtcggcgccgt

SEQ ID NO: 158344 - DNA, 1840 bp, Homo sapiens
  Payload ID: 10996
  Gene Symbol: NGFR
  Gene Name: nerve growth factor receptor
  Uniprot ID: P08138
  ENST ID: ENST00000504201
  CDS Start-End: 476-1477
gtagaccaggagagcggggaggagggaccggatcccagaggggcaacgacttgggctccgggtctgggcaagagcgagggtccccgcgcgaagacccaaggaaggaggggagctgggcgtggaggacctgggcgcttgggaaggtgtaccccgacaggaacctgccgtctgcagcccctgcggctcccgcctccgcctcggcgcgcggctgctcggtctgggatggctgtgcgcggtccgagtttcttcctgggccgcggtgtcccttggaggtgccaaggaggcatgccccacaggcctgtacacacacagcggtgagtgctgcaaagcctgcaacctgggcgagggtgtggcccagccttgtggagccaaccagaccgtgtgtgagccctgcctggacagcgtgacgttctccgacgtggtgagcgcgaccgagccgtgcaagccgtgcaccgagtgcgtggggctccagagcatgtcggcgccgtgcgtggaggccgacgacgccgtgtgccgctgcgcctacggctactaccaggatgagacgactgggcgctgcgaggcgtgccgcgtgtgcgaggcgggctcgggcctcgtgttctcctgccaggacaagcagaacaccgtgtgcgaggagtgccccgacggcacgtattccgacgaggccaaccacgtggacccgtgcctgccctgcaccgtgtgcgaggacaccgagcgccagctccgcgagtgcacacgctgggccgacgccgagtgcgaggagatccctggccgttggattacacggtccacacccccagagggctcggacagcacagcccccagcacccaggagcctgaggcacctccagaacaagacctcatagccagcacggtggcaggtgtggtgaccacagtgatgggcagctcccagcccgtggtgacccgaggcaccaccgacaacctcatccctgtctattgctccatcctggctgctgtggttgtgggccttgtggcctacatagccttcaagaggtggaacagctgcaagcagaacaagcaaggagccaacagccggccagtgaaccagacgcccccaccagagggagaaaaactccacagcgacagtggcatctccgtggacagccagagcctgcatgaccagcagccccacacgcagacagcctcgggccaggccctcaagggtgacggaggcctctacagcagcctgcccccagccaagcgggaggaggtggagaagcttctcaacggctctgcgggggacacctggcggcacctggcgggcgagctgggctaccagcccgagcacatagactcctttacccatgaggcctgccccgttcgcgccctgcttgcaagctgggccacccaggacagcgccacactggacgccctcctggccgccctgcgccgcatccagcgagccgacctcgtggagagtctgtgcagtgagtccactgccacatccccggtgtgagcccaaccggggagcccccgccccgccccacattccgacaaccgatgctccagccaacccctgtggagcccgcacccccaccctttggggggggcccgcctggcagaactgagctcctctgggcaggacctcagagtccaggccccaaaaccacagccctgtcagtgcagcccgtgtggccccttcacttctgaccacacttcctgtccagagagagaagtgcccctgctgcctccccaaccctgcccctgccccgtcaccatctcaggccacctgcccccttctcccacactgctaggtgggccagcccctcccaccacagcaggtgtcatatatggggggccaacaccagggatggtacta

SEQ ID NO: 158345 - DNA, 921 bp, Homo sapiens
  Payload ID: 10997
  Gene Symbol: NGFRAP1
  Gene Name: nerve growth factor receptor (TNFRSF16) associated protein 1
  Uniprot ID: Q00994
  ENST ID: ENST00000361298
  CDS Start-End: 366-671
ggctgtgcgctctggggcacctcatgcagacgggagtagggaggctgttttttgcgcgtgcatatggcggtggcgggtggggggaagggggagatcctgctgcactggccgcccaagttggggggcgagctcggtggtgacgcgcggccctcacgtgacccagagctgcagagcgacgcagccttcggtgcagtcgtcactcgcgtctggctaccagctccccgctgccctgagctcggcgggctggcattcggcccggggaaaagcggagcaggtctgcgaggctaagtgtctccgcggcgcacctcgcggcgagaatccggaggagaaggagactgcaaggataggcccaggaaaacgaagagatggagcagcctatgcagaatggagaggaagaccgccctttgggaggaggtgaaggccaccagcctgcaggaaatcgacggggacaggctcgccgacttgcccctaattttcgatgggccatacccaataggcagatcaatgatgggatgggtggagatggagatgatatggaaatattcatggaggagatgagagaaatcagaagaaaacttagggagctgcagttgaggaattgtctgcgtatccttatgggggagctctctaatcaccatgaccatcatgatgaattttgccttatgccttgactcctgccatttatcatgagattaatactgtgattcccgctgttttctttttccttgcattttcctaatatgcctttactgatccgtttgctgtgaaccctatgttatttccatgtgtcaagtgggtcttgtgttgccagcttctatttgaagattgcctttgcactcagtgtaagtttctgtcagcagtagtttcacccatttgcatggaaaaatttaaagctaataaagcaatttaaaaagcaatcta

SEQ ID NO: 158346 - DNA, 753 bp, Homo sapiens
  Payload ID: 10997
  Gene Symbol: NGFRAP1
  Gene Name: nerve growth factor receptor (TNFRSF16) associated protein 1
  Uniprot ID: Q00994
  ENST ID: ENST00000372634
  CDS Start-End: 204-509
gaggggagcccgggctcggagcacggaaagggccgggcggcggcgggtcttcgctagcgttccgctgcagcagcccccaccccccacaacccccaccccggctcgactgcaggtctgcgaggctaagtgtctccgcggcgcacctcgcggcgagaatccggaggagaaggagactgcaaggataggcccaggaaaacgaagagatggagcagcctatgcagaatggagaggaagaccgccctttgggaggaggtgaaggccaccagcctgcaggaaatcgacggggacaggctcgccgacttgcccctaattttcgatgggccatacccaataggcagatcaatgatgggatgggtggagatggagatgatatggaaatattcatggaggagatgagagaaatcagaagaaaacttagggagctgcagttgaggaattgtctgcgtatccttatgggggagctctctaatcaccatgaccatcatgatgaattttgccttatgccttgactcctgccatttatcatgagattaatactgtgattcccgctgttttctttttccttgcattttcctaatatgcctttactgatccgtttgctgtgaaccctatgttatttccatgtgtcaagtgggtcttgtgttgccagcttctatttgaagattgcctttgcactcagtgtaagtttctgtcagcagtagtttcacccatttgcatggaaaaatttaaagctaataaagcaatttaaaaagc

SEQ ID NO: 158347 - DNA, 805 bp, Homo sapiens
  Payload ID: 10997
  Gene Symbol: NGFRAP1
  Gene Name: nerve growth factor receptor (TNFRSF16) associated protein 1
  Uniprot ID: Q00994
  ENST ID: ENST00000372635
  CDS Start-End: 237-572
cggtggcgggtggggggaagggggagatcctgctgcactggccgcccaagttggggggcgagctcggtggtgacgcgcggccctcacgtgacccagagctgcagagcgacgcagccttcggtgcagtcgtcactcgcgtctggctaccagctccccgctgccctgagctcggcgggctggcattcggcccggggaaaagcggagcagaaaaacaaccagaaaaaaaaaatctcatcatggcaaatattcaccaggaaaacgaagagatggagcagcctatgcagaatggagaggaagaccgccctttgggaggaggtgaaggccaccagcctgcaggaaatcgacggggacaggctcgccgacttgcccctaattttcgatgggccatacccaataggcagatcaatgatgggatgggtggagatggagatgatatggaaatattcatggaggagatgagagaaatcagaagaaaacttagggagctgcagttgaggaattgtctgcgtatccttatgggggagctctctaatcaccatgaccatcatgatgaattttgccttatgccttgactcctgccatttatcatgagattaatactgtgattcccgctgttttctttttccttgcattttcctaatatgcctttactgatccgtttgctgtgaaccctatgttatttccatgtgtcaagtgggtcttgtgttgccagcttctatttgaagattgcctttgcactcagtgtaagtttctgtcagcagtagtttcacccatttgcatggaaaaatttaaagctaataaagca

SEQ ID NO: 158348 - DNA, 913 bp, Homo sapiens
  Payload ID: 10997
  Gene Symbol: NGFRAP1
  Gene Name: nerve growth factor receptor (TNFRSF16) associated protein 1
  Uniprot ID: Q00994
  ENST ID: ENST00000372645
  CDS Start-End: 328-663
gcgtgcatatggcggtggcgggtggggggaagggggagatcctgctgcactggccgcccaagttggggggcgagctcggtggtgacgcgcggccctcacgtgacccagagctgcagagcgacgcagccttcggtgcagtcgtcactcgcgtctggctaccagctccccgctgccctgagctcggcgggctggcattcggcccggggaaaagcggagcaggtctgcgaggctaagtgtctccgcggcgcacctcgcggcgagaatccggaggagaaggagactgcaaggataggcccagaaaaacaaccagaaaaaaaaaatctcatcatggcaaatattcaccaggaaaacgaagagatggagcagcctatgcagaatggagaggaagaccgccctttgggaggaggtgaaggccaccagcctgcaggaaatcgacggggacaggctcgccgacttgcccctaattttcgatgggccatacccaataggcagatcaatgatgggatgggtggagatggagatgatatggaaatattcatggaggagatgagagaaatcagaagaaaacttagggagctgcagttgaggaattgtctgcgtatccttatgggggagctctctaatcaccatgaccatcatgatgaattttgccttatgccttgactcctgccatttatcatgagattaatactgtgattcccgctgttttctttttccttgcattttcctaatatgcctttactgatccgtttgctgtgaaccctatgttatttccatgtgtcaagtgggtcttgtgttgccagcttctatttgaagattgcctttgcactcagtgtaagtttctgtcagcagtagtttcacccatttgcatggaaaaatttaaagctaataaagcaatttaaaaagcaatcta

SEQ ID NO: 158349 - DNA, 2563 bp, Homo sapiens
  Payload ID: 10998
  Gene Symbol: NHLH1
  Gene Name: nescient helix loop helix 1
  Uniprot ID: Q02575
  ENST ID: ENST00000302101
  CDS Start-End: 447-848
aggtgtgtgtgtctgagggtgtgtgtgtgagtgtggctggccccagtacctggccaagcccaccacttccacctgggccctacacccccacaatgtgtacccctcttatctgccctggagcctgtacagccatgccacgctacccctgagagtctagaaagctggtcactaactttgcagacggatgagccttgagcacccagaggagactggggctgtcaacgctgccccttgtcctgccggcttggatcccctgacagggtccttctaggcttcagactggcaccctgaccatggaaccctgaagtggcagtgacttctagagctcagtggcagaccccacgacccttcctcccccttcctccccctcccaccaccagctttcaagctcccagagggaggggtggggaggggatcctgatctcacagggcagggggcttccatcatgatgctcaactcagacaccatggagctggacctgccgcccacccactcagagactgagtcgggcttcagtgactgtgggggcggggcgggccctgatggtgccgggcctgggggtccgggagggggccaggcccgaggcccagagccgggagagcctggccggaaagacctgcagcatctgagccgcgaggagcgccggcgccggcgccgcgccacagccaagtaccgcacggcccacgccacgcgagaacgcatccgcgtggaagccttcaacctggccttcgccgagctgcgcaagctgctgcctacgctgccccccgacaagaagctctccaagattgagattctgcgcctggccatctgctatatctcctacctgaaccacgtgctggacgtctgaactcagcctgtctcccacctcccgggcctctctggggcccctttccaccgctcactgcttagaaaggccgcatcctccccgagcccttataccttggcatggagtcccaaaggccctgggcacaggcagagagcccaccggctggtcatgagggcctcttcctttctctgacccaggcacctcgagggctattctcctgggttccttccggggtttattgctgaggcccagctgtgcagaattgtttgctagtgtggttggtatggaatccttgctggctttactaagccagccacacttggagtctgcccccaagctctctcactgaatgctgcctcttctacccctatgtccaaattttcagccaccacagacctcagctgtgtatcctatctgttctagcttctcctgcccctggtggggatgggctgtcagaattgcaagggaggaaggctggggttagagtggggagtgggcttcttcctccaagatctcagtctctcagtgcttggcagaggggtgaggccctggggaggcaggggttggtgccctgactcctgtgaggggaatctcagtagctgggaattatggaaaaactcttcctgtttctgtccatcttgttcctgtggcttagcacatacagacctcagatcttacttggtagtgagtgccttgccctctttgagctatttggctacttccctgtccctctgactcctactgtcccaattttctccctccctgtgtgtcactagagaaaaaaaaaaacaaaaacctagattccggattaggggatgacatcccaaacagcccggagtatttgcagaaggctcaggcaacgagtgggccacatctcacttctgcttcctcatctcagcccactctgaaaatgtgcagcaccctcactggttcctccccccaacgcaaggaggatgcccaattgttgccctctgaaaatgcacagttctcctggccctaggacttacttattacatttttttctctttccttgagctgcctttggcaagggaagagacccccaactctgcgcccctactccatgctgctgatccccacctgcgcactatagctcagggtcagcagtggaatgaagggccttagaacctgcatagaagaaatgaactcactgcatttctgtgctccctcctccctcgcaccaaactcctagctctacaagtatatttatttatttatttatttattcatctatttatttacttatttatttatttataaatattgctatttattgccgagttgtgcactttggggtagagtgaggggctcccagcagctctagctgggtctctcttgcttcctccctgcttacgcctttccttttcttgctccttcttcaactcctggtgtgtgtgagcatgccctttgcttgccacaccatatcctttccccagatccacctgtcctgacactctagtcctccaggatagtgctcctcccccagctccagggctcctggatgtccttcctcaactccctccacccctagacaatcctacctggtcccatctgcctcttttctctccccagcctgccctgtgacccttgcctcttcctgatactcccaagagcaggccccaggggtctgtgtcacatatctctgtgtgattccttctggttgcatccccaatttcatacaaaaagaaaaataaaagtgacctcgttctagcaccagg

SEQ ID NO: 158350 - DNA, 2512 bp, Homo sapiens
  Payload ID: 10999
  Gene Symbol: NHLH2
  Gene Name: nescient helix loop helix 2
  Uniprot ID: Q02577
  ENST ID: ENST00000320238
  CDS Start-End: 517-924
aattggtaccaggagagcccagaagccacacacgcatctctgcctctttgctctggctctcccaccctcttcccgtctttctctgcttccttgtcactgttactccaggagacgttcacttttcaccaacctttctccaagcatctccaagccactgactatatatattttgctacaagagacctagaagaggaaaaaaggcacgagacttttcaacacatcgtttaaaaaaatcatcaacgaatttcttgcaatgtttgagaacaattaaaaggaaaaagcgttttttaaaaaatctatcaactaagtgaacaatcattcatatcgtctacatcctgagatattattgtccctcgctgcggacaccagcgagatgacagctgctttttcatttttgaatgtaataaatatttgctgcttttaatattttccggaatctcccctcgctattccttggaattttaactctaaagattggagaacagattatcaaaaaggcttttgcaagcctccaaaatgatgctgagtccggaccaagcagcagattcggaccatcccagctcggcgcactcggatccggagtccctgggcggcacggacaccaaggtgctcggcagcgtgtcggacctggagccggtggaggaggccgagggcgacggcaagggcggcagccgagccgcgctctacccgcacccgcagcagctgagccgcgaggagaagcgccgccgccggcgcgccacggccaagtaccgctcggcccacgccacccgcgagcgcatccgcgtggaagccttcaacttggccttcgccgagctccgcaaattgctgcccacgctgcccccggacaagaagctctccaagatcgagatcctgcgcctggccatctgctacatctcctatctcaaccacgtcctggacgtgtagggcggggtgcgccgcggggggccgcctgtcccggcgtccgcgaaacgctacggatccggacgggcgccgtcgctcgggtggcggaggctgcggtggcccagcgagacggccgcctcgagagacggccggggaagaagctcgctacctgttctctctggtcagcagggcgacgagggaaggtttccgacgcaggcaggtggggttgtctggcgagcccgggggctcgcaggggggattttccaggccaggagaacctcgtggagacacccgagatgagccacttctggggctccccaagggttgtggttttaacccactggagactttgagttctcctacattcatccgccacaaatcttaatgtgttgaaagaatgagggcagaagttcagagtatgcaggctcataactttaggctatctggaatttttctaatggacaaatcaccaaacactgggaaggaggagagaggagggatctctcccatagagatggaaggcacagaaaggtgcgactggaaactttcctttctgttgtgaaaataaagattatattagaatccaaataaaccctgaatatttagtaagtttaaaaagacaaattgagaacaagtagacacactgtgggaggatctgagcttggtgatattttatccccaagatatgacaccaaggtagacaggaaaatccatatttaaatggaaactttaatatctgattacttttgcaggcgaagtgcccctttatatatccaaaaacatctatttgtgaccttaaacatgtggacccataggtgcagttagaaaaagacaacctatttttatttatgttagaaggagtagagtatttttttcaagacatttatttttcagagtggtgatacttttactttggatactctgtgccaatttatttatagtcaagtgtttacactttttcctgtggaataattatgtctaactttttacgtgtttgttgagattatactgtggtctttctttctgctctaattatattgcacttgtataacaaatttcccacttctccctgtttctaaacatattttatatattaagatgtttgttcttgaaaggttcttttgttgtgagatcagcaacactagcacttcactattatagttttttaaaaagtgtattattcttatctgtagttatgtctgagaagtcctttacaagctgtttataaggagagtagcttctttgtgtgtgtgatgtttgtgcgtgtgatgaatttagcaaattaagttattttcctaaaaaaaaaagaaaaaaagaattcagaactactttcctctgtgacaccaaaaagaaaagtctataacctgaaaatgtttcatgttctctgctgtgaaactcttaaaacaaggagtgtattttagagacaagggaaaaaaaccacatctgctatccaaagattttagtctttttcagggtttttttgtgtctctgttgctttatataatgcaatattttgtagtgaaaatagatataatctggtttctatctgacgagtttttcatatctcatgaatggtgcgctgttttgcatataaataaaggtatcaaataaa

SEQ ID NO: 158351 - DNA, 7226 bp, Homo sapiens
  Payload ID: 10999
  Gene Symbol: NHLH2
  Gene Name: nescient helix loop helix 2
  Uniprot ID: Q02577
  ENST ID: ENST00000369506
  CDS Start-End: 5546-5953
gagtatatctggatatgtttatttttctatgtcaatatatatctgttcctcaatatgtatttatactgaataataataataatgatagccaacacttactgaacatgagttctaggcattagtttaagcactttacatatattatcttgttcaccttcagaaaaaaacatgacataacattacataacatgctttgattattctcattttacagattagaaaactaaggtccaaaaaggttaagtaacttacaactaaattcacacagctagcatatgacagagccacaaagccggactttttaagtcactacttatcacctccccattcatttaataatattatttaatattactcttatagtctataatatcataatttgtatggtgcttactatttcatcaaatattttcaaatacattgggtctcatagcgagcctgtgaaatgagaagtgcaatattattattctcatttttacaggaaagaaaattgatagaactgaaccatgggtgtcctttagtggaagcgtttctatgttacaaatatctggggtacctctgtacatagagtcacatcataaatgaactgagtacctataatgtgtcaagctcagacattagtgctggggatataagctacagacctcccctggaagcatcatagcctaggaagagagaccagtgtggtaaccaagaaccaagaatcacggtacacaatatgtagtctctaagggagacatgaaaggagtgcttatggagcacagaaggaggggccatctgtgccagggaggtcttagaaaaggcaaaggggtgggggagggggaggctttgatggaagaaagaatgtgtgtgtgtgaatgtgaatccatgtctgtgtctatgacagtgtggctaggcatcactaagtatggatctgagtgtgtacctgtttatacaggcttacttctgtaagcattaatttttgtgtatgctggctgctggtatagaatgagtaagcctgaacataaaagggaatttgtctggtatcacacacaccatagcagaattggacctgccctgataggcacaccctgtcatgactccccaacaccaggggaaccagagatgctggtcctttcccactgtagcagctgcccactctagagctatggtgattagacccaccagtttttttcaatccatcagtatggatgtgtggtggtctaatagagccagccagcttgtatgatgaagggggaggaggtacaggtgtctgtgggtgtgcatctgtgtgcacacttctggttgtgtgtgaatgcttagcattggctgttcctaactagagtgagaaaacctcccttctcccttcattgtcaccaccttggggtgtttatccactcacccatttccattgccacctgtatgggaccggcttccatcttcactttaacgttctggggatatctaaaatatacctctgtgctggggttaggcagaagcaaggctggggagtgttggtgcccttatttgttggaggcactccctcctttccccgacccctgccccattgtggtccaggaatctctcaaaggagcaaaaatgtgggcaaaggcaaatagtacttgtggaagccatgaaaaacccggagggtcactcccaggggtgggctgctcaatgtgcctcccctggtgataaaatctgcttttagggcaaaattaaggaagacaagtgaggactcctctctccacaaatgttcccctaggaactggcggggtgggagtaaggctgtaatgctcttttatttctttaagcttgtatgatcaaaacaagctaaaataatcacaaataatatgttattgatattaactatgagtatcttcataaagtggcaaaataattgaactagattttattttttattataaggtatacaaattcagggccatgggatcatgtaaggcaaaggcattatgtactgggacacactggtaatttgtgtttacatcttggcacaagcactgccacgcagtacaatatattagcatgttaagatgggcaagaatgaagtgcaataatcaacacatgtagcatgtcatatttcagcttgaatgaatgagtgggtggagagaaaaacaaacatacagaaaagtagaattatctcatgtcgtggtccgtgaatatgtggattctctttctagttccaccaatggcttaatctattgaaaggttcttaccatctattgataagttagtctcatagcagatcatttctcaaaaatgttaatatgcttaatcaaaccttactgaagtatcttttaaaatgtaaatgatctctaataaatgttggctgttgcatgtctaaatactttattgcagcatcttatatagtatatatttccatgttctggacacaaatatttttctaaatattaagggaaagtggtggctttgtaatatgccaggggaattctttgatagtcaatatattgtttatttgtacttaaatatttcatcaataatctggaaaagagaaatagcctgactacggctagatactgtttagaggctaagatttctatcatgaactgcttttcaattgttatattttatggcacagattcagtgggaatctgatctgctaaaatatttgggctgtgaaaactcccacactgtgacagatgtcaagtccaattaagtgactcatgtccaggtttctgtccaataggatttcccattaaatatcaatttaggggaaaaaaattccatcccccttcctaagcctttatctcttccaccatctccaggctgaatcaattggtaccaggagagcccagaagccacacacgcatctctgcctctttgctctggctctcccaccctcttcccgtctttctctgcttccttgtcactgttactccaggagacgttcacttttcaccaacctttctccaagcatctccaagccactgactatatatattttgctacaaggtaaagagaagaggggctggggacgggggatatagccaaaccttgaaagactttgaaactggaaaataggtgtctatttatacaacatacaagtaagtgagggaagaggaagaggcaaccttagctcctagttacagtattgtgttcctgggaactggggagatatcagctgaacaaagccttatctcaaaaaaaaaaaaaaaatcacttctgagcaagatcacatctctgtcctgcacttcccagtttctgctcagccgtattaaggaaaagaaaggcatacgataggagcggaatcttatcttaaccatctttcttattgattattccgctattagaaagtggaggaatcagccctttgatgtgattgtgtttatctctgcatctcttttgttatttttagagacctagaagaggaaaaaaggcacgagacttttcaacacatcgtttaaaaaaatcatcaacgaatttcttgcaatgtttgagaacaattaaaaggaaaaagcgttttttaaaaaatctatcaactaagtgaacaatcattcatatcgtctacatcctgagatattattgtccctcgctgcggacaccagcgagatgacagctgctttttcatttttgaatgtaataaatatttgctgcttttaatattttccggaatctcccctcgctattccttggaattttaactctaaagattggagaacagattatcaaaaaggcttttgcaaggtaagactcctttaaataatttttttcagcttgaaataagttagattattcatactgtatctatagatgcagttcattccataaagagataaaacgcatacacggcatactatttatgaatatttttaaagatctagaggagaatttaatgtgctttgagggcaacccaggaactttttaccagaactacaactatttagtggcttattgtgattttccattactcgtctatttatttctgccctttcaagctgactgtgtaggtgcaagttgttctactcataaacgtacccgagaaaagcccgtagggagtcacatgcagctctctgggagcatttgtttttattttgccgtagaggacctgatttcctcgcagggaaattaaagctgttttggcccaattcgctcctctgcaagtgcggtgctgggaaccgatcacccatccccttgcttttgtttctctagaagcaaacgctcctatacgtcgccgacgcggatttctcccgtgccgagcgtcgtggaggctgcccacgccggggccccgagttctcagcctggtcctcactcccgacgcccaggggcggtgcgtgcagcccctgcaggggcctttctcctcctgccgggccctttctcgaagcccgaattacccggaagcccagcggttctgagcggccccctcccagaaggcgcacagtccgggccagtgctccaggcgccccagagaagcctggccaggtggcgtttccaagagggcacagttaagttagaggaaggctaagcaccgacatgcccggacttggccaggccacccggggacagctgcagcctgccgagctccggttccgggagcgcccgaactttgccggcagagatgcagctcccgccgggacaacacgcgctgcacccgctagtccccgcctgccccgccccgggcccttcccttctcttcccttccctctgcatcctctcctccctcagcggcccggctgccggcattttcccgcaaggtggtcgccagactgccgggcgcattgtctgatcccacgtcgccgtgtccctaggtcccctatgtgtgtggctgtctgcgtgacagatggtgctccgggagcctgcgagggcatcggagtcaattttctttttaaaggctcccccacgtttgtttagtcatttctttacgatttcggagaagcgcgaggggtccaagaagccttcccgcccccagccactggctctccgcctgcgctccaggatggggattcctgaccggccgcaccccagagccaggcgcccccggcgcagccccagaccagcgccaggccctcgggcgccgcggctgccgggttgcttcgccggaggccctcggggcgagaagtgcaccccgcgtctccccgcccccgtgaaaacccagatgtattcgttgttcgaaatcgctcgtttgtccgggaaggggacgaagggagggaggaggaatagcgcggttggcatttggccggaagaggcacaaaaacccagtcgcgaccccacaggcctgcggttgttccccaggcccagggccacaggcccgctgtggccgtctgcaagtcgaggtgtccagtctagtatgcggcctgggtcaaccgcgtccccgccggctcccgcgccagggcgaggcgcagggctcgcgccctcgggccagatcctatcggcgccctcccgcgtcgcgcgccggcctgctgtggggagggggcccgggccgcgcgtccgctgggaggaccggcgtggtaggcctcggcagccatccttccagcaaaataccctgattccttttactgattaattttccgacccctcctcagcctccaaaatgatgctgagtccggaccaagcagcagattcggaccatcccagctcggcgcactcggatccggagtccctgggcggcacggacaccaaggtgctcggcagcgtgtcggacctggagccggtggaggaggccgagggcgacggcaagggcggcagccgagccgcgctctacccgcacccgcagcagctgagccgcgaggagaagcgccgccgccggcgcgccacggccaagtaccgctcggcccacgccacccgcgagcgcatccgcgtggaagccttcaacttggccttcgccgagctccgcaaattgctgcccacgctgcccccggacaagaagctctccaagatcgagatcctgcgcctggccatctgctacatctcctatctcaaccacgtcctggacgtgtagggcggggtgcgccgcggggggccgcctgtcccggcgtccgcgaaacgctacggatccggacgggcgccgtcgctcgggtggcggaggctgcggtggcccagcgagacggccgcctcgagagacggccggggaagaagctcgctacctgttctctctggtcagcagggcgacgagggaaggtttccgacgcaggcaggtggggttgtctggcgagcccgggggctcgcaggggggattttccaggccaggagaacctcgtggagacacccgagatgagccacttctggggctccccaagggttgtggttttaacccactggagactttgagttctcctacattcatccgccacaaatcttaatgtgttgaaagaatgagggcagaagttcagagtatgcaggctcataactttaggctatctggaatttttctaatggacaaatcaccaaacactgggaaggaggagagaggagggatctctcccatagagatggaaggcacagaaaggtgcgactggaaactttcctttctgttgtgaaaataaagattatattagaatccaaataaaccctgaatatttagtaagtttaaaaagacaaattgagaacaagtagacacactgtgggaggatctgagcttggtgatattttatccccaagatatgacaccaaggtagacaggaaaatccatatttaaatggaaactttaatatctgattacttttgcaggcgaagtgcccctttatatatccaaaaacatctatttgtgaccttaaacatgtggacccataggtgcagttagaaaaagacaacctatttttatttatgttagaaggagtagagtatttttttcaagacatttatttttcagagtggtgatacttttactttggatactctgtgccaatttatttatagtcaagtgtttacactttttcctgtggaataattatgtctaactttttacgtgtttgttgagattatactgtggtctttctttctgctctaattatattgcacttgtataacaaatttcccacttctccctgtttctaaacatattttatatattaagatgtttgttcttgaaaggttcttttgttgtgagatcagcaacactagcacttcactattatagttttttaaaaagtgtattattcttatctgtagttatgtctgagaagtcctttacaagctgtttataaggagagtagcttctttgtgtgtgtgatgtttgtgcgtgtgatgaatttagcaaattaagttattttcct

SEQ ID NO: 158352 - DNA, 855 bp, Homo sapiens
  Payload ID: 10999
  Gene Symbol: NHLH2
  Gene Name: nescient helix loop helix 2
  ENST ID: ENST00000429731
  CDS Start-End: 535-855
acttctgagcaagatcacatctctgtcctgcacttcccagtttctgctcagccgtattaaggaaaagaaaggcatacgataggagcggaatcttatcttaaccatctttcttattgattattccgctattagaaagtggaggaatcagccctttgatgtgattgtgtttatctctgcatctcttttgttatttttagagacctagaagaggaaaaaaggcacgagacttttcaacacatcgtttaaaaaaatcatcaacgaatttcttgcaatgtttgagaacaattaaaaggaaaaagcgttttttaaaaaatctatcaactaagtgaacaatcattcatatcgtctacatcctgagatattattgtccctcgctgcggacaccagcgagatgacagctgctttttcatttttgaatgtaataaatatttgctgcttttaatattttccggaatctcccctcgctattccttggaattttaactctaaagattggagaacagattatcaaaaaggcttttgcaagcctccaaaatgatgctgagtccggaccaagcagcagattcggaccatcccagctcggcgcactcggatccggagtccctgggcggcacggacaccaaggtgctcggcagcgtgtcggacctggagccggtggaggaggccgagggcgacggcaagggcggcagccgagccgcgctctacccgcacccgcagcagctgagccgcgaggagaagcgccgccgccggcgcgccacggccaagtaccgctcggcccacgccacccgcgagcgcatccgcgtggaagccttcaacttggccttcgccgagctccgcaaattgctgcccacgctg

SEQ ID NO: 158353 - DNA, 5558 bp, Homo sapiens
  Payload ID: 11000
  Gene Symbol: NES
  Gene Name: nestin
  Uniprot ID: P48681
  ENST ID: ENST00000368223
  CDS Start-End: 134-4999
gctactcccaccccgccccgccccgtcattgtccccgtcggtctcttttctcttccgtcctaaaagctctgcgagccgctcccttctcccggtgccccgcgtctgtccatcctcagtgggtcagacgagcaggatggagggctgcatgggggaggagtcgtttcagatgtgggagctcaatcggcgcctggaggcctacctggcccgggtcaaggcgctggaggagcagaatgagctgctcagcgcggagctcggggggctccgggcacaatccgcggacacctcctggcgggcgcatgccgacgacgagctggcggccctgcgggccctcgttgaccaacgctggcgggagaagcacgcggccgaggtggcgcgcgacaacctggctgaagagctggagggcgtggcaggccgatgccagcagctgcggctggcccgggagcggacgacggaggaggtagcccgcaaccggcgcgccgtcgaggcagagaaatgcgcccgggcctggctgagtagccaggtggcagagctggagcgcgagctagaggctctacgcgtggcgcacgaggaggagcgcgtcggcctgaacgcgcaggctgcctgtgccccccgctgccccgcgccgccccgcgggcctcccgcgccggccccggaggtagaggagctggcaaggcgactgggcgaggcgtggcgcggggcagtgcgcggctaccaggagcgcgtggcacacatggagacgtcgctgggccaggcccgcgagcggctgggccgggcggtgcagggtgcccgcgagggccgcctggagctgcagcagctccaggctgagcgcggaggcctcctggagcgcagggcagcgttggaacagaggttggagggccgctggcaggagcggctgcgggctactgaaaagttccagctggctgtggaggccctggagcaggagaaacagggcctacagagccagatcgctcaggtcctggaaggtcggcagcagctggcgcacctcaagatgtccctcagcctggaggtggccacgtacaggaccctcctggaggctgagaactcccggctgcaaacacctggcggtggctccaagacttccctcagctttcaggaccccaagctggagctgcaattccctaggaccccagagggccggcgtcttggatctttgctcccagtcctgagcccaacttccctcccctcacccttgcctgctacccttgagacacctgtgccagcctttcttaagaaccaagaattcctccaggcccgtacccctaccttggccagcacccccatcccccccacacctcaggcaccctctcctgctgtagatgcagagatcagagcccaggatgctcctctctctctgctccagacacagggtgggaggaaacaggctccagagcccctgcgggctgaagccagggtggccattcctgccagcgtcctgcctggaccagaggagcctgggggccagcggcaagaggccagtacaggccagtccccagaggaccatgcctccttggcaccacccctcagccctgaccactccagtttagaggctaaggatggagaatccggtgggtctagagtgttcagcatatgccgaggggaaggtgaagggcaaatctgggggttggtagagaaagaaacagccatagagggcaaagtggtaagcagcttgcagcaggaaatatgggaagaagaggatctaaacaggaaggaaatccaggactcccaggttcctttggaaaaagaaaccctgaagtctctgggagaggagattcaagagtcactgaagactctggaaaaccagagccatgagacactagaaagggagaatcaagaatgtccgaggtctttagaagaagacttagaaacactaaaaagtctagaaaaggaaaataaagagctattaaaggatgtggaggtagtgagacctctagaaaaagaggctgtaggccaacttaagcctacaggaaaagaggacacacagacattgcaatccctgcaaaaggagaatcaagaactaatgaaatctcttgaaggtaatctagagacatttttatttccaggaacggaaaatcaagaattagtaagttctctgcaagagaacttagagtcattgacagctctggaaaaggagaatcaagagccactgagatctccagaagtaggggatgaggaggcactgagacctctgacaaaggagaatcaggaacccctgaggtctcttgaagatgagaacaaagaggcctttagatctctagaaaaagagaaccaggagccactgaagactctagaagaagaggaccagagtattgtgagacctctagaaacagagaatcacaaatcactgaggtctttagaagaacaggaccaagagacattgagaactcttgaaaaagagactcaacagcgacggaggtctctaggggaacaggatcagatgacattaagacccccagaaaaagtggatctagaaccactgaagtctcttgaccaggagatagctagacctcttgaaaatgagaatcaagagttcttaaagtcactcaaagaagagagcgtagaggcagtaaaatctttagaaacagagatcctagaatcactgaagtctgcgggacaagagaacctggaaacactgaaatctccagaaactcaagcaccactgtggactccagaagaaataaatcagggggcaatgaatcctctagaaaaggaaattcaagaaccactggagtctgtggaagtgaaccaagagacattcagactcctggaagaggagaatcaggaatcattgagatctctgggagcatggaacctggagaatttgagatctccagaggaggtagacaaggaaagtcaaaggaatctggaagaggaagagaacctgggaaagggagagtaccaagagtcactgaggtctctggaggaggagggacaggagctgccgcagtctgcagatgtgcagaggtgggaagatacggtggagaaggaccaagaactggctcaggaaagccctcctgggatggctggagtggaaaatgaggatgaggcagagctgaatctgagggagcaggatggcttcactgggaaggaggaggtggtagagcagggagagctgaatgccacagaggaggtctggatcccaggcgaggggcacccagagagccctgagcccaaagagcagagaggcctggttgagggagccagtgtgaagggaggggctgagggcctccaggaccctgaagggcaatcacaacaggtgggggccccaggcctccaggctccccaggggctgccagaggcgatagagcccctggtggaagatgatgtggccccagggggtgaccaagcctccccagaggtcatgttggggtcagagcctgccatgggtgagtctgctgcgggagctgagccaggcccggggcagggggtgggagggctgggggacccaggccatctgaccagggaagaggtgatggaaccacccctggaagaggagagtttggaggcaaagagggttcagggcttggaagggcctagaaaggacctagaggaggcaggtggtctggggacagagttctccgagctgcctgggaagagcagagacccttgggagcctcccagggagggtagggaggagtcagaggctgaggcccccaggggagcagaggaggcgttccctgctgagaccctgggccacactggaagtgatgccccttcaccttggcctctggggtcagaggaagctgaggaggatgtaccaccagtgctggtctcccccagcccaacgtacaccccgatcctggaagatgcccctgggcctcagcctcaggctgaagggagtcaggaggctagctggggggtgcaggggagggctgaagccctggggaaagtagagagcgagcaggaggagttgggttctggggagatccccgagggcccccaggaggaaggggaggagagcagagaagagagcgaggaggatgagctcggggagacccttccagactccactcccctgggcttctacctcaggtcccccacctcccccaggtgggaccccactggagagcagaggccaccccctcaaggggagactggaaaggagggctgggatcctgctgtcctggcttccgagggccttgaggccccaccctcagaaaaggaggagggggaggagggagaagaggagtgtggccgtgactctgacctgtcagaagaatttgaggacctggggactgaggcaccttttcttcctggggtccctggggaggtggcagaacctctgggccaggtgccccagctgctactggatcctgcagcctgggatcgagatggggagtccgatgggtttgcagatgaggaagaaagtggggaggagggagaggaggatcaggaggaggggagggagccaggggctgggcggtgggggccagggtcttctgttggcagcctccaggccctgagtagctcccagagaggggaattcctggagtctgattctgtgagtgtcagtgtcccctgggatgacagcttgaggggtgcagtggctggtgcccccaagactgccctggaaacggagtcccaggacagtgctgagccttctggctcagaggaagagtctgaccctgtttccttggagagggaggacaaagtccctggccctctagagatccccagtgggatggaggatgcaggcccaggggcagacatcattggtgttaatggccagggtcccaacttggaggggaagtcacagcatgtgaatgggggagtgatgaacgggctggagcagtctgaggaagtggggcaaggaatgccgctagtctctgagggagaccgagggagcccctttcaggaggaggaggggagtgctctgaagacctcttgggcaggggctcctgttcacctgggccagggtcagttcctgaagttcactcagagggaaggagatagagagtcctggtcctcaggggaggactaggaaaagaccatctgcccggcactggggacttaggggtgcggggaggggaaggacgcctccaagcccgctccctgctcaggagcagcactcttaacttacgatctcttgacatatggtttctggctgagaggcctggcccgctaaggtgaaaaggggtgtggcaaaggagcctactccaagaatggaggctgtaggaatataacctcccaccctgcaaagggaatctcttgcctgctccatctcataggctaagtcagctgaatcccgatagtactaggtccccttccctccgcatcccgtcagctggaaaaggcctgtggcccagaggcttctccaaagggagggtgacatgctggcttttgtgcccaagctcaccagccctgcgccacctcactgcagtagtgcaccatctcactgcagtagcacgccctcctgggccgtctggcctgtggctaatggaggtgacggcactcccatgtgctgactccccccatccctgccacgctgtggccctgcctggctagtccctgcctgaataaagtaatgcctccgcttcaaa

SEQ ID NO: 158354 - DNA, 3983 bp, Homo sapiens
  Payload ID: 11001
  Gene Symbol: NSF
  Gene Name: N-ethylmaleimide-sensitive factor
  Uniprot ID: P46459
  ENST ID: ENST00000398238
  CDS Start-End: 108-2342
ggcggttgcacgcctgcgcgagggcgggcggcgggggcgcgcgcgcggcgggggcgggctttgccgagcgcagagctgcagccgccgagccggacgtgtccgcgaagatggcgggccggagcatgcaagcggcaagatgtcctacagatgaattatctttaaccaattgtgcagttgtgaatgaaaaggatttccagtctggccagcatgtgattgtgaggacctctcccaatcacaggtacacatttacactgaagacacatccatcggtggttccagggagcattgcattcagtttacctcagagaaaatgggctgggctttctattgggcaagaaatagaagtctccttatatacatttgacaaagccaaacagtgtattggcacaatgaccatcgagattgatttcctgcagaaaaaaagcattgactccaacccttatgacaccgacaagatggcagcagaatttattcagcaattcaacaaccaggccttctcagtgggacaacagcttgtctttagcttcaatgaaaagctttttggcttactggtgaaggacattgaagccatggatcctagcatcctgaagggagagcctgcgacagggaaaaggcagaagattgaagtaggactggttgttggaaacagtcaagttgcatttgaaaaagcagaaaattcgtcacttaatcttattggcaaagctaaaaccaaggaaaatcgccaatcaattatcaatcctgactggaactttgaaaaaatgggaataggaggtctagacaaggaattttcagatattttccgacgagcatttgcttcccgagtatttcctccagagattgtggagcagatgggttgtaaacatgttaaaggcatcctgttatatggacccccaggttgtggtaagactctcttggctcgacagattggcaagatgttgaatgcaagagagcccaaagtggtcaatgggccagaaatccttaacaaatatgtgggagaatcagaggctaacattcgcaaactttttgctgatgctgaagaggagcaaaggaggcttggtgctaacagtggtttgcacatcatcatctttgatgaaattgatgccatctgcaagcagagagggagcatggctggtagcacgggagttcatgacactgttgtcaaccagttgctgtccaaaattgatggcgtggagcagctaaacaacatcctagtcattggaatgaccaatagaccagatctgatagatgaggctcttcttagacctggaagactggaagttaaaatggagataggcttgccagatgagaaaggccgactacagattcttcacatccacacagcaagaatgagagggcatcagttactctctgctgatgtagacattaaagaactggccgtggagaccaagaatttcagtggtgctgaattggagggtctggtgcgagcagcccagtccactgctatgaatagacacataaaggccagtactaaagtggaagtggacatggagaaagcagaaagcctgcaagtgacgagaggagacttccttgcttctttggagaatgatatcaaaccagcctttggcacaaaccaagaagattatgcaagttacattatgaacggtatcatcaaatggggtgacccagttactcgagttctagatgatggggagctgctggtgcagcagactaagaacagtgaccgcacaccattggtcagcgtgcttctggaaggccctcctcacagtgggaagactgctttagctgcaaaaattgcagaggaatccaacttcccgttcatcaagatctgttctcctgataaaatgattggcttttctgaaacagccaaatgtcaggccatgaagaagatctttgatgatgcgtacaaatcccagctcagttgtgtggttgtggatgacattgagagattgcttgattacgtccctattggccctcgattttcaaatcttgtattacaggctcttctcgttttactgaaaaaggcacctcctcagggccgcaagcttcttatcattgggaccactagccgcaaagatgtccttcaggagatggaaatgcttaacgctttcagcaccaccatccacgtgcccaacattgccacaggagagcagctgttggaagctttggagcttttgggcaacttcaaggataaggaacgcaccacaattgcacagcaagtcaaagggaagaaggtctggataggaatcaagaagttactaatgctgatcgagatgtccctacagatggatcctgaataccgtgtgagaaaattcttggccctcttaagagaagaaggagctagcccccttgattttgattgaaaatgaactatttgaaacacacagtgaccaagggaagtgaccaaggtgaagatggcctaggatcttcactgtcttactcaagatactggactaagtggaacgttctctaccttcaacatgtgctcgctctgcatgattagtgcaataaaactcccttccttatgcatactgagatagcttagtgtctcgtggaaggtgtcaatttggtttagaatgctgcgcttaccttcccatgcaggctaaagtgattccttcttgctcagtccctctgggtgggaaccatccagtacttgtggacactacacgtttcaacctctctactagcaccatcacccttgaaaactctcagtcagtgtcatgaatgttgcatgacaacagttggccgattagaaggcagactttctacatgcaaatctggcttagtaaatcgaggtgtgggccagagatcctctgacagctgtcctgagctaacactaaaagtcactgggtatttggttaaaggtctcccacaagactggtattctctttgcctgaagaaacaaggcattgaatctctaaaatgctgttctcaatcattgtcagagatgttttcaagttgcagtcagaagatctttcttaatagaaagtcagatgactaccgtgttggttgtgacttccccttaagtataactaatttgctctgtggtaagagatatgctcattattaccacttagaagatgttgttaaaaacatgtgaaagataggtatggaaaaagcatacacccccaaacagaaaggagttattaaagtaatttacaaacctctcagcactaattagtgtccaactccaagtgggtcaattccttagtataatattaaggcttactagtatcactgctttttccttagcttaatgacttacttagaatttatcctttattttaaatgatctgtactatctagtgtctaaaacactattctccagaaaaatcaatcattttctagccctctccctcagtcctttattgtccattccaatacattgaacacatttcctttaccctccacacacttcttccaaaaggaagcacccgttgagtccttttgagggtgatttgtcttacaactgactgacttagcaggaatttaattaggtcatatttggtgatgagacttatggagtgtgcctctctctcccaactgctgcttaaaatgcaaggacaagcaattagaagccatcctaaggtgcttacctcacacgccacccatgaggcttgtggccacagtggcacttgggtgtggctcctctgttatttgtcctcatgtgagaaagcagatcatctccaaatcttgccatttgtatacttttggtggagacttggatgtcatatcttctttgttttgggttttcttccctagcttattttgtggcttttaaagaagtggattgtattgtgagatcctgtgattcctggtggccagtatcctggattcctctaagatcttgcctctttcctcctcatgaaagcagcacacattgtgttaacttatgtctcttgttaaatgagcttaatgtctttgtgttttgtccaaaactgtattgaaaaaatattgtttaatgcaaatgaaggaatgcaataaagagtaaatatacttgaaaa

SEQ ID NO: 158355 - DNA, 569 bp, Homo sapiens
  Payload ID: 11001
  Gene Symbol: NSF
  Gene Name: N-ethylmaleimide-sensitive factor
  ENST ID: ENST00000571172
  CDS Start-End: 86-569
agaaatgttaaagtgctgatggatttgcactagctgtatagatctttggtggaggaggaaatgggaaaattattaatttcagagcatgcaagcggcaagatgtcctacagatgaattatctttaaccaattgtgcagttgtgaatgaaaaggatttccagtctggccagcatgtgattgtgaggacctctcccaatcacaggtacacatttacactgaagacacatccatcggtggttccagggagcattgcattcagtttacctcagagaaaatgggctgggctttctattgggcaagaaatagaagtctccttatatacatttgacaaagccaaacagtgtattggcacaatgaccatcgagattgatttcctgcagaaaaaaagcattgactccaacccttatgacaccgacaagatggcagcagaatttattcagcaattcaacaaccaggccttctcagtgggacaacagcttgtctttagcttcaatgaaaagctttttggcttactggtgaaggacattgaagccatggatcctagcatcctgaagggagagcctgcgacag

SEQ ID NO: 158356 - DNA, 2667 bp, Homo sapiens
  Payload ID: 11001
  Gene Symbol: NSF
  Gene Name: N-ethylmaleimide-sensitive factor
  ENST ID: ENST00000575068
  CDS Start-End: 212-2431
agtctcactaaaccacatggaatgggaaaggaacagtttcccaaaggaagggtttgctcttaatgcagaggaagggatgctgggagtcaaaaataatagatgttcattatagcaatgagtgatgaagagaggacagaaaggcataaaatattctttaagggaatagaacatgacttaatttgattttcctaatcattgattcttacagagcatgcaagcggcaagatgtcctacagatgaattatctttaaccaattgtgcagttgtgaatgaaaaggatttccagtctggccagcatgtgattgtgaggacctctcccaatcacaggtacacatttacactgaagacacatccatcggtggttccagggagcattgcattcagtttacctcagagaaaatgggctgggctttctattgggcaagaaatagaagtctccttatatacatttgacaaagccaaacagtgtattggcacaatgaccatcgagattgatttcctgcagaaaaaaagcattgactccaacccttatgacaccgacaagatggcagcagaatttattcagcaattcaacaaccaggccttctcagtgggacaacagcttgtctttagcttcaatgaaaagctttttggcttactggtgaaggacattgaagccatggatcctagcatcctgaagggagagcctgcgacagggaaaaggcagaagattgaagtaggactggttgttggaaacagtcaagttgcatttgaaaaagcagaaaattcgtcacttaatcttattggcaaagctaaaaccaaggaaaatcgccaatcaattatcaatcctgactggaactttgaaaaaatgggaataggaggtctagacaaggaattttcagatattttccgacgagcatttgcttcccgagtatttcctccagagattgtggagcagatgggttgtaaacatgttaaaggcatcctgttatatggacccccaggttgtggtaagactctcttggctcgacagattggcaagatgttgaatgcaagagagcccaaagtggtcaatgggccagaaatccttaacaaatatgtgggagaatcagaggctaacattcgcaaactttttgctgatgctgaagaggagcaaaggaggcttggtgctaacagtggtttgcacatcatcatctttgatgaaattgatgccatctgcaagcagagagggagcatggctggtagcacgggagttcatgacactgttgtcaaccagttgctgtccaaaattgatggcgtggagcagctaaacaacatcctagtcattggaatgaccaatagaccagatctgatagatgaggctcttcttagacctggaagactggaagttaaaatggagataggcttgccagatgagaaaggccgactacagattcttcacatccacacagcaagaatgagagggcatcagttactctctgctgatgtagacattaaagaactggccgtggagaccaagaatttcagtggtgctgaattggagggtctggtgcgagcagcccagtccactgctatgaatagacacataaaggccagtactaaagtggaagtggacatggagaaagcagaaagcctgcaagtgacgagaggagacttccttgcttctttggagaatgatatcaaaccagcctttggcacaaaccaagaagattatgcaagttacattatgaacggtatcatcaaatggggtgacccagttactcgagttctagatgatggggagctgctggtgcagcagactaagaacagtgaccgcacaccattggtcagcgtgcttctggaaggccctcctcacagtgggaagactgctttagctgcaaaaattgcagaggaatccaacttcccgttcatcaagatctgttctcctgataaaatgattggcttttctgaaacagccaaatgtcaggccatgaagaagatctttgatgatgcgtacaaatcccagctcagttgtgtggttgtggatgacattgagagattgcttgattacgtccctattggccctcgattttcaaatcttgtattacaggctcttctcgttttactgaaaaaggcacctcctcagggccgcaagcttcttatcattgggaccactagccgcaaagatgtccttcaggagatggaaatgcttaacgctttcagcaccaccatccacgtgcccaacattgccacaggagagcagctgttggaagctttggagcttttgggcaacttcaaggataaggaacgcaccacaattgcacagcaagtcaaagggaagaaggtctggataggaatcaagaagttactaatgctgatcgagatgtccctacagatggatcctgaataccgtgtgagaaaattcttggccctcttaagagaagaaggagctagcccccttgattttgattgaaaatgaactatttgaaacacacagtgaccaagggaagtgaccaaggtgaagatggcctaggatcttcactgtcttactcaagatactggactaagtggaacgttctctaccttcaacatgtgctcgctctgcatgattagtgcaataaaactcccttccttatgcatactgagatagcttagtgtctcgtggaaggtgtcaatttggtttagaatgctgcgcttaccttcccatgc

SEQ ID NO: 158357 - DNA, 710 bp, Homo sapiens
  Payload ID: 11001
  Gene Symbol: NSF
  Gene Name: N-ethylmaleimide-sensitive factor
  ENST ID: ENST00000576346
  CDS Start-End: 303-710
gttatgtattaaactgtcagatagactagaacatgctaaaacacttttggaaaggcttcagggaagaggaagaagtcgaacatatgggagaaaggaacaatcagtaatgtcatgttcctgagaagatggaaaggaagatttgattggtttatggttgaacgagggacacagcttccaaaacagggaagggaaggcagggatgtctaaatgtaggccctcctcacagtgggaagactgctttagctgcaaaaattgcagaggaatccaacttcccgttcatcaagatctgttctcctgataaaatgattggcttttctgaaacagccaaatgtcaggccatgaagaagatctttgatgatgcgtacaaatcccagctcagttgtgtggttgtggatgacattgagagattgcttgattacgtccctattggccctcgattttcaaatcttgtattacaggctcttctcgttttactgaaaaaggcacctcctcagggccgcaagcttcttatcattgggaccactagccgcaaagatgtccttcaggagatggaaatgcttaacgctttcagcaccaccatccacgtgcccaacattgccacaggagagcagctgttggaagctttggagcttttgggcaacttcaaggataaggaacgcaccacaattgcacagcaagtcaaagggaagaaggtctggataggaatcaag

SEQ ID NO: 158358 - DNA, 364 bp, Homo sapiens
  Payload ID: 11001
  Gene Symbol: NSF
  Gene Name: N-ethylmaleimide-sensitive factor
  ENST ID: ENST00000576040
  CDS Start-End: 231-364
atcctcccttcccatcccttggggcttgttccctcgtcctccacacagccgcagggtcgcggtcgccgaagccccctctgacgggctctgggggtctttccgcacccccttgcgagggcttattagggggcgccggagtaactgccgggagcacctctgctgcattcggggcaaggggtgtaggaaggatcttcaggaacccatgtctggctcttcacaaattaaagagcatgcaagcggcaagatgtcctacagatgaattatctttaaccaattgtgcagttgtgaatgaaaaggatttccagtctggccagcatgtgattgtgaggacctctcccaatcacaggtacacatttacactgaa

SEQ ID NO: 158359 - DNA, 548 bp, Homo sapiens
  Payload ID: 11001
  Gene Symbol: NSF
  Gene Name: N-ethylmaleimide-sensitive factor
  ENST ID: ENST00000571864
  CDS Start-End: 22-267
gagccggacgtgtccgcgaagatggcgggccggagcatgcaagcggcaagatgtcctacagatgaattatctttaaccaattgtgcagttgtgaatgaaaaggatttccagtctggccagcatgtgattgtgaggacctctcccaatcacaggtacacatttacactgaagacacatccatcggtggttccagggagcattgcattcagtttacctcagtctccttatatacatttgacaaagccaaacagtgtattggcacaatgaccatcgagattgatttcctgcagaaaaaaagcattgactccaacccttatgacaccgacaagatggcagcagaatttattcagcaattcaacaaccaggccttctcagtgggacaacagcttgtctttagcttcaatgaaaagctttttggcttactggtgaaggacattgaagccatggatcctagcatcctgaagggagagcctgcgacagggaaaaggcagaagattgaagtaggactggttgttggaaacagtcaagttgcatttgaaaaagcagaa

SEQ ID NO: 158360 - DNA, 580 bp, Homo sapiens
  Payload ID: 11001
  Gene Symbol: NSF
  Gene Name: N-ethylmaleimide-sensitive factor
  ENST ID: ENST00000465370
  CDS Start-End: 1-542
atgatgcgtacaaatcccagctcagttgtgtggttgtggatgacattgagagattgcttgattacgtccctattggccctcgattttcaaatcttgtattacaggctcttctcgttttactgaaaaaggcacctcctcagggccgcaagcttcttatcattgggaccactagccgcaaagatgtccttcaggagatggaaatgcttaacgctttcagcaccaccatccacgtgcccaacattgccacaggagagcagctgttggaagctttggagcttttgggcaacttcaaggataaggaacgcaccacaattgcacagcaagtcaaagggaagaaggtctggataggaatcaagaagttactaatgctgatcgagatgtccctacagatggatcctgaataccgtgtgagaaaattcttggccctcttaagagaagaaggagcgtccgagagaccaagcaaggaagttggttgtactgttggtttgctctccctgtcctgcttcgcaaaacttccttgtcacaatgcaggaaaaacttaatgtagcccccttgattttgattgaaaatgaactatttg

SEQ ID NO: 158361 - DNA, 3983 bp, Homo sapiens
  Payload ID: 11001
  Gene Symbol: NSF
  Gene Name: N-ethylmaleimide-sensitive factor
  Uniprot ID: P46459
  ENST ID: ENST00000611398
  CDS Start-End: 108-2342
ggcggttgcacgcctgcgcgagggcgggcggcgggggcgcgcgcgcggcgggggcgggctttgccgagcgcagagctgcagccgccgagccggacgtgtccgcgaagatggcgggccggagcatgcaagcggcaagatgtcctacagatgaattatctttaaccaattgtgcagttgtgaatgaaaaggatttccagtctggccagcatgtgattgtgaggacctctcccaatcacaggtacacatttacactgaagacacatccatcggtggttccagggagcattgcattcagtttacctcagagaaaatgggctgggctttctattgggcaagaaatagaagtctccttatatacatttgacaaagccaaacagtgtattggcacaatgaccatcgagattgatttcctgcagaaaaaaagcattgactccaacccttatgacaccgacaagatggcagcagaatttattcagcaattcaacaaccaggccttctcagtgggacaacagcttgtctttagcttcaatgaaaagctttttggcttactggtgaaggacattgaagccatggatcctagcatcctgaagggagagcctgcgacagggaaaaggcagaagattgaagtaggactggttgttggaaacagtcaagttgcatttgaaaaagcagaaaattcgtcacttaatcttattggcaaagctaaaaccaaggaaaatcgccaatcaattatcaatcctgactggaactttgaaaaaatgggaataggaggtctagacaaggaattttcagatattttccgacgagcatttgcttcccgagtatttcctccagagattgtggagcagatgggttgtaaacatgttaaaggcatcctgttatatggacccccaggttgtggtaagactctcttggctcgacagattggcaagatgttgaatgcaagagagcccaaagtggtcaatgggccagaaatccttaacaaatatgtgggagaatcagaggctaacattcgcaaactttttgctgatgctgaagaggagcaaaggaggcttggtgctaacagtggtttgcacatcatcatctttgatgaaattgatgccatctgcaagcagagagggagcatggctggtagcacgggagttcatgacactgttgtcaaccagttgctgtccaaaattgatggcgtggagcagctaaacaacatcctagtcattggaatgaccaatagaccagatctgatagatgaggctcttcttagacctggaagactggaagttaaaatggagataggcttgccagatgagaaaggccgactacagattcttcacatccacacagcaagaatgagagggcatcagttactctctgctgatgtagacattaaagaactggccgtggagaccaagaatttcagtggtgctgaattggagggtctggtgcgagcagcccagtccactgctatgaatagacacataaaggccagtactaaagtggaagtggacatggagaaagcagaaagcctgcaagtgacgagaggagacttccttgcttctttggagaatgatatcaaaccagcctttggcacaaaccaagaagattatgcaagttacattatgaacggtatcatcaaatggggtgacccagttactcgagttctagatgatggggagctgctggtgcagcagactaagaacagtgaccgcacaccattggtcagcgtgcttctggaaggccctcctcacagtgggaagactgctttagctgcaaaaattgcagaggaatccaacttcccgttcatcaagatctgttctcctgataaaatgattggcttttctgaaacagccaaatgtcaggccatgaagaagatctttgatgatgcgtacaaatcccagctcagttgtgtggttgtggatgacattgagagattgcttgattacgtccctattggccctcgattttcaaatcttgtattacaggctcttctcgttttactgaaaaaggcacctcctcagggccgcaagcttcttatcattgggaccactagccgcaaagatgtccttcaggagatggaaatgcttaacgctttcagcaccaccatccacgtgcccaacattgccacaggagagcagctgttggaagctttggagcttttgggcaacttcaaggataaggaacgcaccacaattgcacagcaagtcaaagggaagaaagtctggataggaatcaagaagttactaatgctgatcgagatgtccctacagatggatcctgaataccgtgtgagaaaattcttggccctcttaagagaagaaggagctagcccccttgattttgattgaaaatgaactatttgaaacacacagtgaccaagggaagtgaccaaggtgaagatggcctaggatcttcactgtcttactcaagatactggactaagtggaacgttctctaccttcaacatgtgctcgctctgcatgattagtgcaataaaactcccttccttatgcatactgagatagcttagtgtctcgtggaaggtgtcaatttggtttagaatgctgcgcttaccttcccatgcaggctaaagtgattccttcttgctcagtccctctgggtgggaaccatccagtacttgtggacactacacgtttcaacctctctactagcaccatcacccttgaaaactctcagtcagtgtcatgaatgttgcatgacaacagttggccgattagaaggcagactttctacatgcaaatctggcttagtaaatcgaggtgtgggccagagatcctctgacagctgtcctgagctaacactaaaagtcactgggtatttggttaaaggtctcccacaagactggtattctctttgcctgaagaaacaaggcattgaatctctaaaatgctgttctcaatcattgtcagagatgttttcaagttgcagtcagaagatctttcttaatagaaagtcagatgactaccgtgttggttgtgacttccccttaagtataactaatttgctctgtggtaagagatatgctcattattaccacttagaagatgttgttaaaaacatgtgaaagataggtatggaaaaagcatacacccccaaacagaaaggagttattaaagtaatttacaaacctctcagcactaattagtgtccaactccaagtgggtcaattccttagtataatattaaggcttactagtatcactgctttttccttagcttaatgacttacttagaatttatcctttattttaaatgatctgtactatctagtgtctaaaacactattctccagaaaaatcaatcattttctagccctctccctcagtcctttattgtccattccaatacattgaacacatttcctttaccctccacacacttcttccaaaaggaagcacccgttgagtccttttgagggtgatttgtcttacaactgactgacttagcaggaatttaattaggtcatatttggtgatgagacttatggagtgtgcctctctctcccaactgctgcttaaaatgcaaggacaagcaattagaagccatcctaaggtgcttacctcacacgccacccatgaggcttgtggccacagtggcacttgggtgtggctcctctgttatttgtcctcatgtgagaaagcagatcatctccaaatcttgccatttgtatacttttggtggagacttggatgtcatatcttctttgttttgggttttcttccctagcttattttgtggcttttaaagaagtggattgtattgtgagatcctgtgattcctggtggccagtatcctggattcctctaagatcttgcctctttcctcctcatgaaagcagcacacattgtgttaacttatgtctcttgttaaatgagcttaatgtctttgtgttttgtccaaaactgtattgaaaaaatattgtttaatgcaaatgaaggaatgcaataaagagtaaatatacttgaaaa

SEQ ID NO: 158362 - DNA, 3983 bp, Homo sapiens; identical to SEQ ID NO: 158354
  Payload ID: 11001
  Gene Symbol: NSF
  Gene Name: N-ethylmaleimide-sensitive factor
  Uniprot ID: P46459
  ENST ID: ENST00000620290
  CDS Start-End: 108-2342

SEQ ID NO: 158363 - DNA, 2667 bp, Homo sapiens
  Payload ID: 11001
  Gene Symbol: NSF
  Gene Name: N-ethylmaleimide-sensitive factor
  ENST ID: ENST00000631254
  CDS Start-End: 212-2431
agtctcactaaaccacatggaatgggaaaggaacagtttcccaaaggaagggtttgctcttaatgcagaggaagggatgctgggagtcaaaaataatagatgttcattatagcaatgagtgatgaagagaggacagaaaggcataaaatattctttaagggaatagaacatgacttaatttgattttcctaatcattgattcttacagagcatgcaagcggcaagatgtcctacagatgaattatctttaaccaattgtgcagttgtgaatgaaaaggatttccagtctggccagcatgtgattgtgaggacctctcccaatcacaggtacacatttacactgaagacacatccatcggtggttccagggagcattgcattcagtttacctcagagaaaatgggctgggctttctattgggcaagaaatagaagtctccttatatacatttgacaaagccaaacagtgtattggcacaatgaccatcgagattgatttcctgcagaaaaaaagcattgactccaacccttatgacaccgacaagatggcagcagaatttattcagcaattcaacaaccaggccttctcagtgggacaacagcttgtctttagcttcaatgaaaagctttttggcttactggtgaaggacattgaagccatggatcctagcatcctgaagggagagcctgcgacagggaaaaggcagaagattgaagtaggactggttgttggaaacagtcaagttgcatttgaaaaagcagaaaattcgtcacttaatcttattggcaaagctaaaaccaaggaaaatcgccaatcaattatcaatcctgactggaactttgaaaaaatgggaataggaggtctagacaaggaattttcagatattttccgacgagcatttgcttcccgagtatttcctccagagattgtggagcagatgggttgtaaacatgttaaaggcatcctgttatatggacccccaggttgtggtaagactctcttggctcgacagattggcaagatgttgaatgcaagagagcccaaagtggtcaatgggccagaaatccttaacaaatatgtgggagaatcagaggctaacattcgcaaactttttgctgatgctgaagaggagcaaaggaggcttggtgctaacagtggtttgcacatcatcatctttgatgaaattgatgccatctgcaagcagagagggagcatggctggtagcacgggagttcatgacactgttgtcaaccagttgctgtccaaaattgatggcgtggagcagctaaacaacatcctagtcattggaatgaccaatagaccagatctgatagatgaggctcttcttagacctggaagactggaagttaaaatggagataggcttgccagatgagaaaggccgactacagattcttcacatccacacagcaagaatgagagggcatcagttactctctgctgatgtagacattaaagaactggccgtggagaccaagaatttcagtggtgctgaattggagggtctggtgcgagcagcccagtccactgctatgaatagacacataaaggccagtactaaagtggaagtggacatggagaaagcagaaagcctgcaagtgacgagaggagacttccttgcttctttggagaatgatatcaaaccagcctttggcacaaaccaagaagattatgcaagttacattatgaacggtatcatcaaatggggtgacccagttactcgagttctagatgatggggagctgctggtgcagcagactaagaacagtgaccgcacaccattggtcagcgtgcttctggaaggccctcctcacagtgggaagactgctttagctgcaaaaattgcagaggaatccaacttcccgttcatcaagatctgttctcctgataaaatgattggcttttctgaaacagccaaatgtcaggccatgaagaagatctttgatgatgcgtacaaatcccagctcagttgtgtggttgtggatgacattgagagattgcttgattacgtccctattggccctcgattttcaaatcttgtattacaggctcttctcgttttactgaaaaaggcacctcctcagggccgcaagcttcttatcattgggaccactagccgcaaagatgtccttcaggagatggaaatgcttaacgctttcagcaccaccatccacgtgcccaacattgccacaggagagcagctgttggaagctttggagcttttgggcaacttcaaggataaggaacgcaccacaattgcacagcaagtcaaagggaagaaagtctggataggaatcaagaagttactaatgctgatcgagatgtccctacagatggatcctgaataccgtgtgagaaaattcttggccctcttaagagaagaaggagctagcccccttgattttgattgaaaatgaactatttgaaacacacagtgaccaagggaagtgaccaaggtgaagatggcctaggatcttcactgtcttactcaagatactggactaagtggaacgttctctaccttcaacatgtgctcgctctgcatgattagtgcaataaaactcccttccttatgcatactgagatagcttagtgtctcgtggaaggtgtcaatttggtttagaatgctgcgcttaccttcccatgc

SEQ ID NO: 158364 - DNA, 710 bp, Homo sapiens
  Payload ID: 11001
  Gene Symbol: NSF
  Gene Name: N-ethylmaleimide-sensitive factor
  ENST ID: ENST00000628506
  CDS Start-End: 303-710
gttatgtattaaactgtcagatagactagaacatgctaaaacacttttggaaaggcttcagggaagaggaagaagtcgaacatatgggagaaaggaacaatcagtaatgtcatgttcctgagaagatggaaaggaagatttgattggtttatggttgaacgagggacacagcttccaaaacagggaagggaaggcagggatgtctaaatgtaggccctcctcacagtgggaagactgctttagctgcaaaaattgcagaggaatccaacttcccgttcatcaagatctgttctcctgataaaatgattggcttttctgaaacagccaaatgtcaggccatgaagaagatctttgatgatgcgtacaaatcccagctcagttgtgtggttgtggatgacattgagagattgcttgattacgtccctattggccctcgattttcaaatcttgtattacaggctcttctcgttttactgaaaaaggcacctcctcagggccgcaagcttcttatcattgggaccactagccgcaaagatgtccttcaggagatggaaatgcttaacgctttcagcaccaccatccacgtgcccaacattgccacaggagagcagctgttggaagctttggagcttttgggcaacttcaaggataaggaacgcaccacaattgcacagcaagtcaaagggaagaaagtctggataggaatcaag

SEQ ID NO: 158365 - DNA, 569 bp, Homo sapiens; identical to SEQ ID NO: 158355
  Payload ID: 11001
  Gene Symbol: NSF
  Gene Name: N-ethylmaleimide-sensitive factor
  ENST ID: ENST00000626883
  CDS Start-End: 86-569

SEQ ID NO: 158366 - DNA, 364 bp, Homo sapiens; identical to SEQ ID NO: 158358
  Payload ID: 11001
  Gene Symbol: NSF
  Gene Name: N-ethylmaleimide-sensitive factor
  ENST ID: ENST00000627873
  CDS Start-End: 231-364

SEQ ID NO: 158367 - DNA, 548 bp, Homo sapiens; identical to SEQ ID NO: 158359
  Payload ID: 11001
  Gene Symbol: NSF
  Gene Name: N-ethylmaleimide-sensitive factor
  ENST ID: ENST00000628895
  CDS Start-End: 22-267

SEQ ID NO: 158368 - DNA, 580 bp, Homo sapiens
  Payload ID: 11001
  Gene Symbol: NSF
  Gene Name: N-ethylmaleimide-sensitive factor
  ENST ID: ENST00000628495
  CDS Start-End: 1-542
atgatgcgtacaaatcccagctcagttgtgtggttgtggatgacattgagagattgcttgattacgtccctattggccctcgattttcaaatcttgtattacaggctcttctcgttttactgaaaaaggcacctcctcagggccgcaagcttcttatcattgggaccactagccgcaaagatgtccttcaggagatggaaatgcttaacgctttcagcaccaccatccacgtgcccaacattgccacaggagagcagctgttggaagctttggagcttttgggcaacttcaaggataaggaacgcaccacaattgcacagcaagtcaaagggaagaaagtctggataggaatcaagaagttactaatgctgatcgagatgtccctacagatggatcctgaataccgtgtgagaaaattcttggccctcttaagagaagaaggagcgtccgagagaccaagcaaggaagttggttgtactgttggtttgctctccctgtcctgcttcgcaaaacttccttgtcacaatgcaggaaaaacttaatgtagcccccttgattttgattgaaaatgaactatttg

SEQ ID NO: 158369 - DNA, 364 bp, Homo sapiens; identical to SEQ ID NO: 158358
  Payload ID: 11001
  Gene Symbol: NSF
  Gene Name: N-ethylmaleimide-sensitive factor
  ENST ID: ENST00000633653
  CDS Start-End: 231-364

SEQ ID NO: 158370 - DNA, 2667 bp, Homo sapiens; identical to SEQ ID NO: 158356
  Payload ID: 11001
  Gene Symbol: NSF
  Gene Name: N-ethylmaleimide-sensitive factor
  ENST ID: ENST00000632125
  CDS Start-End: 212-2431

SEQ ID NO: 158371 - DNA, 569 bp, Homo sapiens; identical to SEQ ID NO: 158355
  Payload ID: 11001
  Gene Symbol: NSF
  Gene Name: N-ethylmaleimide-sensitive factor
  ENST ID: ENST00000632852
  CDS Start-End: 86-569

SEQ ID NO: 158372 - DNA, 580 bp, Homo sapiens; identical to SEQ ID NO: 158360
  Payload ID: 11001
  Gene Symbol: NSF
  Gene Name: N-ethylmaleimide-sensitive factor
  ENST ID: ENST00000632862
  CDS Start-End: 1-542

SEQ ID NO: 158373 - DNA, 548 bp, Homo sapiens; identical to SEQ ID NO: 158359
  Payload ID: 11001
  Gene Symbol: NSF
  Gene Name: N-ethylmaleimide-sensitive factor
  ENST ID: ENST00000633834
  CDS Start-End: 22-267

SEQ ID NO: 158374 - DNA, 1839 bp, Homo sapiens
  Payload ID: 11002
  Gene Symbol: NAPA
  Gene Name: N-ethylmaleimide-sensitive factor attachment protein, alpha
  Uniprot ID: P54920
  ENST ID: ENST00000263354
  CDS Start-End: 301-1188
tggagcgccgttcgccggtatgtgcgcatgcgttgaggtctcttgacgccgattggggggtcacgagtcacgggcggcgtgcggcggctggtgggggcgtgtccggcggagcgggcgcggcgttacgaggccgctggttggccagcgctagtcacgtggttcctggccgcaagcgacgcgcgccggtgcgacgtcaacgcagccgggcgagttttaccgatctgtgttccgcggcccggccgcggctgagtcttcccagggtcagggtcaggcgctttgctgagtccctttgtggccgccatggacaattccgggaaggaagcggaggcgatggcgctgttggccgaggcggagcgcaaagtgaagaactcgcagtccttcttctctggcctctttggaggctcatccaaaatagaggaagcatgcgaaatctacgccagagcagcaaacatgttcaaaatggccaaaaactggagtgctgctggaaacgcgttctgccaggctgcacagctgcacctgcagctccagagcaagcacgacgcagccacctgctttgtggacgctggcaacgcattcaagaaagccgacccccaagaggccattaactgtttgatgcgagcaatcgagatctacacagacatgggccgattcacgattgcggccaagcaccacatctccattgctgagatctatgagacagagttggtggacatcgagaaggccattgcccactacgagcagtctgcagactactacaaaggcgaggagtccaacagctcagccaacaagtgtctgctgaaggtggctggttacgctgcgctgctggagcagtatcagaaggccattgacatctacgaacaggtggggaccaatgccatggacagccccctcctcaagtacagcgccaaagactacttcttcaaggcggccctctgccacttctgcatcgacatgctcaacgccaagctggctgtccaaaagtatgaggagctgttcccagctttctctgattcccgggaatgcaagttgatgaaaaaattgctagaggcccacgaggagcagaatgtggacagctacaccgagtcggtgaaggaatacgactccatctcccggctggaccagtggctcaccaccatgctgctgcgcatcaagaagaccatccagggcgatgaggaggacctgcgctaagccccacccagccccccagtgcccgtcttcctgtcccatctgctcagagagaggtggggccgagacttgctggagagcttccctcctttcccatctggggagtgccgcgggccacagtgggcaggtggcaccgggggtcagcatgcaggggcgccagaggcccaggctgctggccggacagtcaccctctgttctcgctacatcccttgccccctgtccatttatttaagcccccataggtgcccttcacccccaaaaccagctgtacagaatctttgatacagacctatttgctaggggtgctgccggggatttggggtcagcatctggccccctatctcctgaccagctgagtcatgaggccggtttctctctctctcccacttttgtcccccagccaagctctaaagcacatgtagccgctgagacctgctgtttctgctgggggcaggctcctcttcccccagccccgggagcctcccccagcttcctgcagccccgacctctcaggttagaccctgggccctggagcttaggggattctccccaccccagccccacacctgctccttccctaatgctttgaggttttcttggttggaagctgcagctggcccaagaaagaaaataaaaaacaacacttttgcatga

SEQ ID NO: 158375 - DNA, 1417 bp, Homo sapiens
  Payload ID: 11002
  Gene Symbol: NAPA
  Gene Name: N-ethylmaleimide-sensitive factor attachment protein, alpha
  ENST ID: ENST00000594001
  CDS Start-End: 119-226
ccggtgcgacgtcaacgcagccgggcgagttttaccgatctgtgttccgcggcccggccgcggctgagtcttcccagggtcagggtcaggcgctttgctgagtccctttgtggccgccatggacaattccgggaaggaagcggaggcgatggcgctgttggccgaggcggagcgcaaagtgaagaactcgcagtccttcttctctggcctctttggaggccattaactgtttgatgcgagcaatcgagatctacacagacatgggccgattcacgattgcggccaagcaccacatctccattgctgagatctatgagacagagttggtggacatcgagaaggccattgcccactacgagcagtctgcagactactacaaaggcgaggagtccaacagctcagccaacaagtgtctgctgaaggtggctggttacgctgcgctgctggagcagtatcagaaggccattgacatctacgaacaggtggggaccaatgccatggacagccccctcctcaagtacagcgccaaagactacttcttcaaggcggccctctgccacttctgcatcgacatgctcaacgccaagctggctgtccaaaagtatgaggagctgttcccagctttctctgattcccgggaatgcaagttgatgaaaaaattgctagaggcccacgaggagcagaatgtggacagctacaccgagtcggtgaaggaatacgactccatctcccggctggaccagtggctcaccaccatgctgctgcgcatcaagaagaccatccagggcgatgaggaggacctgcgctaagccccacccagccccccagtgcccgtcttcctgtcccatctgctcagagagaggtggggccgagacttgctggagagcttccctcctttcccatctggggagtgccgcgggccacagtgggcaggtggcaccgggggtcagcatgcaggggcgccagaggcccaggctgctggccggacagtcaccctctgttctcgctacatcccttgccccctgtccatttatttaagcccccataggtgcccttcacccccaaaaccagctgtacagaatctttgatacagacctatttgctaggggtgctgccggggatttggggtcagcatctggccccctatctcctgaccagctgagtcatgaggccggtttctctctctctcccacttttgtcccccagccaagctctaaagcacatgtagccgctgagacctgctgtttctgctgggggcaggctcctcttcccccagccccgggagcctcccccagcttcctgcagccccgacctctcaggttagaccctgggccctggagcttaggggattctccccaccccagccccacacctgctccttccctaatgctttgaggttttcttggttggaagctgc

SEQ ID NO: 158376 - DNA, 989 bp, Homo sapiens
  Payload ID: 11002
  Gene Symbol: NAPA
  Gene Name: N-ethylmaleimide-sensitive factor attachment protein, alpha
  ENST ID: ENST00000601208
  CDS Start-End: 104-286
cgcagccgggcgagttttaccgatctgtgttccgcggcccggccgcggctgagtcttcccagggtcagggtcaggcgctttgctgagtccctttgtggccgccatggacaattccgggaaggaagcggaggcgatggcgctgttggccgaggcggagcgcaaagtgaagaactcgcagtccttcttctctggcctctttgggccccatccagaccctactgagcgaatcccaaagtgtgtggctgtgggactctggtttgatgaaatgagcacttcatgtggctgaaagggatgggcaggttggacacactgaatccgcagtgcagagggaaggaatgctcacatcccagctcccaaaattacctttgagcccctccacagctggggttggtgtggacaagttcccagaggctcatccaaaatagaggaagcatgcgaaatctacgccagagcagcaaacatgttcaaaatggccaaaaactggagtgctgctggaaacgcgttctgccaggctgcacagctgcacctgcagctccagagcaagcacgacgcagccacctgctttgtggacgctggcaacgcattcaagaaagccgacccccaagaggccattaactgtttgatgcgagcaatcgagatctacacagacatgggccgattcacgattgcggccaagcaccacatctccattgctgagatctatgagacagagttggtggacatcgagaaggccattgcccactacgagcagtctgcagactactacaaaggcgaggagtccaacagctcagccaacaagtgtctgctgaaggtggctggttacgctgcgctgctggagcagtatcagaaggccattgacatctacgaacaggtggggaccaatgccatggacagccccctcctcaagtacagcgccaaagactacttcttcaaggcggccctctgccacttctgcatcgacatgctcaacgccaagctggctgtccaaa

SEQ ID NO: 158377 - DNA, 379 bp, Homo sapiens
  Payload ID: 11002
  Gene Symbol: NAPA
  Gene Name: N-ethylmaleimide-sensitive factor attachment protein, alpha
  ENST ID: ENST00000598615
  CDS Start-End: 72-379
ggcgaattgcctggtgtggagaaacatccggggctgatggactggattgattagaggccattaactgtttgatgcgagcaatcgagatctacacagacatgggccgattcacgattgcggccaagcaccacatctccattgctgagatctatgagacagagttggtggacatcgagaaggccattgcccactacgagcagtctgcagactactacaaaggcgaggagtccaacagctcagccaacaagtgtctgctgaaggtggctggttacgctgcgctgctggagcagtatcagaaggccattgacatctacgaacaggtggggaccaatgccatggacagccccctcctcaagtacagcgccaaagactacttctt

SEQ ID NO: 158378 - DNA, 583 bp, Homo sapiens
  Payload ID: 11002
  Gene Symbol: NAPA
  Gene Name: N-ethylmaleimide-sensitive factor attachment protein, alpha
  ENST ID: ENST00000597274
  CDS Start-End: 152-376
agtcacgtggttcctggccgcaagcgacgcgcgccggtgcgacgtcaacgcagccgggcgagttttaccgatctgtgttccgcggcccggccgcggctgagtcttcccagggtcagggtcaggcgctttgctgagtccctttgtggccgccatggacaattccgggaaggaagcggaggcgatggcgctgttggccgaggcggagcgcaaagtgaagaactcgcagtccttcttctctggcctctttggctgctggaaacgcgttctgccaggctgcacagctgcacctgcagctccagagcaagcacgacgcagccacctgctttgtggacgctggcaacgcattcaagaaagccgacccccaagaggccattaactgtttgatgcgagcaatcgagatctacacagacatgggccgattcacgattgcggccaagcaccacatctccattgctgagatctatgagacagagttggtggacatcgagaaggccattgcccactacgagcagtctgcagactactacaaaggcgaggagtccaacaggtagcccccttcctgcctgccccagccccgcaggga

SEQ ID NO: 158379 - DNA, 553 bp, Homo sapiens
  Payload ID: 11002
  Gene Symbol: NAPA
  Gene Name: N-ethylmaleimide-sensitive factor attachment protein, alpha
  ENST ID: ENST00000597118
  CDS Start-End: 143-553
ggataatgtttagcaaaataacttgaagaacatgatggcgaattgcctggtgtggagaaacatccggggctgatggactggattgattagaggctcatccaaaatagaggaagcatgcgaaatctacgccagagcagcaaacatgttcaaaatggccaaaaactggagtgctgctggaaacgcgttctgccaggctgcacagctgcacctgcagctccagagcaagcacgacgcagccacctgctttgtggacgctggcaacgcattcaagaaagccgacccccaagaggccattaactgtttgatgcgagcaatcgagatctacacagacatgggccgattcacgattgcggccaagcaccacatctccattgctgagatctatgagacagagttggtggacatcgagaaggccattgcccactacgagcagtctgcagactactacaaaggcgaggagtccaacagctcagccaacaagtgtctgctgaaggtggctggttacgctgcgctgctggagcagtatcagaaggccattgacatctacgaacag

SEQ ID NO: 158380 - DNA, 416 bp, Homo sapiens
  Payload ID: 11002
  Gene Symbol: NAPA
  Gene Name: N-ethylmaleimide-sensitive factor attachment protein, alpha
  ENST ID: ENST00000594155
  CDS Start-End: 1-416
ctgctggaaacgcgttctgccaggctgcacagctgcacctgcagctccagagcaagcacgacgcagccacctgctttgtggacgctggcaacgcattcaagaaagccgacccccaagaggccattaactgtttgatgcgagcaatcgagatctacacagacatgggccgattcacgattgcggccaagcaccacatctccattgctgagatctatgagacagagttggtggacatcgagaaggtggggaccaatgccatggacagccccctcctcaagtacagcgccaaagactacttcttcaaggcggccctctgccacttctgcatcgacatgctcaacgccaagctggctgtccaaaagtatgaggagctgttcccagctttctctgattcccgggaatgcaagttgatgaaa

SEQ ID NO: 158381 - DNA, 1460 bp, Homo sapiens
  Payload ID: 11002
  Gene Symbol: NAPA
  Gene Name: N-ethylmaleimide-sensitive factor attachment protein, alpha
  ENST ID: ENST00000595227
  CDS Start-End: 81-851
tctgtgttccgcggcccggccgcggctgagtcttcccagggtcagggtcaggcgctttgctgagtccctttgtggccgccatggacaattccgggaaggaagcggaggcgatggcgctgttggccgaggcggagcgcaaagtgaagaactcgcagtccttcttctctggcctctttggaggctcatccaaaatagaggaagcatgcgaaatctacgccagagcagcaaacatgttcaaaatggccaaaaactggagtgaggccattaactgtttgatgcgagcaatcgagatctacacagacatgggccgattcacgattgcggccaagcaccacatctccattgctgagatctatgagacagagttggtggacatcgagaaggccattgcccactacgagcagtctgcagactactacaaaggcgaggagtccaacagctcagccaacaagtgtctgctgaaggtggctggttacgctgcgctgctggagcagtatcagaaggccattgacatctacgaacaggtggggaccaatgccatggacagccccctcctcaagtacagcgccaaagactacttcttcaaggcggccctctgccacttctgcatcgacatgctcaacgccaagctggctgtccaaaagtatgaggagctgttcccagctttctctgattcccgggaatgcaagttgatgaaaaaattgctagaggcccacgaggagcagaatgtggacagctacaccgagtcggtgaaggaatacgactccatctcccggctggaccagtggctcaccaccatgctgctgcgcatcaagaagaccatccagggcgatgaggaggacctgcgctaagccccacccagccccccagtgcccgtcttcctgtcccatctgctcagagagaggtggggccgagacttgctggagagcttccctcctttcccatctggggagtgccgcgggccacagtgggcaggtggcaccgggggtcagcatgcaggggcgccagaggcccaggctgctggccggacagtcaccctctgttctcgctacatcccttgccccctgtccatttatttaagcccccataggtgcccttcacccccaaaaccagctgtacagaatctttgatacagacctatttgctaggggtgctgccggggatttggggtcagcatctggccccctatctcctgaccagctgagtcatgaggccggtttctctctctctcccacttttgtcccccagccaagctctaaagcacatgtagccgctgagacctgctgtttctgctgggggcaggctcctcttcccccagccccgggagcctcccccagcttcctgcagccccgacctctcaggttagaccctgggccctggagcttaggggattctccccaccccagccccacacctgctccttccctaatgctttgaggttttcttggttggaagctgca

SEQ ID NO: 158382 - DNA, 554 bp, Homo sapiens
  Payload ID: 11002
  Gene Symbol: NAPA
  Gene Name: N-ethylmaleimide-sensitive factor attachment protein, alpha
  ENST ID: ENST00000594217
  CDS Start-End: 1-252
cacttctgcatcgacatgctcaacgccaagctggctgtccaaaagtatgaggagctgttcccagctttctctgattcccgggaatgcaagttgatgaaaaaattgctagaggcccacgaggagcagaatgtggacagctacaccgagtcggtgaaggaatacgactccatctcccggctggaccagtggctcaccaccatgctgctgcgcatcaagaagaccatccagggcgatgaggaggacctgcgctaagccccacccagccccccagtgcccgtcttcctgtcccatctgctcagagagagccaagctctaaagcacatgtagccgctgagacctgctgtttctgctgggggcaggctcctcttcccccagccccgggagcctcccccagcttcctgcagccccgacctctcaggttagaccctgggccctggagcttaggggattctccccaccccagccccacacctgctccttccctaatgctttgaggttttcttggttggaagctgcagctggcccaagaaagaaaataaaaaacaacacttttg

SEQ ID NO: 158383 - DNA, 891 bp, Homo sapiens
  Payload ID: 11002
  Gene Symbol: NAPA
  Gene Name: N-ethylmaleimide-sensitive factor attachment protein, alpha
  ENST ID: ENST00000593761
  CDS Start-End: 87-891
taccgatctgtgttccgcggcccggccgcggctgagtcttcccagggtcagggtcaggcgctttgctgagtccctttgtggccgccatggacaattccgggaaggaagcggaggcgatggcgctgttggccgaggcggagcgcaaagtgaagaactcgcagtccttcttctctggcctctttggaggctcatccaaaatagaggaagcatgcgaaatctacgccagagcagcaaacatgttcaaaatggccaaaaactggagtggtatgtcatctccgctagagctcctccaagctgctggaaacgcgttctgccaggctgcacagctgcacctgcagctccagagcaagcacgacgcagccacctgctttgtggacgctggcaacgcattcaagaaagccgacccccaagaggccattaactgtttgatgcgagcaatcgagatctacacagacatgggccgattcacgattgcggccaagcaccacatctccattgctgagatctatgagacagagttggtggacatcgagaaggccattgcccactacgagcagtctgcagactactacaaaggcgaggagtccaacagctcagccaacaagtgtctgctgaaggtggctggttacgctgcgctgctggagcagtatcagaaggccattgacatctacgaacaggtggggaccaatgccatggacagccccctcctcaagtacagcgccaaagactacttcttcaaggcggccctctgccacttctgcatcgacatgctcaacgccaagctggctgtccaaaagtatgaggagctgttcccagctttctctgattcccgggaatgcaagttgatgaaaaaattgctagaggcccacgaggagcagaatgtggacagct

SEQ ID NO: 158384 - DNA, 3837 bp, Homo sapiens
  Payload ID: 11003
  Gene Symbol: NAPB
  Gene Name: N-ethylmaleimide-sensitive factor attachment protein, beta
  Uniprot ID: Q9H115
  ENST ID: ENST00000377026
  CDS Start-End: 87-983
gtccctgcggccgccagagggagggttaaggcgcctgggcgcacagcgagccggctgagggggctgtggcggccgcggcgggcgacatggacaacgcggggaaggagcgtgaggcagtacagctgatggcggaggccgagaagcgagtcaaggcctcccactccttcctccgagggctgtttggaggaaacacaagaatagaagaggcttgtgaaatgtataccagagctgcaaatatgttcaagatggctaaaaattggagtgctgcaggaaacgcattttgtcaggcagccaagctccacatgcagcttcagagcaaacatgactctgctaccagctttgtggatgctggaaatgcttacaaaaaggcagatccccaagaggctatcaactgcttaaatgcagccatcgacatttacacagacatgggaaggtttacaattgcagccaagcaccacattactattgcagagatctatgagactgaacttgtagacattgagaaggctattgcacattatgaacaatctgctgattattacaaaggagaagaatccaacagctcagcaaacaagtgtctgctgaaggtggcagcatatgctgcccagcttgagcagtaccagaaagccattgagatctatgagcaggttggggcaaacacaatggataatcctttgttgaaatacagtgcaaaggattacttcttcaaagctgccctctgccacttcatagtagacgagttgaatgccaagcttgctcttgagaaatatgaggaaatgtttccagcatttactgattcaagagaatgtaaattattgaaaaaactcctagaagctcatgaagaacagaacagtgaagcttacactgaagcagtgaaggaatttgactcaatatctcgcttggatcagtggctgaccaccatgttgcttcgcatcaaaaagtccatccaaggggatggagaaggagatggagacctaaaatgaaatgtttttgtctttgtggcatgcagctaactcctctttagttttgtcttagggtcaagtgatctttatgggatgcctatttaatggcttaattttgttgcatatgagccagacggcctgtgtattgtttaagctcgccaagtctgtgttgctgtgaaatgaatgaaggagaggctcctgttcatcttgtggtaatgatgggttgtttcatgcttatcagaacccccagcgttttctgagaagtacttcagaatctcattcctcatatttcattggtatttgtggagcctatgtttaatgttgccacgtgtttttatgtcctttttgttggacttgagtactcagcccagttgttctcatagatgctttgcattttctctgtgctttggcatctgaatatgttctttaaatgtgtgtttagtttaggacagttactaggaatgagtttataacttcattagaaatcatttctatttttgttatcctgtgattattttgatggtgctagtgactagtttctttgctttttgtgttgttccgtatgctaacatgtgcatggcaaaaatttagaatagccagggtctgtaggcatcacattgtgaggaagggagctttctggaagtacttgcttcatgtatggatgagtgtcaaagtgaatttgatttgtacttagacacacgcgtttacacacacacacatatcacaagatctgttagaaatggaatttttctctttttctggagatagttttcacttttagttggagtggaaatccctttatatttacattgaagtattttaattggcatagcctgctcattattttcatgtttatacactttcccacgttgaggtggtgtgttctgtgctgtgactatagaaatcttggtcagggctggatagattatctaagtcaagcttgagaatgaatgtatgtaattttcctgtttattgtacatgatgggttaggtggggtgaatgtggtacaggaatgtcctgtatgcccaagtgggcaagaaccccaacttgtttctcaggggacttgattgttctcttagctggtggaatatgttggcttatgtgtttgaactctgtcgtgtttaattggtttatataatatatgtatgctatcttgattcatgaacttgatcctattaatttatatgctgatattgtactttagacatacgcttgtctcctgaatgtcctctgaatatttatagttaaatgatttatatttgaaatgtgttgccagacttaacccagcagacactctgacatcacggagcttcactgatgacaggtaacgaaacttcctatgttatgtcaggtagtagtaagtagtattggaatgatgttttcatttttggtggctctcaactggaattggtagtgtttccaggccaagggtcgactgcaggttgtttgagaaatgatgagtaggtcagtctaggaagaaagagaaagtagcaggaaaggaagtgggaagggccagccaaggacagactgtagaggatccacatcaggtggccacgaggacttgcaggctatagttatggtggtgacatgcatgaggtgggctggtagagcaggaagctctgtgatgtcagagcatctactgggactacaggtgcactgtagtccccactactgggggtggcaatgaagacactctgtctgttgggccctagaatttaatgtggatttcctccttccttccaagttctgagattcttaaatgagagctggctgtcttctagaggtaagacctggaatggagtccagttggtactttttcactccctcttagaatctcttatgaaaaaatgatcagagagaaaagtggggttttgtttccccacctaataatatatcctacaaccagccaaatgcacttttgtgaaaatggggtgtgaggagtggttctgcagcttgagtcctctggttttaagtagtttgtttctacttgtttaaagaatcttctggtctgaccacttaaagtaaaaactacatgatttattttcgggcaattatgtttagctttcatcattatactccaacagacccgtctgaaggggtatttttttttaacaataatgtttgtaacattttgttgtgtcaattagagggtcacttgtttgtattgcaataaacactgggaccagttccggggttaagaattaatttttgtttttaatatttcacatgaaaagaatcaaagtaattgtaatggctagaagagacctgccagaagattaaaaaaaagaatgagagaaaagcccagttagtggtgtgcaaacttacttcctttaaatgtcccatggatgtaggacagtgccatgtttcaagatgcctgtgagctaggtcttcaagatttatagaatgttacttatgaacaaaatataattatttatggtacaattcttgtactttagcaaatctggagttagttcatagtcaaagtcagttaatatttcttagaggaaagttttgctttttgtggcaacatttttatagcttgtgtgagttcttttttatttaatgatttgaaagcagtatttttgcacagtcgtgaccgtgtgtggtggcgtcactgtaaccaaagtatatgcaccagcccttgtgcatttattgtttctcctgattttgtggatttaaatgtccaaatgcaaacctttgtgacttcctttggaggacttggcagcacagcatgcccccgtgacctgcctgctgtggtatgagctatgaccaagagcaggcttcctgctccatggagtcctgagttgctctggggcaggggattacgttatgaaaactaaccatgtgtaacaataaatctaccttagcagaaaaa

SEQ ID NO: 158385 - DNA, 3824 bp, Homo sapiens
  Payload ID: 11003
  Gene Symbol: NAPB
  Gene Name: N-ethylmaleimide-sensitive factor attachment protein, beta
  Uniprot ID: Q9H115
  ENST ID: ENST00000398425
  CDS Start-End: 353-967
gaaaggcctcgcgcgtcgcgcctgcgcctgcgtccctgcggccgccagagggagggttaaggcgcctgggcgcacagcgagccggctgagggggctgtggcggccgcggcgggcgacatggacaacgcggggaaggagcgtgaggcagtacagctgatggcggaggccgagaagcgagtcaaggcctcccactccttcctccgagggctgtttggaggaaacacaagaatagaagaggcttgtgaaatgtataccagagctgcaaatatgttcaagatggctaaaaattggagtgctgcaggaaacgcattttgtcaggcagccaagctccacatgcagcttcagagcaaacatgactctgctaccagctttgtggatgctggaaatgcttacaaaaaggcagatccccaagggaaggtttacaattgcagccaagcaccacattactattgcagagatctatgagactgaacttgtagacattgagaaggctattgcacattatgaacaatctgctgattattacaaaggagaagaatccaacagctcagcaaacaagtgtctgctgaaggtggcagcatatgctgcccagcttgagcagtaccagaaagccattgagatctatgagcaggttggggcaaacacaatggataatcctttgttgaaatacagtgcaaaggattacttcttcaaagctgccctctgccacttcatagtagacgagttgaatgccaagcttgctcttgagaaatatgaggaaatgtttccagcatttactgattcaagagaatgtaaattattgaaaaaactcctagaagctcatgaagaacagaacagtgaagcttacactgaagcagtgaaggaatttgactcaatatctcgcttggatcagtggctgaccaccatgttgcttcgcatcaaaaagtccatccaaggggatggagaaggagatggagacctaaaatgaaatgtttttgtctttgtggcatgcagctaactcctctttagttttgtcttagggtcaagtgatctttatgggatgcctatttaatggcttaattttgttgcatatgagccagacggcctgtgtattgtttaagctcgccaagtctgtgttgctgtgaaatgaatgaaggagaggctcctgttcatcttgtggtaatgatgggttgtttcatgcttatcagaacccccagcgttttctgagaagtacttcagaatctcattcctcatatttcattggtatttgtggagcctatgtttaatgttgccacgtgtttttatgtcctttttgttggacttgagtactcagcccagttgttctcatagatgctttgcattttctctgtgctttggcatctgaatatgttctttaaatgtgtgtttagtttaggacagttactaggaatgagtttataacttcattagaaatcatttctatttttgttatcctgtgattattttgatggtgctagtgactagtttctttgctttttgtgttgttccgtatgctaacatgtgcatggcaaaaatttagaatagccagggtctgtaggcatcacattgtgaggaagggagctttctggaagtacttgcttcatgtatggatgagtgtcaaagtgaatttgatttgtacttagacacacgcgtttacacacacacacatatcacaagatctgttagaaatggaatttttctctttttctggagatagttttcacttttagttggagtggaaatccctttatatttacattgaagtattttaattggcatagcctgctcattattttcatgtttatacactttcccacgttgaggtggtgtgttctgtgctgtgactatagaaatcttggtcagggctggatagattatctaagtcaagcttgagaatgaatgtatgtaattttcctgtttattgtacatgatgggttaggtggggtgaatgtggtacaggaatgtcctgtatgcccaagtgggcaagaaccccaacttgtttctcaggggacttgattgttctcttagctggtggaatatgttggcttatgtgtttgaactctgtcgtgtttaattggtttatataatatatgtatgctatcttgattcatgaacttgatcctattaatttatatgctgatattgtactttagacatacgcttgtctcctgaatgtcctctgaatatttatagttaaatgatttatatttgaaatgtgttgccagacttaacccagcagacactctgacatcacggagcttcactgatgacaggtaacgaaacttcctatgttatgtcaggtagtagtaagtagtattggaatgatgttttcatttttggtggctctcaactggaattggtagtgtttccaggccaagggtcgactgcaggttgtttgagaaatgatgagtaggtcagtctaggaagaaagagaaagtagcaggaaaggaagtgggaagggccagccaaggacagactgtagaggatccacatcaggtggccacgaggacttgcaggctatagttatggtggtgacatgcatgaggtgggctggtagagcaggaagctctgtgatgtcagagcatctactgggactacaggtgcactgtagtccccactactgggggtggcaatgaagacactctgtctgttgggccctagaatttaatgtggatttcctccttccttccaagttctgagattcttaaatgagagctggctgtcttctagaggtaagacctggaatggagtccagttggtactttttcactccctcttagaatctcttatgaaaaaatgatcagagagaaaagtggggttttgtttccccacctaataatatatcctacaaccagccaaatgcacttttgtgaaaatggggtgtgaggagtggttctgcagcttgagtcctctggttttaagtagtttgtttctacttgtttaaagaatcttctggtctgaccacttaaagtaaaaactacatgatttattttcgggcaattatgtttagctttcatcattatactccaacagacccgtctgaaggggtatttttttttaacaataatgtttgtaacattttgttgtgtcaattagagggtcacttgtttgtattgcaataaacactgggaccagttccggggttaagaattaatttttgtttttaatatttcacatgaaaagaatcaaagtaattgtaatggctagaagagacctgccagaagattaaaaaaaagaatgagagaaaagcccagttagtggtgtgcaaacttacttcctttaaatgtcccatggatgtaggacagtgccatgtttcaagatgcctgtgagctaggtcttcaagatttatagaatgttacttatgaacaaaatataattatttatggtacaattcttgtactttagcaaatctggagttagttcatagtcaaagtcagttaatatttcttagaggaaagttttgctttttgtggcaacatttttatagcttgtgtgagttcttttttatttaatgatttgaaagcagtatttttgcacagtcgtgaccgtgtgtggtggcgtcactgtaaccaaagtatatgcaccagcccttgtgcatttattgtttctcctgattttgtggatttaaatgtccaaatgcaaacctttgtgacttcctttggaggacttggcagcacagcatgcccccgtgacctgcctgctgtggtatgagctatgaccaagagcaggcttcctgctccatggagtcctgagttgctctggggcaggggattacgttatgaaaactaaccatgtgtaacaataaatctaccttagcagaaaaagta

SEQ ID NO: 158386 - DNA, 3754 bp, Homo sapiens
  Payload ID: 11003
  Gene Symbol: NAPB
  Gene Name: N-ethylmaleimide-sensitive factor attachment protein, beta
  Uniprot ID: Q9H115
  ENST ID: ENST00000432543
  CDS Start-End: 118-897
gaaaggcctcgcgcgtcgcgcctgcgcctgcgtccctgcggccgccagagggagggttaaggcgcctgggcgcacagcgagccggctgagggggctgtggcggccgcggcgggcgacatggacaacgcggggaaggagcgtgaggcagtacagctgatggcggaggccgagaagcgagtcaaggcctcccactccttcctccgagggctgtttggaggaaacacaagaatagaagaggcttgtgaaatgtataccagagctgcaaatatgttcaagatggctaaaaattggagtgaggctatcaactgcttaaatgcagccatcgacatttacacagacatgggaaggtttacaattgcagccaagcaccacattactattgcagagatctatgagactgaacttgtagacattgagaaggctattgcacattatgaacaatctgctgattattacaaaggagaagaatccaacagctcagcaaacaagtgtctgctgaaggtggcagcatatgctgcccagcttgagcagtaccagaaagccattgagatctatgagcaggttggggcaaacacaatggataatcctttgttgaaatacagtgcaaaggattacttcttcaaagctgccctctgccacttcatagtagacgagttgaatgccaagcttgctcttgagaaatatgaggaaatgtttccagcatttactgattcaagagaatgtaaattattgaaaaaactcctagaagctcatgaagaacagaacagtgaagcttacactgaagcagtgaaggaatttgactcaatatctcgcttggatcagtggctgaccaccatgttgcttcgcatcaaaaagtccatccaaggggatggagaaggagatggagacctaaaatgaaatgtttttgtctttgtggcatgcagctaactcctctttagttttgtcttagggtcaagtgatctttatgggatgcctatttaatggcttaattttgttgcatatgagccagacggcctgtgtattgtttaagctcgccaagtctgtgttgctgtgaaatgaatgaaggagaggctcctgttcatcttgtggtaatgatgggttgtttcatgcttatcagaacccccagcgttttctgagaagtacttcagaatctcattcctcatatttcattggtatttgtggagcctatgtttaatgttgccacgtgtttttatgtcctttttgttggacttgagtactcagcccagttgttctcatagatgctttgcattttctctgtgctttggcatctgaatatgttctttaaatgtgtgtttagtttaggacagttactaggaatgagtttataacttcattagaaatcatttctatttttgttatcctgtgattattttgatggtgctagtgactagtttctttgctttttgtgttgttccgtatgctaacatgtgcatggcaaaaatttagaatagccagggtctgtaggcatcacattgtgaggaagggagctttctggaagtacttgcttcatgtatggatgagtgtcaaagtgaatttgatttgtacttagacacacgcgtttacacacacacacatatcacaagatctgttagaaatggaatttttctctttttctggagatagttttcacttttagttggagtggaaatccctttatatttacattgaagtattttaattggcatagcctgctcattattttcatgtttatacactttcccacgttgaggtggtgtgttctgtgctgtgactatagaaatcttggtcagggctggatagattatctaagtcaagcttgagaatgaatgtatgtaattttcctgtttattgtacatgatgggttaggtggggtgaatgtggtacaggaatgtcctgtatgcccaagtgggcaagaaccccaacttgtttctcaggggacttgattgttctcttagctggtggaatatgttggcttatgtgtttgaactctgtcgtgtttaattggtttatataatatatgtatgctatcttgattcatgaacttgatcctattaatttatatgctgatattgtactttagacatacgcttgtctcctgaatgtcctctgaatatttatagttaaatgatttatatttgaaatgtgttgccagacttaacccagcagacactctgacatcacggagcttcactgatgacaggtaacgaaacttcctatgttatgtcaggtagtagtaagtagtattggaatgatgttttcatttttggtggctctcaactggaattggtagtgtttccaggccaagggtcgactgcaggttgtttgagaaatgatgagtaggtcagtctaggaagaaagagaaagtagcaggaaaggaagtgggaagggccagccaaggacagactgtagaggatccacatcaggtggccacgaggacttgcaggctatagttatggtggtgacatgcatgaggtgggctggtagagcaggaagctctgtgatgtcagagcatctactgggactacaggtgcactgtagtccccactactgggggtggcaatgaagacactctgtctgttgggccctagaatttaatgtggatttcctccttccttccaagttctgagattcttaaatgagagctggctgtcttctagaggtaagacctggaatggagtccagttggtactttttcactccctcttagaatctcttatgaaaaaatgatcagagagaaaagtggggttttgtttccccacctaataatatatcctacaaccagccaaatgcacttttgtgaaaatggggtgtgaggagtggttctgcagcttgagtcctctggttttaagtagtttgtttctacttgtttaaagaatcttctggtctgaccacttaaagtaaaaactacatgatttattttcgggcaattatgtttagctttcatcattatactccaacagacccgtctgaaggggtatttttttttaacaataatgtttgtaacattttgttgtgtcaattagagggtcacttgtttgtattgcaataaacactgggaccagttccggggttaagaattaatttttgtttttaatatttcacatgaaaagaatcaaagtaattgtaatggctagaagagacctgccagaagattaaaaaaaagaatgagagaaaagcccagttagtggtgtgcaaacttacttcctttaaatgtcccatggatgtaggacagtgccatgtttcaagatgcctgtgagctaggtcttcaagatttatagaatgttacttatgaacaaaatataattatttatggtacaattcttgtactttagcaaatctggagttagttcatagtcaaagtcagttaatatttcttagaggaaagttttgctttttgtggcaacatttttatagcttgtgtgagttcttttttatttaatgatttgaaagcagtatttttgcacagtcgtgaccgtgtgtggtggcgtcactgtaaccaaagtatatgcaccagcccttgtgcatttattgtttctcctgattttgtggatttaaatgtccaaatgcaaacctttgtgacttcctttggaggacttggcagcacagcatgcccccgtgacctgcctgctgtggtatgagctatgaccaagagcaggcttcctgctccatggagtcctgagttgctctggggcaggggattacgttatgaaaactaaccatgtgtaacaataaatctaccttagcagaaaaagta

SEQ ID NO: 158387 - DNA, 3883 bp, Homo sapiens
  Payload ID: 11003
  Gene Symbol: NAPB
  Gene Name: N-ethylmaleimide-sensitive factor attachment protein, beta
  ENST ID: ENST00000617876
  CDS Start-End: 118-1026
gaaaggcctcgcgcgtcgcgcctgcgcctgcgtccctgcggccgccagagggagggttaaggcgcctgggcgcacagcgagccggctgagggggctgtggcggccgcggcgggcgacatggacaacgcggggaaggagcgtgaggcagtacagctgatggcggaggccgagaagcgagtcaaggcctcccactccttcctccgagggctgtttggaggaaacacaagaatagaagaggcttgtgaaatgtataccagagctgcaaatatgttcaagatggctaaaaattggagtgtgtcttcttcagctgcaggaaacgcattttgtcaggcagccaagctccacatgcagcttcagagcaaacatgactctgctaccagctttgtggatgctggaaatgcttacaaaaaggcagatccccaagaggctatcaactgcttaaatgcagccatcgacatttacacagacatgggaaggtttacaattgcagccaagcaccacattactattgcagagatctatgagactgaacttgtagacattgagaaggctattgcacattatgaacaatctgctgattattacaaaggagaagaatccaacagctcagcaaacaagtgtctgctgaaggtggcagcatatgctgcccagcttgagcagtaccagaaagccattgagatctatgagcaggttggggcaaacacaatggataatcctttgttgaaatacagtgcaaaggattacttcttcaaagctgccctctgccacttcatagtagacgagttgaatgccaagcttgctcttgagaaatatgaggaaatgtttccagcatttactgattcaagagaatgtaaattattgaaaaaactcctagaagctcatgaagaacagaacagtgaagcttacactgaagcagtgaaggaatttgactcaatatctcgcttggatcagtggctgaccaccatgttgcttcgcatcaaaaagtccatccaaggggatggagaaggagatggagacctaaaatgaaatgtttttgtctttgtggcatgcagctaactcctctttagttttgtcttagggtcaagtgatctttatgggatgcctatttaatggcttaattttgttgcatatgagccagacggcctgtgtattgtttaagctcgccaagtctgtgttgctgtgaaatgaatgaaggagaggctcctgttcatcttgtggtaatgatgggttgtttcatgcttatcagaacccccagcgttttctgagaagtacttcagaatctcattcctcatatttcattggtatttgtggagcctatgtttaatgttgccacgtgtttttatgtcctttttgttggacttgagtactcagcccagttgttctcatagatgctttgcattttctctgtgctttggcatctgaatatgttctttaaatgtgtgtttagtttaggacagttactaggaatgagtttataacttcattagaaatcatttctatttttgttatcctgtgattattttgatggtgctagtgactagtttctttgctttttgtgttgttccgtatgctaacatgtgcatggcaaaaatttagaatagccagggtctgtaggcatcacattgtgaggaagggagctttctggaagtacttgcttcatgtatggatgagtgtcaaagtgaatttgatttgtacttagacacacgcgtttacacacacacacatatcacaagatctgttagaaatggaatttttctctttttctggagatagttttcacttttagttggagtggaaatccctttatatttacattgaagtattttaattggcatagcctgctcattattttcatgtttatacactttcccacgttgaggtggtgtgttctgtgctgtgactatagaaatcttggtcagggctggatagattatctaagtcaagcttgagaatgaatgtatgtaattttcctgtttattgtacatgatgggttaggtggggtgaatgtggtacaggaatgtcctgtatgcccaagtgggcaagaaccccaacttgtttctcaggggacttgattgttctcttagctggtggaatatgttggcttatgtgtttgaactctgtcgtgtttaattggtttatataatatatgtatgctatcttgattcatgaacttgatcctattaatttatatgctgatattgtactttagacatacgcttgtctcctgaatgtcctctgaatatttatagttaaatgatttatatttgaaatgtgttgccagacttaacccagcagacactctgacatcacggagcttcactgatgacaggtaacgaaacttcctatgttatgtcaggtagtagtaagtagtattggaatgatgttttcatttttggtggctctcaactggaattggtagtgtttccaggccaagggtcgactgcaggttgtttgagaaatgatgagtaggtcagtctaggaagaaagagaaagtagcaggaaaggaagtgggaagggccagccaaggacagactgtagaggatccacatcaggtggccacgaggacttgcaggctatagttatggtggtgacatgcatgaggtgggctggtagagcaggaagctctgtgatgtcagagcatctactgggactacaggtgcactgtagtccccactactgggggtggcaatgaagacactctgtctgttgggccctagaatttaatgtggatttcctccttccttccaagttctgagattcttaaatgagagctggctgtcttctagaggtaagacctggaatggagtccagttggtactttttcactccctcttagaatctcttatgaaaaaatgatcagagagaaaagtggggttttgtttccccacctaataatatatcctacaaccagccaaatgcacttttgtgaaaatggggtgtgaggagtggttctgcagcttgagtcctctggttttaagtagtttgtttctacttgtttaaagaatcttctggtctgaccacttaaagtaaaaactacatgatttattttcgggcaattatgtttagctttcatcattatactccaacagacccgtctgaaggggtatttttttttaacaataatgtttgtaacattttgttgtgtcaattagagggtcacttgtttgtattgcaataaacactgggaccagttccggggttaagaattaatttttgtttttaatatttcacatgaaaagaatcaaagtaattgtaatggctagaagagacctgccagaagattaaaaaaaagaatgagagaaaagcccagttagtggtgtgcaaacttacttcctttaaatgtcccatggatgtaggacagtgccatgtttcaagatgcctgtgagctaggtcttcaagatttatagaatgttacttatgaacaaaatataattatttatggtacaattcttgtactttagcaaatctggagttagttcatagtcaaagtcagttaatatttcttagaggaaagttttgctttttgtggcaacatttttatagcttgtgtgagttcttttttatttaatgatttgaaagcagtatttttgcacagtcgtgaccgtgtgtggtggcgtcactgtaaccaaagtatatgcaccagcccttgtgcatttattgtttctcctgattttgtggatttaaatgtccaaatgcaaacctttgtgacttcctttggaggacttggcagcacagcatgcccccgtgacctgcctgctgtggtatgagctatgaccaagagcaggcttcctgctccatggagtcctgagttgctctggggcaggggattacgttatgaaaactaaccatgtgtaacaataaatctaccttagcagaaaaagta

SEQ ID NO: 158388 - DNA, 3548 bp, Homo sapiens
  Payload ID: 11004
  Gene Symbol: NAPG
  Gene Name: N-ethylmaleimide-sensitive factor attachment protein, gamma
  Uniprot ID: Q99747
  ENST ID: ENST00000322897
  CDS Start-End: 70-1008
ggcggattcttggcgccggaggaagaggcagggtcaccctctctccacgtcagagacctgactgtggagatggcggctcagaagataaacgaggggctggaacacctcgccaaagcagagaaatacctgaaaactggttttttaaaatggaagccagattatgacagtgccgcttctgaatatggaaaagcagctgttgcttttaaaaatgccaaacagtttgagcaagcaaaagatgcctgcctgagggaagctgttgcccatgaaaataatagggctctttttcatgctgccaaagcttatgagcaagctggaatgatgttgaaggagatgcagaaactaccagaggccgttcagctaattgagaaggccagcatgatgtatctagaaaacggcaccccagacacagcagccatggctttggagcgagctggaaagcttatagaaaatgttgatccagagaaggctgtacagttatatcaacagacagctaatgtgtttgaaaatgaagaacgcttacgacaggcagttgaattactaggaaaagcctccagactactagtacgaggacgtaggtttgatgaggcggcactctctattcagaaagaaaaaaatatttataaggaaattgagaattatccaacttgttataagaaaacaattgctcaagtcttagttcatctacacagaaatgactatgtagctgcagaaagatgtgtccgggagagctatagcatccctgggttcaatggcagtgaagactgtgctgccctggaacagcttcttgaaggttatgaccagcaagaccaagatcaggtgtcagatgtctgcaactcaccgcttttcaagtacatggacaatgattatgctaagctgggcctgagtttggtggttccaggagggggaatcaagaagaaatcacctgcaacaccacaggccaagcctgatggtgtcactgccacggctgctgatgaagaggaagatgaatactcaggaggactatgctagtattttgcttgctgaaaagaaaagggaaacaaaggtaaaatcctgacatgccatttcaaggacttgggaatagattagggatatccgtacttcattacagtcatgattttggatcctaataaagactagtttttagttaccatcttcccaaatcactcattgtatccattacctgtgaagcatatctttttctttccataagagcttttctaagacaccagcaggaattaacagaaaatgtactgtcatgttttaatacattgattaaaaaatttgcaagccaaattatacataaattatgttctaaacaaaaggggtaataagcataggtattctctcttggacacttgtaagttactgttagtgaattgttttttacgtttcatttaataattgctgctaaaggtgatgtttactgataaatcattttaaaatttttttgttttgaaaagtaaatttatcccccatgatgttagatacatttaaattattaagtcttttcagagatgagatggggacaggaagttattttgagccttacaatattatttagcccaataaaagatgcattgaagctcttatatattatgagtttgaaaaattttgaaggtagcatattgaagtgatctataaatatcttcagtcctctctgaagtgtgggtatttcttctatctaaaaaatacatacagtgactgtcttcaaatctacttggttcttgaccaaataggagctaatgggtaatgaatacctttttgtttgtttgtttgtttgttttgttttttgtttttttttttaagggtctcactcttttgcccaggctggagtgcagtggcacaatcacggctcccaggctaatgtttttatttttaatttgtaattttttttttattttttttgttgagatggagttgctccatgttgcacaggctgttctcaaactcctaagctcaagccatctgcctgccttggcctcccaaagtgctgggattgtagacataagccacctcacccagcctatgaatatctttctaacattgtaagaatgaggtaatgtttccatcagtctaatacagatatatttcttccctccaaaacagtttattttgattgtttattttattttgattgtaactccgtcataacttgacatggaaaatgctatatactatgaaaacttagctgaaagggaagaattgttttagaaagacaatatttaaaacaccgcactgccaatatattgatcctttatagttatttcctaaaatgctgttttcgaaacattcctttttcaccctgttgtgtggcttagacccatctcgtaatctgttaattggaaagaggctacagacaccagcagtgtgcgttctgcaggtacacgctgccaaagtaattcctgctcatccatgccctgtctctgtctcttttagagtcataccttatttgagtataggttgcttaattttgctagacttcctgaaaacactaaggtggagtatcagaagtgattttagtcacagttctgcgggagagcttagaataacatcctcctttgggaggtggtctcgggtgcgtggatgttggtatacagtctttattgtaagtctgatacaaaatgctaataaatttaatgtttttcttccttaatttattggcatagttcttcaggtagcacctcatttttattaatgatattgggattaactatgaacaagctatatgtagacatttgcatttaaggacattgcagtgtttcaaagatcccatcattgcagcttgtatcctttagatccaatcggaaacttctggagtcttacattaatgctcatttgagctaattagtaatctgtttaaacagatttggcaatactttaaagatactgtagactatttatgtatagatagatcatattacccattaaagtctgggggaaaaaattttttaattttactcttcttatgtactgaaaactttttttaaaaaaggtgatgatgaagtgcattctgtagcagcagcgcagctatgctttaaaccacacaaaaggctgtgtccaggtgcagcctccttcacccttcctgcccacggtgaggattgaataaccaggacttggggatattgtttgttgtcagggttattctgtgtggtaaggaatatttgtttcacatttatacattttctttttccactcacgtaagtttctatcttgagagcatagtccaaagtgcaaaacttggtgtttacaaggaaaattgtcttccagaactccactgtcatcactttcaccaaagtggaagtttgcatgaatatgctcagaatctaatattcaatgttctgttacattgtaagtgaagtccagctacaaaatagatttaatatattgaatttatttgtacatatgcagagtacggtatttctgtatggaatctgctttattcctatttttcccaactctgatgagtagaatattaaatgtgttgttatggaaatacagattattgcttctataggaagataattatgaaaataaaacctgaaactata

SEQ ID NO: 158389 - DNA, 694 bp, Homo sapiens
  Payload ID: 11004
  Gene Symbol: NAPG
  Gene Name: N-ethylmaleimide-sensitive factor attachment protein, gamma
  ENST ID: ENST00000582472
  CDS Start-End: 164-694
ggactcggcgcagtgctgcggggcgagggcttctctacttgggcgctctgctcctgaagattgtggtgggggctgtctgtgcatcggaggctcgttagcagcatccttggcctctacctgctgggtgccggtcgcatctcttccccatttgtggcaacccaaaatgtcatctggggaacaacatcgctctgttgagaaccaccgccctagaagagccccctgtgtggaggggaccataggtttaccccaaaaactcctcggtgaacctttgtcatctggcattttactgtccctgtgggcagggactgtgcttcgttcgtcctttgatgtgtatgtcctgccacctctggtacacctgaaaactggttttttaaaatggaagccagattatgacagtgccgcttctgaatatggaaaagcagctgttgcttttaaaaatgccaaacagtttgagcaagcaaaagatgcctgcctgagggaagctgttgcccatgaaaataatagggctctttttcatgctgccaaagcttatgagcaagctggaatgatgttgaaggagatgcagaaactaccagaggccgttcagctaattgagaaggccagcatgatgtatctagaaaacggcaccccagacacagcagccatggctttggagcgagctggaaagcttatagaaaatgttgatccagagaag

SEQ ID NO: 158390 - DNA, 1245 bp, Homo sapiens
  Payload ID: 11004
  Gene Symbol: NAPG
  Gene Name: N-ethylmaleimide-sensitive factor attachment protein, gamma
  ENST ID: ENST00000580224
  CDS Start-End: 75-143
atttgggcggattcttggcgccggaggaagaggcagggtcaccctctctccacgtcagagacctgactgtggagatggcggctcagaagataaacgaggggctggaacacctcgccaaagcagagaaatactgttgcttttaaaaatgccaaacagtttgagcaagcaaaagatgcctgcctgagggaagctgttgcccatgaaaataatagggctctttttcatgctgccaaagcttatgagcaagctggaatgatgttgaaggagatgcagaaactaccagaggccgttcagctaattgagaaggccagcatgatgtatctagaaaacggcaccccagacacagcagccatggctttggagcgagctggaaagcttatagaaaatgttgatccagagaaggctgtacagttatatcaacagacagctaatgtgtttgaaaatgaagaacgcttacgacaggcagttgaattactaggaaaagcctccagactactagtacgaggacgtaggtttgatgaggcggcactctctattcagaaagaaaaaaatatttataaggaaattgagaattatccaacttgttataagaaaacaattgctcaagtcttagttcatctacacagaaatgactatgtagctgcagaaagatgtgtccgggagagctatagcatccctgggttcaatggcagtgaagactgtgctgccctggaacagcttcttgaaggttatgaccagcaagaccaagatcaggtgtcagatgtctgcaactcaccgcttttcaagtacatggacaatgattatgctaagctgggcctgagtttggtggttccaggagggggaatcaagaagaaatcacctgcaacaccacaggccaagcctgatggtgtcactgccacggctgctgatgaagaggaagatgaatactcaggaggactatgctagtattttgcttgctgaaaagaaaagggaaacaaaggtaaaatcctgacatgccatttcaaggacttgggaatagattagggatatccgtacttcattacagtcatgattttggatcctaataaagactagtttttagttaccatcttcccaaatcactcattgtatccattacctgtgaagcatatctttttctttccataagagcttttctaagacaccagcaggaattaacagaaaatgtactgtcatgttttaatacattgattaaaaaatttgcaagccaaattatacataaattat

SEQ ID NO: 158391 - DNA, 1516 bp, Homo sapiens
  Payload ID: 11004
  Gene Symbol: NAPG
  Gene Name: N-ethylmaleimide-sensitive factor attachment protein, gamma
  ENST ID: ENST00000580483
  CDS Start-End: 199-255
ctctttgcggggcgcaccggcaggctcccagccccgcttcgtcgcagcggcttgggccctccggccctccgtagccgctcgactgtcgcgctgcaccagcttcctcctcggcgttcccacgcctatttgggcggattcttggcgccggaggaagaggcagggtcaccctctctccacgtcagagacctgactgtggagatggcggctcagaagataaacgaggggctggaacacctcgccaaagcagagaaatagagatgcagaaactaccagaggccgttcagctaattgagaaggccagcatgatgtatctagaaaacggcaccccagacacagcagccatggctttggagcgagctggaaagcttatagaaaatgttgatccagagaaggctgtacagttatatcaacagacagctaatgtgtttgaaaatgaagaacgcttacgacaggcagttgaattactaggaaaagcctccagactactagtacgaggacgtaggtttgatgaggcggcactctctattcagaaagaaaaaaatatttataaggaaattgagaattatccaacttgttataagaaaacaattgctcaagtcttagttcatctacacagaaatgactatgtagctgcagaaagatgtgtccgggagagctatagcatccctgggttcaatggcagtgaagactgtgctgccctggaacagcttcttgaaggttatgaccagcaagaccaagatcaggtgtcagatgtctgcaactcaccgcttttcaagtacatggacaatgattatgctaagctgggcctgagtttggtggttccaggagggggaatcaagaagaaatcacctgcaacaccacaggccaagcctgatggtgtcactgccacggctgctgatgaagaggaagatgaatactcaggaggactatgctagtattttgcttgctgaaaagaaaagggaaacaaaggtaaaatcctgacatgccatttcaaggacttgggaatagattagggatatccgtacttcattacagtcatgattttggatcctaataaagactagtttttagttaccatcttcccaaatcactcattgtatccattacctgtgaagcatatctttttctttccataagagcttttctaagacaccagcaggaattaacagaaaatgtactgtcatgttttaatacattgattaaaaaatttgcaagccaaattatacataaattatgttctaaacaaaaggggtaataagcataggtattctctcttggacacttgtaagttactgttagtgaattgttttttacgtttcatttaataattgctgctaaaggtgatgtttactgataaatcattttaaaatttttttgttttgaaaagtaaatttatcccccatgatgttagatacatttaaattattaagtcttttcagagatgagatggggacaggaagttattttgagccttacaatattatttagcccaataaaagatgcattgaagctctta

SEQ ID NO: 158392 - DNA, 5954 bp, Homo sapiens
  Payload ID: 11005
  Gene Symbol: NTN1
  Gene Name: netrin 1
  Uniprot ID: O95631
  ENST ID: ENST00000173229
  CDS Start-End: 108-1922
cttcgggggcgagcgcgcgtgtgtgtgagtgcgcgccggccagcgcgccttctgcggcaggcggacagatcctcggcgcggcagggccggggcaagctggacgcagcatgatgcgcgcagtgtgggaggcgctggcggcgctggcggcggtggcgtgcctggtgggcgcggtgcgcggcgggcccgggctcagcatgttcgcgggccaggcggcgcagcccgatccctgctcggacgagaacggccacccgcgccgctgcatcccggactttgtcaatgcggccttcggcaaggacgtgcgcgtgtccagcacctgcggccggcccccggcgcgctactgcgtggtgagcgagcgcggcgaggagcggctgcgctcgtgccacctctgcaacgcgtccgaccccaagaaggcgcacccgcccgccttcctcaccgacctcaacaacccgcacaacctgacgtgctggcagtccgagaactacctgcagttcccgcacaacgtcacgctcacactgtccctcggcaagaagttcgaagtgacctacgtgagcctgcagttctgctcgccgcggcccgagtccatggccatctacaagtccatggactacgggcgcacgtgggtgcccttccagttctactccacgcagtgccgcaagatgtacaaccggccgcaccgcgcgcccatcaccaagcagaacgagcaggaggccgtgtgcaccgactcgcacaccgacatgcgcccgctctcgggcggcctcatcgccttcagcacgctggacgggcggccctcggcgcacgacttcgacaactcgcccgtgctgcaggactgggtcacggccacagacatccgcgtggccttcagccgcctgcacacgttcggcgacgagaacgaggacgactcggagctggcgcgcgactcgtacttctacgcggtgtccgacctgcaggtgggcggccggtgcaagtgcaacggccacgcggcccgctgcgtgcgcgaccgcgacgacagcctggtgtgcgactgcaggcacaacacggccggcccggagtgcgaccgctgcaagcccttccactacgaccggccctggcagcgcgccacagcccgcgaagccaacgagtgcgtggcctgtaactgcaacctgcatgcccggcgctgccgcttcaacatggagctctacaagctttcggggcgcaagagcggaggtgtctgcctcaactgtcgccacaacaccgccggccgccactgccattactgcaaggagggctactaccgcgacatgggcaagcccatcacccaccggaaggcctgcaaagcctgtgattgccaccctgtgggtgctgctggcaaaacctgcaaccaaaccaccggccagtgtccctgcaaggacggcgtgacgggtatcacctgcaaccgctgcgccaaaggctaccagcagagccgctctcccatcgccccctgcataaagatccctgtagcgccgccgacgactgcagccagcagcgtggaggagcctgaagactgcgattcctactgcaaggcctccaaggggaagctgaagattaacatgaaaaagtactgcaagaaggactatgccgtccagatccacatcctgaaggcggacaaggcgggggactggtggaagttcacggtgaacatcatctccgtgtataagcagggcacgagccgcatccgccgcggtgaccagagcctgtggatccgctcgcgggacatcgcctgcaagtgtcccaaaatcaagcccctcaagaagtacctgctgctgggcaacgcggaggactctccggaccagagcggcatcgtggccgataaaagcagcctggtgatccagtggcgggacacgtgggcgcggcggctgcgcaagttccagcagcgtgagaagaagggcaagtgcaagaaggcctagcgccgaggcagcgggcgggcgggcgggcgggcgccagggcggggccgagcgagagcgggcgccttggcccggccgccgcggacttggcccgcgagggctttcccaggtggggggagggagggggcggggccgcacggcgcggggggcgggaccctcggcggcccctccccctacccccaccctgcgcgctctgggcgggagccgcgtgcacgcggggcggggtgcgccgccggccgggccctggagaaatgacgagacgtagctacctcacggggctccttccagagcagagacgcgcttccctgggcctgggcgcggccgccgtggaggggctgggggcagcctgccctggggcccgggggcgggcgcagaatcgcacaactggggccccaggcgcggggcgtggatggcgcggagacgtggacgggaggagaactgtgaattctcaagcccgtagtgtgggcggggcgcggagcacccaccaaaccaccacccgacacgcagccgacgggatccccccctttctccccggccccttctagcagttccccgcgggccacctggctgtcacagcctggactcctccatctgaaggggcctggcagcatttggggagtggacagctcctgtccagccagcatgccccaggcggcctctgtctccactgctacctgctgagtgggtcctactgggtgggggcttggggtcggtgagtggttcacctgtggagagaggagaggaagcccctgctgctgcctgtctctgcccctgcccctgcccctgcccagcgtggggctggcccatccggaaggcagtgggcccagggacacccctgagaagcccaagccgggtggtcaccgcctcatgctggagctgcctgttggaggaggcatcgcaaacgcaaaacctcccagagagtttccttttggaaacttggaaccagccctttttatgacgttttccagggggagggggaggggcactggctgggtttacggcagtgacactatttatgtaaatgacatcagctcccgcaaggcccctcagcaatgtcaacagctggaaagggcctgaacgggcttggagtctgcaggctgcgaaggcacttgggcctggcttggggccgggggcttgtttgagctgggatggggtttgctggctcagtgaagtaccagagtgcctgagccatgggtgggcaggggcacaggaatgaccaggttcctgggggccaaggaggccatgctggcttctccaagggaaggcacagaggctgccggcctgccccctacagctgtcttgggtctggcctgggccacaccttgaccgtgcctttccagacggtctttgtggagtctgcccgtgccctccactgtgccccagccctccttccaaaatctcctagagacacggtcctcaagcaggcagccccttttgttctgacctcctcacacagggtccattcctgtgccctggggcctcctggctccctgccttcctgggctctctgcactgcccgggcctctggcccacatcctcacacccggcgcactgaattaagaggcctggctcccctcacagtcaggaaattggtttcactttcccggccagagtttggctgctcaaaagggtcataccaagtatgaagctcggcccccggtggtctggcttccctccgccttccccacatttacccgcatcacggctgccatttattgagcacctgctgtgtgccaggcactttacccacatgctcccagtgtgtactcatgacaaccctgtgggacagggactcattatcaccagcaaggagactggagtacacgtgcccaaggtcatgctgcaaattggtggcaggactggggctcaaactccagagcccgactttctgaccaggggccacgctggccctcactgcactccagctctgcagcctacccgcccaatccctgtgcaggctgggagggtgctcttgggggagtggccaccgagcccctggccctggttactgcctcttgaggacactggcatctgggctggagaacaggagcccggggtggggtagggcatggggacaatcacatcttcagaggaggcagcaaagtggtgcgggatgcagggacggacttgccagatggcagctccaggttccaggaaggcaggccttggatgctccgaagaggtggtagaaaggtgtttttagaaaggtgttttggctgcctcagggtggttggagagactccaggagagactggcagaggtgcctcaggggcagggagcagacagacctgccctgggaaggggcatttggcttccctgaatccagcccaaggctagaagacagggcccctctccaagctgtcagcgcccctcggatgcccagtgtggtgtgctgggcgccatcagcatcacaaggcactacgctgctggggcggttgtcctatttctgtctatgccagtgtggtttcttcaccctgcccagaagggctgtggcagccccacgatatcccaccctgggtctgggtctcacgggtgtcctgtgaggggcttgcatttgtggtggtctctgaggccacctcagcaacggagctggcgacacgccaagcaacaaggcatcttgcggaaaattcagccagtgtcctgcccctcccttcggctcagcaccccgcagggcacaggctgtccgcccggtggtctggcccttggggaatgcgtcagggtgaccagatccaccatgctagcagccaggtcactgttgggattgcacggtcgtcacgagctgcctttcctatccacacacccagccaggacccagcccaccactcccgactgcagccccggcctctgcggtgagcaccatccttgggaaagcacccctcctccactccggtgccccactccaaggagcagagggaaatgggaattgaggtgtcccggtttgtacagttaggaagggatgtaaaacggaactagattttgattttgaagagtgtattaaccagaattgtgctatgtaggtgtttgtttgaagaaaaacataccagattagtctttgtttttgaaacagcttccccagttgtcctttttcttaccagctgggtggtctggtgcccctgacagctgagtgcctgctttacggacacgcagtaatgccgaagatttgcgggggaggacatagggctgtccccgggattcacctgctggctgtggtctctgcccactgcttctgtccttggaaagcagggcaggaggcagcatccccaggggcctctatgtgggagggagggacacctggggtcacaacccagggagggagggtcacagcccagggaggctgggagctgctccaaggccctggaactctgcctcagtcgcggcatgctggagaggggtacggacttactttcttggagttgtcccaggttggaatgagactgaactcaagaagagaccctaagggactggggaatggttcctgccttcaggaaagtgaaagacgcttaggctgtcaacacttaaaggaagtccccttgaagcccagagtggacagactagacccattgatggggccactggccatggtccgtggacaagacattcctgtgggccatggcacaccgggggggatcaaaatgtgtacttgtggggtctcgccccttgccaaaagccaaaccagtcccactcctgtcattggacgtttcttcccattccctcctcccaaatgcacttcccctcctccctctgccccctcctgtgttttggatttctgttcactcagaattgtaaatgtttagttgtgaccatgacgtattgtttgggtcaatgtccctttccaatgcatactaatatattatggttattatatatgaatatatttaatgacatggaaaaagttgtggattttctttctttccttttttttgggggggggtggggggttggttagagttgtaatggacccagatggaacttgtaatgtgggccccacatgatagaactaaattcagatatcattaaataaactcttgtacacta

SEQ ID NO: 158393 - DNA, 700 bp, Homo sapiens
  Payload ID: 11005
  Gene Symbol: NTN1
  Gene Name: netrin 1
  ENST ID: ENST00000436734
  CDS Start-End: 1-462
cattactgcaaggagggctactaccgcgacatgggcaagcccatcacccaccggaaggcctgcaaagcctgtgattgccaccctgtgggtgctgctggcaaaacctgcaaccaaaccaccggccagtgtccctgcaaggacggcgtgacgggtatcacctgcaaccgctgcgccaaaggctaccagcagagccgctctcccatcgccccctgcataaagatccctgtagcgccgccgacgactgcagccagcagcgtggaggagcctgaagctgcccgccagcccaacaccttccaggctgaggggttgtcactccttcctggggctgcagagaaggaaggagccagatgctggggatacagaaggaggcttgggcacagggtcgcacaagcagaatgcagggggcccaggagctgggcgtgggggagaatcacatcttcattttcattcgcctctaactaaaaatttagcatttcctccatggcaaagagaggccgcagaccgcagcatgcggccaagcctgcaccgtggtcactggcggaagtcacagcggtttacacatcacattctagctggtgcagatatcataaatatcgttcatgctggttattgcttctcaaaacgacagaagttactagacctgctgctagatcctgatttataatcattaataaagaagcactcgcgtaacgtaaccata

SEQ ID NO: 158394 - DNA, 1986 bp, Homo sapiens
  Payload ID: 11006
  Gene Symbol: NTN3
  Gene Name: netrin 3
  Uniprot ID: O00634
  ENST ID: ENST00000293973
  CDS Start-End: 204-1946
gaggacgcgccaacatccccgctgctgtgctgggcccggggcgtgcccgccgctgctcccacctctgggccgggctggggccgcccgggggccctgttcctcggcattgcgggcctggtgggcagagccgcggagagggcttcttttccccaagggcagcgtcttggggcccggccactggctgacccgcagcggctccggccatgcctggctggccctgggggctgctgctgacggcaggcacgctcttcgccgccctgagtcctgggccgccggcgcccgccgacccctgccacgatgaggggggtgcgccccgcggctgcgtgccaggactggtgaacgccgccctgggccgcgaggtgctggcttccagcacgtgcgggcggccggccactcgggcctgcgacgcctccgacccgcgacgggcacactcccccgccctccttacttccccagggggcacggccagccctctgtgctggcgctcggagtccctgcctcgggcgcccctcaacgtgactctcacggtgcccctgggcaaggcttttgagctggtcttcgtgagcctgcgcttctgctcagctcccccagcctccgtggccctgctcaagtctcaggaccatggccgcagctgggccccgctgggcttcttctcctcccactgtgacctggactatggccgtctgcctgcccctgccaatggcccagctggcccagggcctgaggccctgtgcttccccgcacccctggcccagcctgatggcagcggccttctggccttcagcatgcaggacagcagccccccaggcctggacctggacagcagcccagtgctccaagactgggtgaccgccaccgacgtccgtgtagtgctcacaaggcctagcacggcaggtgaccccagggacatggaggccgtcgtcccttactcctacgcagccaccgacctccaggtgggcgggcgctgcaagtgcaatggacatgcctcacggtgcctgctggacacacagggccacctgatctgcgactgtcggcatggcaccgagggccctgactgcggccgctgcaagcccttctactgcgacaggccatggcagcgggccactgcccgggaatcccacgcctgcctcgcttgctcctgcaacggccatgcccgccgctgccgcttcaacatggagctgtaccgactgtccggccgccgcagcgggggtgtctgtctcaactgccggcacaacaccgccggccgccactgccactactgccgggagggcttctatcgagaccctggccgtgccctgagtgaccgtcgggcttgcagggcctgcgactgtcacccggttggtgctgctggcaagacctgcaaccagaccacaggccagtgtccctgcaaggatggcgtcactggcctcacctgcaaccgctgcgcgcctggcttccagcaaagccgctccccagtggcgccctgtgttaagacccctatccctggacccactgaggacagcagccctgtgcagccccaggactgtgactcgcactgcaaacctgcccgtggcagctaccgcatcagcctaaagaagttctgcaagaaggactatgcggtgcaggtggcggtgggtgcgcgcggcgaggcgcgcggcgcgtggacacgcttcccggtggcggtgctcgccgtgttccggagcggagaggagcgcgcgcggcgcgggagtagcgcgctgtgggtgcccgccggggatgcggcctgcggctgcccgcgcctgctccccggccgccgctacctcctgctggggggcgggcctggagccgcggctgggggcgcggggggccgggggcccgggctcatcgccgcccgcggaagcctcgtgctaccctggagggacgcgtggacgcggcgcctgcggaggctgcagcgacgcgaacggcgggggcgctgcagcgccgcctgagcccgccggctgggcagggcggccgctgctcccacatcta

SEQ ID NO: 158395 - DNA, 3152 bp, Homo sapiens
  Payload ID: 11007
  Gene Symbol: NTN4
  Gene Name: netrin 4
  Uniprot ID: Q9HB63
  ENST ID: ENST00000344911
  CDS Start-End: 98-1873
ggagaaggacgggacggagccggggcagccagaagaggtgggactgagtggagtagctggagtgagttcccgctgtgaaaaagcctgcaaccctcggatgggaaatttggctttggggcgaaaactctgggcagacaccacctgcggtcagaatgctaccgaactgtactgcttctacagtgagaacacggatctgacttgtcggcagcccaaatgtgacaagtgcaatgctgcctatcctcacctggctcacctgccatctgccatggcagactcatccttccggtttcctcgcacatggtggcagtctgcggaggatgtgcacagagaaaagatccagttagacctggaagctgaattctacttcactcacctaattgtgatgttcaagtcccccaggccggctgccatggtgctggaccgctcccaggactttgggaaaacatggaagccttataagtactttgcgactaactgctccgctacatttggcctggaagatgatgttgtcaagaagggcgctatttgtacttctaaatactccagtccttttccatgcactggaggagaggttattttcaaagctttgtcaccaccatacgatacagagaacccttacagtgccaaagttcaggagcagctgaagatcaccaaccttcgcgtgcagctgctgaaacgacagtcttgtccctgtcagagaaatgacctgaacgaagagcctcaacattttacacactatgcaatctatgatttcattgtcaagggcagctgcttctgcaatggccacgctgatcaatgcatacctgttcatggcttcagacctgtcaaggccccaggaacattccacatggtccatgggaagtgtatgtgtaagcacaacacagcaggcagccactgccagcactgtgccccgttatacaatgaccggccatgggaggcagctgatggcaaaacgggggctcccaacgagtgcagaacctgcaagtgtaatgggcatgctgatacctgtcacttcgacgttaatgtgtgggaggcatcagggaatcgtagtggtggtgtctgtgatgactgtcagcacaacacagaaggacagtattgccagaggtgcaagccaggcttctatcgtgacctgcggagacccttctcagctccagatgcttgcaaaccgtgttcctgccatccagtaggatcagctgtccttcctgccaactcagtgaccttctgcgaccccagcaatggtgactgcccttgcaagcctggggtggcagggcgacgttgtgacaggtgcatggtgggatactggggcttcggagactatggctgtcgaccatgtgactgtgcggggagctgtgaccctatcaccggagactgcatcagcagccacacagacatagactggtatcatgaagttcctgacttccgtcccgtgcacaataagagcgaaccagcctgggagtgggaggatgcgcaggggttttctgcacttctacactcaggtaaatgcgaatgtaaggaacagacattaggaaatgccaaggcattctgtggaatgaaatattcatatgtgctaaaaataaagattttatcagctcatgataaaggtactcatgttgaggtcaatgtgaagattaaaaaggtcttaaaatctaccaaactgaagattttccgaggaaagcgaacattatatccagaatcatggacggacagaggatgcacttgtccaatcctcaatcctggtttggaataccttgtagcaggacatgaggatataagaacaggcaaactaattgtgaatatgaaaagctttgtccagcactggaaaccttctcttggaagaaaagtcatggatattttaaaaagagagtgcaagtagcattaagatggatagcacataatggcacttgtctatgtacaaaacacaaactttagagcaagaagacctcagacaggaaactggaattttttaaagtgccaaaacatatagaaatgtttgaatgcatgggtcttatctaacttatctcttctggacccatgtttaaatacagttttatttcatgaagagaaatgaaaacccctacactgatatctgttttctatgggactgattctgaaattcttaactattaagaatattttaatagcagcatgacatttagcagtaatccattaagggcagtacctctaacaaggacgccttccagcttcagcgatgttacttacgtttgatgctacttaaagtaatgaatgacgttttaaggaatccctaaccctactatcagaaaaggtgtttgttaaagagccttctcttgtgtgttacgcatgaactttggtctgtaggtgttaaatggaacctctccatgtgtatatagtatttccttgtataaagcactttactacctaccacttgtgttgtgaacgtttggtgactgctgttgaaagaaggaaaagggtgtgtgagaaagcctactgaagcagcagcactgccactacatgtggacaaaagtgaccatataaaagaagttgtgctatttaactctgaatacttggagaaactaggtgaagatgcaaccagaaaggagaatatgtatgcgtgaagtctcagctttgagctggaggctagattccaagatgacagccatgatgaaactttttaaaaaactaaaccagaagagactttaaaataagagaaagaaatcataaatgtagacatatgcttggctaaaggggaaatggactttaaattttaaagagctcatttgcaatgcacttgtatacacttcaaaaattattgtagacacagaatttgttatatttttgtgcttagtatttaaacctgaacattgaaacagttttcctccttgtctttcttaacagtaatagtcattatatttacctgttttttaacacaatgtatgtgatagtcaaaaaatcacagtttttcattattattcatcttctgtacccacgcataaccactatacatagtttcttttgtacttgaatatacaaaacatgaacacagtgccatatgaataatttcacatacagaacctttttttctctgaagtcctgtggacttgcaaatatatatatatattgctttgttaatttgtttttatatttcatatatgtaataaaggaatatgatctga

SEQ ID NO: 158396 - DNA, 3615 bp, Homo sapiens
  Payload ID: 11007
  Gene Symbol: NTN4
  Gene Name: netrin 4
  Uniprot ID: Q9HB63
  ENST ID: ENST00000343702
  CDS Start-End: 450-2336
ggacgggacggagccggggcagccagaagaggtgggaaaagcggaggaggacgcccaggaggaggcggcggcggcggccgggaagtgaaaggtctcgcaaagttcagcggcggctgcgggcgccgagccccgggctagcggcagacgagcccgcagggccgctccgcggggcagcgcagccaggccggctatggtcccggggctcccgccgccccccaggtgcccgggacccgccaggccggtgcgcgagggtcaccccacctccccgcgcggtcccggcccctggctcccagctgccggcgaccgctgaccgagcccggcgccccaggaggaggaagaaaccagggccccgttccctcccgaggacggcggcgcttcatcccgcagcccagaggtctcggctccctccggcacccgcccggcccggctgctcccggctcctcccggccatggggagctgcgcgcggctgctgctgctctggggctgcacggtggtggccgcaggactgagtggagtagctggagtgagttcccgctgtgaaaaagcctgcaaccctcggatgggaaatttggctttggggcgaaaactctgggcagacaccacctgcggtcagaatgctaccgaactgtactgcttctacagtgagaacacggatctgacttgtcggcagcccaaatgtgacaagtgcaatgctgcctatcctcacctggctcacctgccatctgccatggcagactcatccttccggtttcctcgcacatggtggcagtctgcggaggatgtgcacagagaaaagatccagttagacctggaagctgaattctacttcactcacctaattgtgatgttcaagtcccccaggccggctgccatggtgctggaccgctcccaggactttgggaaaacatggaagccttataagtactttgcgactaactgctccgctacatttggcctggaagatgatgttgtcaagaagggcgctatttgtacttctaaatactccagtccttttccatgcactggaggagaggttattttcaaagctttgtcaccaccatacgatacagagaacccttacagtgccaaagttcaggagcagctgaagatcaccaaccttcgcgtgcagctgctgaaacgacagtcttgtccctgtcagagaaatgacctgaacgaagagcctcaacattttacacactatgcaatctatgatttcattgtcaagggcagctgcttctgcaatggccacgctgatcaatgcatacctgttcatggcttcagacctgtcaaggccccaggaacattccacatggtccatgggaagtgtatgtgtaagcacaacacagcaggcagccactgccagcactgtgccccgttatacaatgaccggccatgggaggcagctgatggcaaaacgggggctcccaacgagtgcagaacctgcaagtgtaatgggcatgctgatacctgtcacttcgacgttaatgtgtgggaggcatcagggaatcgtagtggtggtgtctgtgatgactgtcagcacaacacagaaggacagtattgccagaggtgcaagccaggcttctatcgtgacctgcggagacccttctcagctccagatgcttgcaaaccgtgttcctgccatccagtaggatcagctgtccttcctgccaactcagtgaccttctgcgaccccagcaatggtgactgcccttgcaagcctggggtggcagggcgacgttgtgacaggtgcatggtgggatactggggcttcggagactatggctgtcgaccatgtgactgtgcggggagctgtgaccctatcaccggagactgcatcagcagccacacagacatagactggtatcatgaagttcctgacttccgtcccgtgcacaataagagcgaaccagcctgggagtgggaggatgcgcaggggttttctgcacttctacactcaggtaaatgcgaatgtaaggaacagacattaggaaatgccaaggcattctgtggaatgaaatattcatatgtgctaaaaataaagattttatcagctcatgataaaggtactcatgttgaggtcaatgtgaagattaaaaaggtcttaaaatctaccaaactgaagattttccgaggaaagcgaacattatatccagaatcatggacggacagaggatgcacttgtccaatcctcaatcctggtttggaataccttgtagcaggacatgaggatataagaacaggcaaactaattgtgaatatgaaaagctttgtccagcactggaaaccttctcttggaagaaaagtcatggatattttaaaaagagagtgcaagtagcattaagatggatagcacataatggcacttgtctatgtacaaaacacaaactttagagcaagaagacctcagacaggaaactggaattttttaaagtgccaaaacatatagaaatgtttgaatgcatgggtcttatctaacttatctcttctggacccatgtttaaatacagttttatttcatgaagagaaatgaaaacccctacactgatatctgttttctatgggactgattctgaaattcttaactattaagaatattttaatagcagcatgacatttagcagtaatccattaagggcagtacctctaacaaggacgccttccagcttcagcgatgttacttacgtttgatgctacttaaagtaatgaatgacgttttaaggaatccctaaccctactatcagaaaaggtgtttgttaaagagccttctcttgtgtgttacgcatgaactttggtctgtaggtgttaaatggaacctctccatgtgtatatagtatttccttgtataaagcactttactacctaccacttgtgttgtgaacgtttggtgactgctgttgaaagaaggaaaagggtgtgtgagaaagcctactgaagcagcagcactgccactacatgtggacaaaagtgaccatataaaagaagttgtgctatttaactctgaatacttggagaaactaggtgaagatgcaaccagaaaggagaatatgtatgcgtgaagtctcagctttgagctggaggctagattccaagatgacagccatgatgaaactttttaaaaaactaaaccagaagagactttaaaataagagaaagaaatcataaatgtagacatatgcttggctaaaggggaaatggactttaaattttaaagagctcatttgcaatgcacttgtatacacttcaaaaattattgtagacacagaatttgttatatttttgtgcttagtatttaaacctgaacattgaaacagttttcctccttgtctttcttaacagtaatagtcattatatttacctgttttttaacacaatgtatgtgatagtcaaaaaatcacagtttttcattattattcatcttctgtacccacgcataaccactatacatagtttcttttgtacttgaatatacaaaacatgaacacagtgccatatgaataatttcacatacagaacctttttttctctgaagtcctgtggacttgcaaatatatatatatattgctttgttaatttgtttttatatttcatatatgtaataaaggaatatgatctga

SEQ ID NO: 158397 - DNA, 1971 bp, Homo sapiens
  Payload ID: 11007
  Gene Symbol: NTN4
  Gene Name: netrin 4
  Uniprot ID: Q9HB63
  ENST ID: ENST00000538383
  CDS Start-End: 98-1873
ctagagggagtctactgctcttaggaatgttccgggagaaggactgagtggagtagctggagtgagttcccgctgtgaaaaagcctgcaaccctcggatgggaaatttggctttggggcgaaaactctgggcagacaccacctgcggtcagaatgctaccgaactgtactgcttctacagtgagaacacggatctgacttgtcggcagcccaaatgtgacaagtgcaatgctgcctatcctcacctggctcacctgccatctgccatggcagactcatccttccggtttcctcgcacatggtggcagtctgcggaggatgtgcacagagaaaagatccagttagacctggaagctgaattctacttcactcacctaattgtgatgttcaagtcccccaggccggctgccatggtgctggaccgctcccaggactttgggaaaacatggaagccttataagtactttgcgactaactgctccgctacatttggcctggaagatgatgttgtcaagaagggcgctatttgtacttctaaatactccagtccttttccatgcactggaggagaggttattttcaaagctttgtcaccaccatacgatacagagaacccttacagtgccaaagttcaggagcagctgaagatcaccaaccttcgcgtgcagctgctgaaacgacagtcttgtccctgtcagagaaatgacctgaacgaagagcctcaacattttacacactatgcaatctatgatttcattgtcaagggcagctgcttctgcaatggccacgctgatcaatgcatacctgttcatggcttcagacctgtcaaggccccaggaacattccacatggtccatgggaagtgtatgtgtaagcacaacacagcaggcagccactgccagcactgtgccccgttatacaatgaccggccatgggaggcagctgatggcaaaacgggggctcccaacgagtgcagaacctgcaagtgtaatgggcatgctgatacctgtcacttcgacgttaatgtgtgggaggcatcagggaatcgtagtggtggtgtctgtgatgactgtcagcacaacacagaaggacagtattgccagaggtgcaagccaggcttctatcgtgacctgcggagacccttctcagctccagatgcttgcaaaccgtgttcctgccatccagtaggatcagctgtccttcctgccaactcagtgaccttctgcgaccccagcaatggtgactgcccttgcaagcctggggtggcagggcgacgttgtgacaggtgcatggtgggatactggggcttcggagactatggctgtcgaccatgtgactgtgcggggagctgtgaccctatcaccggagactgcatcagcagccacacagacatagactggtatcatgaagttcctgacttccgtcccgtgcacaataagagcgaaccagcctgggagtgggaggatgcgcaggggttttctgcacttctacactcaggtaaatgcgaatgtaaggaacagacattaggaaatgccaaggcattctgtggaatgaaatattcatatgtgctaaaaataaagattttatcagctcatgataaaggtactcatgttgaggtcaatgtgaagattaaaaaggtcttaaaatctaccaaactgaagattttccgaggaaagcgaacattatatccagaatcatggacggacagaggatgcacttgtccaatcctcaatcctggtttggaataccttgtagcaggacatgaggatataagaacaggcaaactaattgtgaatatgaaaagctttgtccagcactggaaaccttctcttggaagaaaagtcatggatattttaaaaagagagtgcaagtagcattaagatggatagcacataatggcacttgtctatgtacaaaacacaaactttagagcaagaagacctcagacaggaaactggaattttttaaagtg

SEQ ID NO: 158398 - DNA, 1818 bp, Homo sapiens
  Payload ID: 11007
  Gene Symbol: NTN4
  Gene Name: netrin 4
  Uniprot ID: Q9HB63
  ENST ID: ENST00000553059
  CDS Start-End: 1-1818
atggggagctgcgcgcggctgctgctgctctggggctgcacggtggtggccgcaggactgagtggagtagctggagtgagttcccgctgtgaaaaagcctgcaaccctcggatgggaaatttggctttggggcgaaaactctgggcagacaccacctgcggtcagaatgctaccgaactgtactgcttctacagtgagaacacggatctgacttgtcggcagcccaaatgtgacaagtgcaatgctgcctatcctcacctggctcacctgccatctgccatggcagactcatccttccggtttcctcgcacatggtggcagtctgcggaggatgtgcacagagaaaagatccagttagacctggaagctgaattctacttcactcacctaattgtgatgttcaagtcccccaggccggctgccatggtgctggaccgctcccaggactttgggaaaacatggaagccttataagtactttgcgactaactgctccgctacatttggcctggaagatgatgttgtcaagaagggcgctatttgtacttctaaatactccagtccttttccatgcactggaggagaggttattttcaaagctttgtcaccaccatacgatacagagaacccttacagtgccaaagttcaggagcagctgaagatcaccaaccttcgcgtgcagctgctgaaacgacagtcttgtccctgtcagagaaatgacctgaacgaagagcctcaacattttacacactatgcaatctatgatttcattgtcaagggcagctgcttctgcaatggccacgctgatcaatgcatacctgttcatggcttcagacctgtcaaggccccaggaacattccacatggtccatgggaagtgtatgtgtaagcacaacacagcaggcagccactgccagcactgtgccccgttatacaatgaccggccatgggaggcagctgatggcaaaacgggggctcccaacgagtgcagaacctgcaagtgtaatgggcatgctgatacctgtcacttcgacgttaatgtgtgggaggcatcagggaatcgtagtggtggtgtctgtgatgactgtcagcacaacacagaaggacagtattgccagaggtgcaagccaggcttctatcgtgacctgcggagacccttctcagctccagatgcttgcaaaccgtgttcctgccatccagtaggatcagctgtccttcctgccaactcagtgaccttctgcgaccccagcaatggtgactgcccttgcaagcctggggtggcagggcgacgttgtgacaggtgcatggtgggatactggggcttcggagactatggctgtcgaccatgtgactgtgcggggagctgtgaccctatcaccggagactgcatcagcagccacacagacatagactggtatcatgaagttcctgacttccgtcccgtgcacaataagagcgaaccagcctgggagtgggaggatgcgcaggggttttctgcacttctacactcagtgctaaaaataaagattttatcagctcatgataaaggtactcatgttgaggtcaatgtgaagattaaaaaggtcttaaaatctaccaaactgaagattttccgaggaaagcgaacattatatccagaatcatggacggacagaggatgcacttgtccaatcctcaatcctggtttggaataccttgtagcaggacatgaggatataagaacaggcaaactaattgtgaatatgaaaagctttgtccagcactggaaaccttctcttggaagaaaagtcatggatattttaaaaagagagtgcaagtag

SEQ ID NO: 158399 - DNA, 749 bp, Homo sapiens
  Payload ID: 11007
  Gene Symbol: NTN4
  Gene Name: netrin 4
  ENST ID: ENST00000547980
  CDS Start-End: 220-749
gagggaacaaaggacccagctcgccatcccccggcacttcatggcctaaggaatgatgaggaggggtggcccagcgaccctgggcgcgcgtgggctggggccggtctctggtagaagcccatcgctggtgtccctgacctggtgctgggtactagagaaccaggactgagtggagtagctggagtgagttcccgctgtgaaaaagcctgcaaccctcggatgggaaatttggctttggggcgaaaactctgggcagacaccacctgcggtcagaatgctaccgaactgtactgcttctacagtgagaacacggatctgacttgtcggcagcccaaatgtgacaagtgcaatgctgcctatcctcacctggctcacctgccatctgccatggcagactcatccttccggtttcctcgcacatggtggcagtctgcggaggatgtgcacagagaaaagatccagttagacctggaagctgaattctacttcactcacctaattgtgatgttcaagtcccccaggccggctgccatggtgctggaccgctcccaggactttgggaaaacatggaagccttataagtactttgcgactaactgctccgctacatttggcctggaagatgatgttgtcaagaagggcgctatttgtacttctaaatactccagtccttttccatgcactggaggagaggttattttcaaagctttgtcaccaccatacgatacagagaacccttacagtgccaa

SEQ ID NO: 158400 - DNA, 1836 bp, Homo sapiens
  Payload ID: 11008
  Gene Symbol: NTN5
  Gene Name: netrin 5
  Uniprot ID: Q8WTR8
  ENST ID: ENST00000270235
  CDS Start-End: 97-1566
gagagcccaccgcgccacagcttggaggaagagcctgcggggaactggctgcaggacgctctcttcttgagtgcaggtgctggctctgctgtgaccatgcccgtgacctttgccctcctgctcctcctgggccaggccactgcggacccatgctacgatccacagggccgcccccaattctgcctcccgccagtgacacagctggctgccgtggcggcctcctgccctcaggcctgtgccctgtccccaggaaaccaccttggcgccagggaaacctgcaatggcagcctgactttggccctgggtggccccttcctcctgacatctgtcagcttgcgcttctgtaccccaggacccccagccctcatcctgtctgctgcctgggcctcagggggtccctggaggctgctgtggcacaggcccgcctggcctggggccttagggggccctgaaagggtgaccttccactccacaccaggtcctaaggccactgtggcggccagccacctccgtgtggagtttgggggccaggccgggctagcggcagctgggctgagaggccgctgccagtgtcatggccacgctgcccgctgtgccgcccgtgcccggcccccccgctgccactgccgccaccataccactggcccggggtgcgagagctgccgcccgtcccatcgagactggccctggcggcctgccacgccccggcacccccacccttgcctaccctgctcctgcaaccagcacgcccgacgctgccggttcaactctgagctgttcagactgtcgggcggccggagtgggggtgtttgtgagcggtgccgccaccacacagctgggcggcactgccactactgccaacctgggttctggagggaccctagccagcctatcttcagccgcagggcctgcagagcctgccagtgccaccctattggggcaacaggaggaacctgcaaccagaccagtgggcagtgcacctgcaagttaggggtcacaggcctgacctgcaaccgctgtggccctggctaccagcagagccgctcccccaggatgccctgccagcgaattccagaggcaacaaccacccttgccactactcctggtgcttatagctctgaccctcagtgtcaaaactactgcaatatgtcggacaccagggtacacatgagccttcggaggtactgccagcaggaccatgttctccgcgcgcaggtgctagcgtccgaggcggcgggcccggcatggcagcggctggccgtgcgcgtgctggccgtttacaagcagcgggcgcagcccgtgcgacgcggcgaccaggacgcctgggtgccccgcgccgacctgacctgcggctgcctgcgcctgcagccaggcaccgactacctgctgctgggcagcgccgtgggcgaccccgaccccacgcgcctcatcctcgaccgccacggcctcgcgctgccatggaggccgcgctgggcccggcccctgaagcggctgcagcaggaggagcgcgccggaggctgccgcggcgtgcgggcacccacacccagtcccaggccggagcactagacgtgagatggggctgcctcgagcaccaacaaagtaatttgggagcgactaggagctgagccttctacctcgacggtgcactgcagagagccaatcagacgtcgcagagccccgacgacactatgcttgcgcccacgccgagcaggcgtgcggaacttttagcaaaaggcggcaagcgggacttctggtcccaacatttcctcctttggcctgtggcttattccccgccagtgatctgtttcccccaataaagtctcaaatctttgggaa

SEQ ID NO: 158401 - DNA, 701 bp, Homo sapiens
  Payload ID: 11008
  Gene Symbol: NTN5
  Gene Name: netrin 5
  ENST ID: ENST00000596844
  CDS Start-End: 477-701
tctgctctgagcccccgcccagcccagaaaccccactagcctggggcctgagaacagccacgccactccctcctgagagcccaccgcgccacagcttggaggaagagcctgcggggaactggctgcaggacgctctcttcttgagtgcagcctgctcctgcaaccagcacgcccgacgctgccggttcaactctgagctgttcagactgtcgggcggccggagtgggggtgtttgtgagcggtgccgccaccacacagctgggcggcactgccactactgccaacctgggttctggagggaccctagccagcctatcttcagccgcagggcctgcagagcctgccagtgccaccctattggggcaacaggaggaacctgcaaccagaccagtgggcagtgcacctgcaagttaggggtcacaggcctgacctgcaaccgctgtggccctggctaccagcagagccgctcccccaggatgccctgccagcgaattccagaggcaacaaccacccttgccactactcctggtgcttatagctctgaccctcagtgtcaaaactactgcaatatgtcggacaccagggtacacatgagccttcggaggtactgccagcaggaccatgttctccgcgcgcaggtgctagcgtccgaggcggcgggcccggcatggcagcggctggccgtgcgcgtgctggccgtt

SEQ ID NO: 158402 - DNA, 1485 bp, Homo sapiens
  Payload ID: 11009
  Gene Symbol: NTNG1
  Gene Name: netrin G1
  Uniprot ID: Q9Y2I2
  ENST ID: ENST00000370065
  CDS Start-End: 1-1485
atgtatttgtcaagattcctgtcgattcatgccctttgggttacggtgtcctcagtgatgcagccctaccctttggtttggggacattatgatttgtgtaagactcagatttacacggaagaagggaaagtttgggattacatggcctgccagccggaatccacggacatgacaaaatatctgaaagtgaaactcgatcctccggatattacctgtggagaccctcctgagacgttctgtgcaatgggcaatccctacatgtgcaataatgagtgtgatgcgagtacccctgagctggcacacccccctgagctgatgtttgattttgaaggaagacatccctccacattttggcagtctgccacttggaaggagtatcccaagcctctccaggttaacatcactctgtcttggagcaaaaccattgagctaacagacaacatagttattacctttgaatctgggcgtccagaccaaatgatcctggagaagtctctcgattatggacgaacatggcagccctatcagtattatgccacagactgcttagatgcttttcacatggatcctaaatccgtgaaggatttatcacagcatacggtcttagaaatcatttgcacagaagagtactcaacagggtatacaacaaatagcaaaataatccactttgaaatcaaagacaggttcgcgttttttgctggacctcgcctacgcaatatggcttccctctacggacagctggatacaaccaagaaactcagagatttctttacagtcacagacctgaggataaggctgttaagaccagccgttggggaaatatttgtagatgagctacacttggcacgctacttttacgcgatctcagacataaaggtgcgaggaaggtgcaagtgtaatctccatgccactgtatgtgtgtatgacaacagcaaattgacatgcgaatgtgagcacaacactacaggtccagactgtgggaaatgcaagaagaattatcagggccgaccttggagtccaggctcctatctccccatccccaaaggcactgcaaatacctgtatccccagtatttccagtattggtaattgtgaatgcttcggccactccaatcgatgcagttatatcgatctgctaaatacagtcatttgcgtgagctgtaaacacaacactagagggcagcactgtgagttatgcaggctgggctacttcagaaatgcttctgcacaactggacgatgagaatgtgtgcatagcgaatgtctgcgacaacgagctcctgcactgccagaacggagggacgtgccacaacaacgtgcgctgcctgtgcccggccgcatacacgggcatcctctgcgagaagctgcggtgcgaggaggctggcagctgcggctccgactctggccagggcgcgcccccgcacggctccccagcgctgctgctgctgaccacgctgctgggaaccgccagccccctggtgttctag

SEQ ID NO: 158403 - DNA, 1443 bp, Homo sapiens
  Payload ID: 11009
  Gene Symbol: NTNG1
  Gene Name: netrin G1
  Uniprot ID: Q9Y2I2
  ENST ID: ENST00000370066
  CDS Start-End: 1-1443
atgtatttgtcaagattcctgtcgattcatgccctttgggttacggtgtcctcagtgatgcagccctaccctttggtttggggacattatgatttgtgtaagactcagatttacacggaagaagggaaagtttgggattacatggcctgccagccggaatccacggacatgacaaaatatctgaaagtgaaactcgatcctccggatattacctgtggagaccctcctgagacgttctgtgcaatgggcaatccctacatgtgcaataatgagtgtgatgcgagtacccctgagctggcacacccccctgagctgatgtttgattttgaaggaagacatccctccacattttggcagtctgccacttggaaggagtatcccaagcctctccaggttaacatcactctgtcttggagcaaaaccattgagctaacagacaacatagttattacctttgaatctgggcgtccagaccaaatgatcctggagaagtctctcgattatggacgaacatggcagccctatcagtattatgccacagactgcttagatgcttttcacatggatcctaaatccgtgaaggatttatcacagcatacggtcttagaaatcatttgcacagaagagtactcaacagggtatacaacaaatagcaaaataatccactttgaaatcaaagacaggttcgcgttttttgctggacctcgcctacgcaatatggcttccctctacggacagctggatacaaccaagaaactcagagatttctttacagtcacagacctgaggataaggctgttaagaccagccgttggggaaatatttgtagatgagctacacttggcacgctacttttacgcgatctcagacataaaggtgcgaggaaggtgcaagtgtaatctccatgccactgtatgtgtgtatgacaacagcaaattgacatgcgaatgtgagcacaacactacaggtccagactgtgggaaatgcaagaagaattatcagggccgaccttggagtccaggctcctatctccccatccccaaaggcactgcaaatacctgtatccccagtatttccagtattggtaatcctccaaagtttaataggatatggccgaatatttcttcccttgaggtttctaacccaaaacaagttgctcccaaattagctttgtcaacagtttcttctgttcaagttgcaaaccacaagagagcgaatgtctgcgacaacgagctcctgcactgccagaacggagggacgtgccacaacaacgtgcgctgcctgtgcccggccgcatacacgggcatcctctgcgagaagctgcggtgcgaggaggctggcagctgcggctccgactctggccagggcgcgcccccgcacggctccccagcgctgctgctgctgaccacgctgctgggaaccgccagccccctggtgttctag

SEQ ID NO: 158404 - DNA, 4628 bp, Homo sapiens
  Payload ID: 11009
  Gene Symbol: NTNG1
  Gene Name: netrin G1
  Uniprot ID: Q9Y2I2
  ENST ID: ENST00000370067
  CDS Start-End: 628-2010
gcatttcggaagaggacgtcaacgggaaggaattccccctctgggtgcgggctccgagagggggcgacttgcaggaggctccccccgggggcggaggcgaagggtgttggtgccagaagaaaagaatgattgatgggaaacagacaccgggctatagacactcatccttttgcttcagatactgatatctcagcctgcttgagcatcccttgtgagctgtgaacattgaggatcactcagggttatcggatgtacaacgggagagccatcgctttgctaaattattatctgcaattggacatcttttacaaaaaccaaactagacctgagtctaatagatatgttctaagacaaagaaaaagctgcaagttgttaacgcctaacacacaagtatgttaggcttccaccaaagtcctcaatatacctgaatacgcacaatatcttaactcttcatatttggttttgggatctgctttgaggtcccatcttcatttaaaaaaaaatacagagacctacctacccgtacgcatacatacatatgtgtatatatatgtaaactagacaaagatcgcagatcataaagcaagctctgctttagtttccaagaagattacaaagaatttagagatgtatttgtcaagattcctgtcgattcatgccctttgggttacggtgtcctcagtgatgcagccctaccctttggtttggggacattatgatttgtgtaagactcagatttacacggaagaagggaaagtttgggattacatggcctgccagccggaatccacggacatgacaaaatatctgaaagtgaaactcgatcctccggatattacctgtggagaccctcctgagacgttctgtgcaatgggcaatccctacatgtgcaataatgagtgtgatgcgagtacccctgagctggcacacccccctgagctgatgtttgattttgaaggaagacatccctccacattttggcagtctgccacttggaaggagtatcccaagcctctccaggttaacatcactctgtcttggagcaaaaccattgagctaacagacaacatagttattacctttgaatctgggcgtccagaccaaatgatcctggagaagtctctcgattatggacgaacatggcagccctatcagtattatgccacagactgcttagatgcttttcacatggatcctaaatccgtgaaggatttatcacagcatacggtcttagaaatcatttgcacagaagagtactcaacagggtatacaacaaatagcaaaataatccactttgaaatcaaagacaggttcgcgttttttgctggacctcgcctacgcaatatggcttccctctacggacagctggatacaaccaagaaactcagagatttctttacagtcacagacctgaggataaggctgttaagaccagccgttggggaaatatttgtagatgagctacacttggcacgctacttttacgcgatctcagacataaaggtgcgaggaaggtgcaagtgtaatctccatgccactgtatgtgtgtatgacaacagcaaattgacatgcgaatgtgagcacaacactacaggtccagactgtgggaaatgcaagaagaattatcagggccgaccttggagtccaggctcctatctccccatccccaaaggcactgcaaatacctgtatccccagtatttccagtattggtaatcctccaaagtttaataggatatggccgaatatttcttcccttgaggtttctaacccaaaacaagcgaatgtctgcgacaacgagctcctgcactgccagaacggagggacgtgccacaacaacgtgcgctgcctgtgcccggccgcatacacgggcatcctctgcgagaagctgcggtgcgaggaggctggcagctgcggctccgactctggccagggcgcgcccccgcacggctccccagcgctgctgctgctgaccacgctgctgggaaccgccagccccctggtgttctaggtgtcacctccagccacaccggacgggcctgtgccgtggggaagcagacacaacccaaacatttgctactaacataggaaacacacacatacagacacccccactcagacagtgtacaaactaagaaggcctaactgaactaagccatatttatcacccgtggacagcacatccgagtcaagactgttaatttctgactccagaggagttggcagctgttgatattatcactgcaaatcacattgccagctgcagagcatattgtggattggaaaggctgcgacagccccccaaacaggaaagacaaaaaacaaacaaatcaaccgacctaaaaacattggctactctagcgtggtgcgccctagtacgactccgcccagtgtgtggaccaaccaaatagcattctttgctgtcaggtgcattgtgggcataaggaaatctgttacaagctgccatattggcctgcttccgtccctgaatcccttccaacctgtgctttagtgaacgttgctctgtaacccttgttggttgaaagatttctttgtctgatgttagtgatgcacatgtgtaacagccccctctaaaagcgcaagccagtcatacccctgtatatcttagcagcactgagtccagtgcgagcacacacccactatacaagagtggctataggaaaaaagaaagtgtatctatccttttgtattcaaatgaagttatttttcttgaactactgtaatatgtagattttttgtattattgccaatttgtgttaccagacaatctgttaatgtatctaattcgaatcagcaaagactgacattttattttgtcctctttcgttctgttttgtttcactgtgcagagatttctctgtaagggcaacgaacgtgctggcatcaaagaatatcagtttacatatataacaagtgtaataagattccaccaaaggacattctaaatgttttcttgttgctttaacactggaagatttaaagaataaaaactcctgcataaacgatttcaggaatttgtattgcaatttcttaagatgaaaggaacagccaccaagcagtttcacactcactttactgatttctgtgtggactgagtacattcagctgacgaatttagttcccaggaagatggattgatgttcactagcttggacaacttctgcaaaatatgagactatttccacttgggaaaaattacaacagcaaaaaaaaaaaaaaaaaaaaaaaaaaatctaagtgattgccaagattatgccaaagcctgttggcagagtactaagagacttttatttttaagtcatgctattttcacagattgatggtgatcatgtgactctagggatgctgatctatgtatctttccaaatacagtgtttacatggagtatcacaagacgcaacctggggaaccaggaagggagcagggaaattgagtgatttgcaatttgactttgaatatattcagacttaagtatttagaggaaatatcaaaatataaagcagcaagtagacataactgctgttcctgagaataaagtttgttttaagtgctgcccaaggtgtaataaattcttgtttctgccttttattaggccaattactgtgcaagacagcaaggggaggcaggtggggaagaacctttgcaaagtttcaaagaggctaagacagtgtgcatttcgttcccagcacactgttgtcctacagattacaagtgtattagcagcagcatctcctggaatcaaaaacaattatcagcccgaaccagagtcttaaggacaatgaaattctacatgacttggtagaacaataacctatgatagtgtaaggtcagaaacctagttccagtctgaattcttcaccctgctgccactccttgctgaaacagggaaggggggaggaatgtctcctgataaataacctgggtaaaaactagatgaaggaacagcatgtcttattggttttgttcccagaaaagccaattcgaagaaggcaataaaaggtaaacaggtaatgcctgtgctgcctgccaccccacgtctaagtctattgaatgtttgttattcaaaccaacagtctcttttgatgtaagaaataaggaaagatggaaataaattagagcttaggcttagtgccagagtggccaaccagaaattggagatttacgttggaagcataaatagaaaattatatttcaggctcaccaaagaaacacatgaaaatgctgataacatagggagtttgagattatttataatgaggtggatttctgatattaaaattagagtttaagttgtcttatagtttattagcacaaaccaaaggcagcccatgttatttctggcaaagatgcactttatcgttatctgctcatggctttgtcgcaacgctcaggaatcagacactgcacacttcaatagttgggattccaaaagctaattctaaaatttaatgaaggcctgatttaaactgattcatctgcattttatctttatgaggccataagaatctaaattgatgaggaatatctttcattccgtgtatttagatatagttttctgaatttcctgaagcgatgtgatctgcttttaataaaaattcacttttaggt

SEQ ID NO: 158405 - DNA, 4034 bp, Homo sapiens
  Payload ID: 11009
  Gene Symbol: NTNG1
  Gene Name: netrin G1
  Uniprot ID: Q9Y2I2
  ENST ID: ENST00000370068
  CDS Start-End: 847-2466
taaaagtttaaggcgagaagtgtcagaggcagcggagcgaggaggcgcggaggagagccggcgagcaggggactgggctggcacgacctccgaaggctgagatctcattattaatatcactatatttttggagggagaggcacctttctcatcctctcttcctctccgcccacccttactccctccccctcatctacctgtcaaagtcactgatcttttgcatttcggaagaggacgtcaacgggaaggaattccccctctgggtgcgggctccgagagggggcgacttgcaggaggctccccccgggggcggaggcgaagggtgttggtgccagaagaaaagaatgattgatgggaaacagacaccgggctatagacactcatccttttgcttcagatactgatatctcagcctgcttgagcatcccttgtgagctgtgaacattgaggatcactcagggttatcggatgtacaacgggagagccatcgctttgctaaattattatctgcaattggacatcttttacaaaaaccaaactagacctgagtctaatagatatgttctaagacaaagaaaaagctgcaagttgttaacgcctaacacacaagtatgttaggcttccaccaaagtcctcaatatacctgaatacgcacaatatcttaactcttcatatttggttttgggatctgctttgaggtcccatcttcatttaaaaaaaaatacagagacctacctacccgtacgcatacatacatatgtgtatatatatgtaaactagacaaagatcgcagatcataaagcaagctctgctttagtttccaagaagattacaaagaatttagagatgtatttgtcaagattcctgtcgattcatgccctttgggttacggtgtcctcagtgatgcagccctaccctttggtttggggacattatgatttgtgtaagactcagatttacacggaagaagggaaagtttgggattacatggcctgccagccggaatccacggacatgacaaaatatctgaaagtgaaactcgatcctccggatattacctgtggagaccctcctgagacgttctgtgcaatgggcaatccctacatgtgcaataatgagtgtgatgcgagtacccctgagctggcacacccccctgagctgatgtttgattttgaaggaagacatccctccacattttggcagtctgccacttggaaggagtatcccaagcctctccaggttaacatcactctgtcttggagcaaaaccattgagctaacagacaacatagttattacctttgaatctgggcgtccagaccaaatgatcctggagaagtctctcgattatggacgaacatggcagccctatcagtattatgccacagactgcttagatgcttttcacatggatcctaaatccgtgaaggatttatcacagcatacggtcttagaaatcatttgcacagaagagtactcaacagggtatacaacaaatagcaaaataatccactttgaaatcaaagacaggttcgcgttttttgctggacctcgcctacgcaatatggcttccctctacggacagctggatacaaccaagaaactcagagatttctttacagtcacagacctgaggataaggctgttaagaccagccgttggggaaatatttgtagatgagctacacttggcacgctacttttacgcgatctcagacataaaggtgcgaggaaggtgcaagtgtaatctccatgccactgtatgtgtgtatgacaacagcaaattgacatgcgaatgtgagcacaacactacaggtccagactgtgggaaatgcaagaagaattatcagggccgaccttggagtccaggctcctatctccccatccccaaaggcactgcaaatacctgtatccccagtatttccagtattggtaattgtgaatgcttcggccactccaatcgatgcagttatatcgatctgctaaatacagtcatttgcgtgagctgtaaacacaacactagagggcagcactgtgagttatgcaggctgggctacttcagaaatgcttctgcacaactggacgatgagaatgtgtgcatagagtgttattgtaaccctttgggctcaatccatgatcgttgtaatggctcaggattttgtgagtgtaagactggaacaacagggcctaagtgtgatgagtgtctgccgggaaattcctggcactacggctgtcaaccgaatgtctgcgacaacgagctcctgcactgccagaacggagggacgtgccacaacaacgtgcgctgcctgtgcccggccgcatacacgggcatcctctgcgagaagctgcggtgcgaggaggctggcagctgcggctccgactctggccagggcgcgcccccgcacggctccccagcgctgctgctgctgaccacgctgctgggaaccgccagccccctggtgttctaggtgtcacctccagccacaccggacgggcctgtgccgtggggaagcagacacaacccaaacatttgctactaacataggaaacacacacatacagacacccccactcagacagtgtacaaactaagaaggcctaactgaactaagccatatttatcacccgtggacagcacatccgagtcaagactgttaatttctgactccagaggagttggcagctgttgatattatcactgcaaatcacattgccagctgcagagcatattgtggattggaaaggctgcgacagccccccaaacaggaaagacaaaaaacaaacaaatcaaccgacctaaaaacattggctactctagcgtggtgcgccctagtacgactccgcccagtgtgtggaccaaccaaatagcattctttgctgtcaggtgcattgtgggcataaggaaatctgttacaagctgccatattggcctgcttccgtccctgaatcccttccaacctgtgctttagtgaacgttgctctgtaacccttgttggttgaaagatttctttgtctgatgttagtgatgcacatgtgtaacagccccctctaaaagcgcaagccagtcatacccctgtatatcttagcagcactgagtccagtgcgagcacacacccactatacaagagtggctataggaaaaaagaaagtgtatctatccttttgtattcaaatgaagttatttttcttgaactactgtaatatgtagattttttgtattattgccaatttgtgttaccagacaatctgttaatgtatctaattcgaatcagcaaagactgacattttattttgtcctctttcgttctgttttgtttcactgtgcagagatttctctgtaagggcaacgaacgtgctggcatcaaagaatatcagtttacatatataacaagtgtaataagattccaccaaaggacattctaaatgttttcttgttgctttaacactggaagatttaaagaataaaaactcctgcataaacgatttcaggaatttgtattgcaatttcttaagatgaaaggaacagccaccaagcagtttcacactcactttactgatttctgtgtggactgagtacattcagctgacgaatttagttcccaggaagatggattgatgttcactagcttggacaacttctgcaaaatatgagactatttccacttgggaaaaattacaacagcaaaaaaaaaaaaaaaaaaaaaaaaaaatctaagtgattgccaagattatgccaaagcctgttggcagagtactaagagacttttatttttaagtcatgctattttcacagattgatggtgatcatgtgactctagggatgctgatctatgtatctttccaaatacagtgtttacatggagtatcacaagacgcaacctggggaaccaggaagggagcagggaaattgagtgatttgcaatttgactttgaatatattcagacttaagtatttagaggaaatatcaaaatataaagcagcaagtagacataactgctgttcctgagaataaagtttgttttaagtgctgcccaa

SEQ ID NO: 158406 - DNA, 3149 bp, Homo sapiens
  Payload ID: 11009
  Gene Symbol: NTNG1
  Gene Name: netrin G1
  Uniprot ID: Q9Y2I2
  ENST ID: ENST00000370071
  CDS Start-End: 719-2161
gaggtacacgaggagttactggaaacggcgcttctgtggaggagccgggggggatggggagtagagggagggggccctgttgcctcagcgccccgaggtcgtggagcggcagcagctgcagccggagcagcaccagcaacagcaacagcgagcgggacggagttaggaccgctcggagcgcacaggtctcgagggtgttggtgccagaagaaaagaatgattgatgggaaacagacaccgggctatagacactcatccttttgcttcagatactgatatctcagcctgcttgagcatcccttgtgagctgtgaacattgaggatcactcagggttatcggatgtacaacgggagagccatcgctttgctaaattattatctgcaattggacatcttttacaaaaaccaaactagacctgagtctaatagatatgttctaagacaaagaaaaagctgcaagttgttaacgcctaacacacaagtatgttaggcttccaccaaagtcctcaatatacctgaatacgcacaatatcttaactcttcatatttggttttgggatctgctttgaggtcccatcttcatttaaaaaaaaatacagagacctacctacccgtacgcatacatacatatgtgtatatatatgtaaactagacaaagatcgcagatcataaagcaagctctgctttagtttccaagaagattacaaagaatttagagatgtatttgtcaagattcctgtcgattcatgccctttgggttacggtgtcctcagtgatgcagccctaccctttggtttggggacattatgatttgtgtaagactcagatttacacggaagaagggaaagtttgggattacatggcctgccagccggaatccacggacatgacaaaatatctgaaagtgaaactcgatcctccggatattacctgtggagaccctcctgagacgttctgtgcaatgggcaatccctacatgtgcaataatgagtgtgatgcgagtacccctgagctggcacacccccctgagctgatgtttgattttgaaggaagacatccctccacattttggcagtctgccacttggaaggagtatcccaagcctctccaggttaacatcactctgtcttggagcaaaaccattgagctaacagacaacatagttattacctttgaatctgggcgtccagaccaaatgatcctggagaagtctctcgattatggacgaacatggcagccctatcagtattatgccacagactgcttagatgcttttcacatggatcctaaatccgtgaaggatttatcacagcatacggtcttagaaatcatttgcacagaagagtactcaacagggtatacaacaaatagcaaaataatccactttgaaatcaaagacaggttcgcgttttttgctggacctcgcctacgcaatatggcttccctctacggacagctggatacaaccaagaaactcagagatttctttacagtcacagacctgaggataaggctgttaagaccagccgttggggaaatatttgtagatgagctacacttggcacgctacttttacgcgatctcagacataaaggtgcgaggaaggtgcaagtgtaatctccatgccactgtatgtgtgtatgacaacagcaaattgacatgcgaatgtgagcacaacactacaggtccagactgtgggaaatgcaagaagaattatcagggccgaccttggagtccaggctcctatctccccatccccaaaggcactgcaaatacctgtatccccagtatttccagtattggtaatcctccaaagtttaataggatatggccgaatatttcttcccttgaggtttctaacccaaaacaagttgctcccaaattagctttgtcaacagtttcttctgttcaagttgcaaaccacaagagagcgaatgtctgcgacaacgagctcctgcactgccagaacggagggacgtgccacaacaacgtgcgctgcctgtgcccggccgcatacacgggcatcctctgcgagaagctgcggtgcgaggaggctggcagctgcggctccgactctggccagggcgcgcccccgcacggctccccagcgctgctgctgctgaccacgctgctgggaaccgccagccccctggtgttctaggtgtcacctccagccacaccggacgggcctgtgccgtggggaagcagacacaacccaaacatttgctactaacataggaaacacacacatacagacacccccactcagacagtgtacaaactaagaaggcctaactgaactaagccatatttatcacccgtggacagcacatccgagtcaagactgttaatttctgactccagaggagttggcagctgttgatattatcactgcaaatcacattgccagctgcagagcatattgtggattggaaaggctgcgacagccccccaaacaggaaagacaaaaaacaaacaaatcaaccgacctaaaaacattggctactctagcgtggtgcgccctagtacgactccgcccagtgtgtggaccaaccaaatagcattctttgctgtcaggtgcattgtgggcataaggaaatctgttacaagctgccatattggcctgcttccgtccctgaatcccttccaacctgtgctttagtgaacgttgctctgtaacccttgttggttgaaagatttctttgtctgatgttagtgatgcacatgtgtaacagccccctctaaaagcgcaagccagtcatacccctgtatatcttagcagcactgagtccagtgcgagcacacacccactatacaagagtggctataggaaaaaagaaagtgtatctatccttttgtattcaaatgaagttatttttcttgaactactgtaatatgtagattttttgtattattgccaatttgtgttaccagacaatctgttaatgtatctaattcgaatcagcaaagactgacattttattttgtcctctttcgttctgttttgtttcactgtgcagagatttctctgtaagggcaacgaacgtgctggcatcaaagaatatcagtttacatatataacaagtgtaataagattccaccaaaggacattctaaatgttttcttgttgctttaacactggaagattt

SEQ ID NO: 158407 - DNA, 3347 bp, Homo sapiens
  Payload ID: 11009
  Gene Symbol: NTNG1
  Gene Name: netrin G1
  Uniprot ID: Q9Y2I2
  ENST ID: ENST00000370073
  CDS Start-End: 719-2338
gaggtacacgaggagttactggaaacggcgcttctgtggaggagccgggggggatggggagtagagggagggggccctgttgcctcagcgccccgaggtcgtggagcggcagcagctgcagccggagcagcaccagcaacagcaacagcgagcgggacggagttaggaccgctcggagcgcacaggtctcgagggtgttggtgccagaagaaaagaatgattgatgggaaacagacaccgggctatagacactcatccttttgcttcagatactgatatctcagcctgcttgagcatcccttgtgagctgtgaacattgaggatcactcagggttatcggatgtacaacgggagagccatcgctttgctaaattattatctgcaattggacatcttttacaaaaaccaaactagacctgagtctaatagatatgttctaagacaaagaaaaagctgcaagttgttaacgcctaacacacaagtatgttaggcttccaccaaagtcctcaatatacctgaatacgcacaatatcttaactcttcatatttggttttgggatctgctttgaggtcccatcttcatttaaaaaaaaatacagagacctacctacccgtacgcatacatacatatgtgtatatatatgtaaactagacaaagatcgcagatcataaagcaagctctgctttagtttccaagaagattacaaagaatttagagatgtatttgtcaagattcctgtcgattcatgccctttgggttacggtgtcctcagtgatgcagccctaccctttggtttggggacattatgatttgtgtaagactcagatttacacggaagaagggaaagtttgggattacatggcctgccagccggaatccacggacatgacaaaatatctgaaagtgaaactcgatcctccggatattacctgtggagaccctcctgagacgttctgtgcaatgggcaatccctacatgtgcaataatgagtgtgatgcgagtacccctgagctggcacacccccctgagctgatgtttgattttgaaggaagacatccctccacattttggcagtctgccacttggaaggagtatcccaagcctctccaggttaacatcactctgtcttggagcaaaaccattgagctaacagacaacatagttattacctttgaatctgggcgtccagaccaaatgatcctggagaagtctctcgattatggacgaacatggcagccctatcagtattatgccacagactgcttagatgcttttcacatggatcctaaatccgtgaaggatttatcacagcatacggtcttagaaatcatttgcacagaagagtactcaacagggtatacaacaaatagcaaaataatccactttgaaatcaaagacaggttcgcgttttttgctggacctcgcctacgcaatatggcttccctctacggacagctggatacaaccaagaaactcagagatttctttacagtcacagacctgaggataaggctgttaagaccagccgttggggaaatatttgtagatgagctacacttggcacgctacttttacgcgatctcagacataaaggtgcgaggaaggtgcaagtgtaatctccatgccactgtatgtgtgtatgacaacagcaaattgacatgcgaatgtgagcacaacactacaggtccagactgtgggaaatgcaagaagaattatcagggccgaccttggagtccaggctcctatctccccatccccaaaggcactgcaaatacctgtatccccagtatttccagtattggtaattgtgaatgcttcggccactccaatcgatgcagttatatcgatctgctaaatacagtcatttgcgtgagctgtaaacacaacactagagggcagcactgtgagttatgcaggctgggctacttcagaaatgcttctgcacaactggacgatgagaatgtgtgcatagagtgttattgtaaccctttgggctcaatccatgatcgttgtaatggctcaggattttgtgagtgtaagactggaacaacagggcctaagtgtgatgagtgtctgccgggaaattcctggcactacggctgtcaaccgaatgtctgcgacaacgagctcctgcactgccagaacggagggacgtgccacaacaacgtgcgctgcctgtgcccggccgcatacacgggcatcctctgcgagaagctgcggtgcgaggaggctggcagctgcggctccgactctggccagggcgcgcccccgcacggctccccagcgctgctgctgctgaccacgctgctgggaaccgccagccccctggtgttctaggtgtcacctccagccacaccggacgggcctgtgccgtggggaagcagacacaacccaaacatttgctactaacataggaaacacacacatacagacacccccactcagacagtgtacaaactaagaaggcctaactgaactaagccatatttatcacccgtggacagcacatccgagtcaagactgttaatttctgactccagaggagttggcagctgttgatattatcactgcaaatcacattgccagctgcagagcatattgtggattggaaaggctgcgacagccccccaaacaggaaagacaaaaaacaaacaaatcaaccgacctaaaaacattggctactctagcgtggtgcgccctagtacgactccgcccagtgtgtggaccaaccaaatagcattctttgctgtcaggtgcattgtgggcataaggaaatctgttacaagctgccatattggcctgcttccgtccctgaatcccttccaacctgtgctttagtgaacgttgctctgtaacccttgttggttgaaagatttctttgtctgatgttagtgatgcacatgtgtaacagccccctctaaaagcgcaagccagtcatacccctgtatatcttagcagcactgagtccagtgcgagcacacacccactatacaagagtggctataggaaaaaagaaagtgtatctatccttttgtattcaaatgaagttatttttcttgaactactgtaatatgtagattttttgtattattgccaatttgtgttaccagacaatctgttaatgtatctaattcgaatcagcaaagactgacattttattttgtcctctttcgttctgttttgtttcactgtgcagagatttctctgtaagggcaacgaacgtgctggcatcaaagaatatcagtttacatatataacaagtgtaataagattccaccaaaggacattctaaatgttttcttgttgctttaacactggaagatttaaagaataaaaactcctgcat

SEQ ID NO: 158408 - DNA, 3048 bp, Homo sapiens
  Payload ID: 11009
  Gene Symbol: NTNG1
  Gene Name: netrin G1
  Uniprot ID: Q9Y2I2
  ENST ID: ENST00000370074
  CDS Start-End: 719-2035
gaggtacacgaggagttactggaaacggcgcttctgtggaggagccgggggggatggggagtagagggagggggccctgttgcctcagcgccccgaggtcgtggagcggcagcagctgcagccggagcagcaccagcaacagcaacagcgagcgggacggagttaggaccgctcggagcgcacaggtctcgagggtgttggtgccagaagaaaagaatgattgatgggaaacagacaccgggctatagacactcatccttttgcttcagatactgatatctcagcctgcttgagcatcccttgtgagctgtgaacattgaggatcactcagggttatcggatgtacaacgggagagccatcgctttgctaaattattatctgcaattggacatcttttacaaaaaccaaactagacctgagtctaatagatatgttctaagacaaagaaaaagctgcaagttgttaacgcctaacacacaagtatgttaggcttccaccaaagtcctcaatatacctgaatacgcacaatatcttaactcttcatatttggttttgggatctgctttgaggtcccatcttcatttaaaaaaaaatacagagacctacctacccgtacgcatacatacatatgtgtatatatatgtaaactagacaaagatcgcagatcataaagcaagctctgctttagtttccaagaagattacaaagaatttagagatgtatttgtcaagattcctgtcgattcatgccctttgggttacggtgtcctcagtgatgcagccctaccctttggtttggggacattatgatttgtgtaagactcagatttacacggaagaagggaaagtttgggattacatggcctgccagccggaatccacggacatgacaaaatatctgaaagtgaaactcgatcctccggatattacctgtggagaccctcctgagacgttctgtgcaatgggcaatccctacatgtgcaataatgagtgtgatgcgagtacccctgagctggcacacccccctgagctgatgtttgattttgaaggaagacatccctccacattttggcagtctgccacttggaaggagtatcccaagcctctccaggttaacatcactctgtcttggagcaaaaccattgagctaacagacaacatagttattacctttgaatctgggcgtccagaccaaatgatcctggagaagtctctcgattatggacgaacatggcagccctatcagtattatgccacagactgcttagatgcttttcacatggatcctaaatccgtgaaggatttatcacagcatacggtcttagaaatcatttgcacagaagagtactcaacagggtatacaacaaatagcaaaataatccactttgaaatcaaagacaggttcgcgttttttgctggacctcgcctacgcaatatggcttccctctacggacagctggatacaaccaagaaactcagagatttctttacagtcacagacctgaggataaggctgttaagaccagccgttggggaaatatttgtagatgagctacacttggcacgctacttttacgcgatctcagacataaaggtgcgaggaaggtgcaagtgtaatctccatgccactgtatgtgtgtatgacaacagcaaattgacatgcgaatgtgagcacaacactacaggtccagactgtgggaaatgcaagaagaattatcagggccgaccttggagtccaggctcctatctccccatccccaaaggcactgcaaatacctgtatccccagtatttccagtattggtacgaatgtctgcgacaacgagctcctgcactgccagaacggagggacgtgccacaacaacgtgcgctgcctgtgcccggccgcatacacgggcatcctctgcgagaagctgcggtgcgaggaggctggcagctgcggctccgactctggccagggcgcgcccccgcacggctccccagcgctgctgctgctgaccacgctgctgggaaccgccagccccctggtgttctaggtgtcacctccagccacaccggacgggcctgtgccgtggggaagcagacacaacccaaacatttgctactaacataggaaacacacacatacagacacccccactcagacagtgtacaaactaagaaggcctaactgaactaagccatatttatcacccgtggacagcacatccgagtcaagactgttaatttctgactccagaggagttggcagctgttgatattatcactgcaaatcacattgccagctgcagagcatattgtggattggaaaggctgcgacagccccccaaacaggaaagacaaaaaacaaacaaatcaaccgacctaaaaacattggctactctagcgtggtgcgccctagtacgactccgcccagtgtgtggaccaaccaaatagcattctttgctgtcaggtgcattgtgggcataaggaaatctgttacaagctgccatattggcctgcttccgtccctgaatcccttccaacctgtgctttagtgaacgttgctctgtaacccttgttggttgaaagatttctttgtctgatgttagtgatgcacatgtgtaacagccccctctaaaagcgcaagccagtcatacccctgtatatcttagcagcactgagtccagtgcgagcacacacccactatacaagagtggctataggaaaaaagaaagtgtatctatccttttgtattcaaatgaagttatttttcttgaactactgtaatatgtagattttttgtattattgccaatttgtgttaccagacaatctgttaatgtatctaattcgaatcagcaaagactgacattttattttgtcctctttcgttctgttttgtttcactgtgcagagatttctctgtaagggcaacgaacgtgctggcatcaaagaatatcagtttacatatataacaagtgtaataagattccaccaaaggacattctaaatgttttcttgttgctttaacactggaagatttaaagaataaaaactcctgcataaac

SEQ ID NO: 158409 - DNA, 3984 bp, Homo sapiens
  Payload ID: 11010
  Gene Symbol: NTNG2
  Gene Name: netrin G2
  Uniprot ID: Q96CW9
  ENST ID: ENST00000372179
  CDS Start-End: 335-1603
cgcagcccggatcagaccgagagataaaagccccgatggtgatcacaagtcagaccccaggtacctggatggattgagagctgagatctcagcaactttctgatctgtccatcagcagtctgagaaacgctggctctgaattttccgtgtcggccttttggaaacaacaagttcctcgctgtttgcaaagcttcagtgctcgggtccctgggacaccccggccaccctcgcctggtagatgtggcatttccatgctgaggccgcgagtcccgcctgaccccgtcgctgcctctccagggcttctctgggccgcgcctctgcagactgcgcagccatgctgcatctgctggcgctcttcctgcactgcctccctctggcctctggggactatgacatctgcaaatcctgggtgaccacagatgagggccccacctgggagttctacgcctgccagcccaaggtgatgcgcctgaaggactacgtcaaggtgaaggtggagccctcaggcatcacatgtggagacccccctgagaggttctgctcccatgagaatccctacctatgcagcaacgagtgtgacgcctccaacccggacctggcccacccgcccaggctcatgttcgacaaggaggaggagggcctggccacctactggcagagcatcacctggagccgctaccccagcccgctggaagccaacatcaccctttcgtggaacaagaccgtggagctgaccgacgacgtggtgatgaccttcgagtacggccggcccacggtcatggtcctggagaagtccctggacaacgggcgcacctggcagccctaccagttctacgccgaggactgcatggaggccttcggtatgtccgcccgccgggcccgcgacatgtcatcctccagcgcgcaccgcgtgctctgcaccgaggagtactcgcgctgggcaggctccaagaaggagaagcacgtgcgcttcgaggtgcgggaccgcttcgccatctttgccggccccgacctgcgcaacatggacaacctctacacgcggctggagagcgccaagggcctcaaggagttcttcaccctcaccgacctgcgcatgcggctgctgcgcccggcgctgggcggcacctatgtgcagcgggagaacctctacaagtacttctacgccatctccaacatcgaggtcatcggcaggtgcaagtgcaacctgcacgccaacctgtgctccatgcgcgagggcagcctgcagtgcgagtgcgagcacaacaccaccggccccgactgcggcaagtgcaagaagaatttccgcacccggtcctggcgggccggctcctacctgccgctgccccatggctctcccaacgcctgtgccactgcaggttcctttggcaccttgcaaacccctccccctgggaggtcgccatctgctctgcgaggcagcaggagaggactggccaatgtcaaagagccagccgggagcagaccccaaatctcagagatgcttctggggtgcaccgtcaccctccaccagggctctgtggggccccacatcccacccaagttgtccctcccggacccagggggcccctggctgggaagccagtgagccgagagggcgccagaaagaagctggaccctgcagggacgctggtctgcacagccgtcgtaagttgcttctctgtggtgtccccaccccggcaaccccccaaccctctcttgcttttcccatctctcaccaggcatcagcaggtcccagaaagaccccgaccccaaaggccctgtggccactgcggccaccacagccatgacaggggcccctactactcctgtcccctccacgtccactgcctgggcccccatggcgcccagcaccccacagcccacaggtgggtgccagggtacagcgacccctgtcatcccaccctctcctgcttctagcctgggtccctgcctctcttggggtgggagggtcggcagccctgggcagagagcaggggcttggctcttagaatagagacgctagaaccctagagctgggaggccacaggccaaaggggcttgaggacacctgggtcaacctgttcctgagcccagccaggggattcagggatcagttcagcttccaaagtcgtcttcctcctgcccttcaagccattgcttggaagggctcccagaccattgtggccagacggctgcaggaactgagaggaaaggtgctgggggcagcgaggccatcctgacatgcagccaaagactggccttatctcccaatggtgcttctgcctccgtggtccctggagccccgcccacaccctgtccccacctggcccccagggcctctctgtccttagcccctcagcagcacaccggtgggatggatggagcagggttagcccagaaagcaaatgtctctgatcagcagggcaaagggagcctctggagctgagtttggacaccgtgggctgctgggaatgtggaggctgtgtgtgtagtgcaaggccaggccagggccagacgtcctgccccctcaggggtctgccacagacaggcatggaaacctgattctcgctcccctccaacggagggattcacgtgtattcaaggctgggggtgctggagtgggcctctgctctcacctggactcacctggggagtatccctgcactctgtgcagtgcaggtgccaggggtctgaaaggatttatccttcccagagggcaccaggaagacgatgaccaaggggaattcttcctggtcccagccagggaggggtgctccaatagcctgccacaccctgtcccccgccaccctgcagggaggacctggtggggactcctggccccttgggtagtgccctggccctccatctctctgatccaaggagacctgccccactgatccttcccccttggggggtggcatttctaaagggcagagtcccctccatcagctcctgcctcggcctgttgctgggtggacactcaggctccccagacaggggcaaatgctgagagaaagacctcctccttcctaggccatccagagcagctcccctgggggcagcacaccccacctctttctacatccttccttttctgcaggaggcatttacaggaggcaggggctagccaaaagattggaggatttccgggaagcctcctgacccaggaatcctctttggggtggaagacatgggtcactctgagaattctggacttcagacataggttggcccagccacaagggacctgtgctttgctgctgagcctgtggtgggcagacagaagcaaaaacagtggtggtgggtgctgtgcctgtctccaaacaggggtttggctgggaggccagatactctccatatcacatgtgcaagtgcacacatgcacacacacacatgcatgcacacacacaggcatgcacacgcacatgtacacacacacacacacagaggaatccatttgcagagctgcttctgacttggtgccagggcagccgtgggaggctgggcagattgtgcaaagttgggaattaaagaggaaaagtcagaggccagagtgggaaatgcaggggaggtgagggtccccaggaccccctcagtgagcagaaggcacaccctccctctcggcaagacagtgctgctctgcaccctcagccctgtatcaagaagcaggacattaggggaggaggtggctccaatgtgacagccagtggcccctacagcccacatctaggggctcctccctcctcttcagcaactgaagcccctgtccagagcccccattaatgaaaacgatcattgcagtagctgagggtgagttctcctgggctgtgctcgtatcattgtatcatcatatcattgtattctgggctcacagctccgtgagatggaggctgttattttcctagtcccacaggtgaggggatcgaggcttaggaagaagcagctggattttatgatatgtaaattacacctcaatcaagctgtttc

SEQ ID NO: 158410 - DNA, 4792 bp, Homo sapiens
  Payload ID: 11010
  Gene Symbol: NTNG2
  Gene Name: netrin G2
  Uniprot ID: Q96CW9
  ENST ID: ENST00000393229
  CDS Start-End: 777-2369
cgctcagcccgggcgggcgatgcgggcggcgcgggcggccccctcccccggcccgcgtctccgggacggctgcgggcggcccccccggcggccggagggctccctggccccgatctgacggcggcggcggcggcggccacagcggcgggagcggcgcggggaaggagcagcggctcgcagccctcggcccgcgcccccacccagcgccagcccgaggggggaggcgcagcgccggagggtggcggtcctcggccctcccaggtctccgcgccgggaagccgctccgagccggggctggagggttgttttgccgttgtgttgagcacgtcacccattaagagccctttaaagacctggattgattggaaggacaaaaattaaaagcaatctgatccagcctcatgcaggatccctgcggattttctccttatcccatttccatccactgtcacaatttgagaatctgcctgatttgatcagattcacctccaggggaggtgtgataccagggttaggaggacgtgaagttatgggcaactttctgatctgtccatcagcagtctgagaaacgctggctctgaattttccgtgtcggccttttggaaacaacaagttcctcgctgtttgcaaagcttcagtgctcgggtccctgggacaccccggccaccctcgcctggtagatgtggcatttccatgctgaggccgcgagtcccgcctgaccccgtcgctgcctctccagggcttctctgggccgcgcctctgcagactgcgcagccatgctgcatctgctggcgctcttcctgcactgcctccctctggcctctggggactatgacatctgcaaatcctgggtgaccacagatgagggccccacctgggagttctacgcctgccagcccaaggtgatgcgcctgaaggactacgtcaaggtgaaggtggagccctcaggcatcacatgtggagacccccctgagaggttctgctcccatgagaatccctacctatgcagcaacgagtgtgacgcctccaacccggacctggcccacccgcccaggctcatgttcgacaaggaggaggagggcctggccacctactggcagagcatcacctggagccgctaccccagcccgctggaagccaacatcaccctttcgtggaacaagaccgtggagctgaccgacgacgtggtgatgaccttcgagtacggccggcccacggtcatggtcctggagaagtccctggacaacgggcgcacctggcagccctaccagttctacgccgaggactgcatggaggccttcggtatgtccgcccgccgggcccgcgacatgtcatcctccagcgcgcaccgcgtgctctgcaccgaggagtactcgcgctgggcaggctccaagaaggagaagcacgtgcgcttcgaggtgcgggaccgcttcgccatctttgccggccccgacctgcgcaacatggacaacctctacacgcggctggagagcgccaagggcctcaaggagttcttcaccctcaccgacctgcgcatgcggctgctgcgcccggcgctgggcggcacctatgtgcagcgggagaacctctacaagtacttctacgccatctccaacatcgaggtcatcggcaggtgcaagtgcaacctgcacgccaacctgtgctccatgcgcgagggcagcctgcagtgcgagtgcgagcacaacaccaccggccccgactgcggcaagtgcaagaagaatttccgcacccggtcctggcgggccggctcctacctgccgctgccccatggctctcccaacgcctgtgccactgcaggttcctttggcaactgcgaatgctacggtcactccaaccgctgcagctacattgacttcctgaatgtggtgacctgcgtcagctgcaagcacaacacgcgaggtcagcactgccagcactgccggctgggctactaccgcaacggctcggcagagctggatgatgagaacgtctgcattgagtgtaactgcaaccagataggctccgtgcacgaccggtgcaacgagaccggcttctgcgagtgccgcgagggcgcggcgggccccaagtgcgacgactgcctccccacgcactactggcgccagggctgctaccccaacgtgtgcgacgacgaccagctgctgtgccagaacggaggcacctgcctgcagaaccagcgctgcgcctgcccgcgcggctacaccggcgtgcgctgcgagcagccccgctgcgaccccgccgacgatgacggcggtctggactgcgaccgcgcgcccggggccgccccgcgccccgccaccctgctcggctgcctgctgctgctggggctggccgcccgcctgggccgctgagccccgcccggaggacgctccccgcacccggaggccgggggtcccggggtcccggggcggggccggcgtccgaggccgggcggtgagaagggtgcggcccgaggtgctcccaggtgctactcagcagggccccccgcccggcccgcgctcccgcccgcactgccctccccccgcagcaggggcgccttgggactccggtccccgcgcctgcgatttggtttcgtttttcttttgtattatccgccgcccagttccttttttgtctttctctctctctctttttttttttttttttctggcggtgagccagagggtcgggagaaacgctgctcgccccacaccccgtcctgcctcccaccacacttacacacacgggactgtggccgacaccccctggcctgtgccaggctcacgggcggcggcggaccccgacctccagttgcctacaattccagtcgctgacttggtcctgttttctattctttatttttcctgcaacccaccagaccccaggcctcaccggaggcccggtgaccacggaactcaccgtctgggggaggaggagagaaggaaggggtggggggcctggaaacttcgttctgtagagaactatttttgtttgtattcactgtcccctgcaagggggacggggcgggagcactggtcaccgcgggggccgatggtggagaatccgaggagtaaagagtttgctcactgctgcctccacggcctgttttctttctgtgttggggacggtgggcaggtgtggggcttacagaggaatccacaacacagccttaaagaaacggtttccctactggggccaccatttccctgggcctttctgtggattccagcaggcagtgccccctccccgcaggcttggctggcagagttttccaccccgcggccaggctgcaggtgccccacctgttaggagcctccccacactgaaaggctgcctccctcctttcccaaaaaagaaatccggagtgtattggcccttttctacagaagtccaagggaaatgactcagggagaatcctagcagaggttgaatccaatgctctgatttatactgtgtctcggtggccacctccgatggatgtgtcatctcagacctgttgcagccggagcctcaagtccaatatcagatgaagctgaacccacaattcggccaccgcctccttccagagtttcagatggccaggtgggcagaggcgggcagtgcagagaccccagacgtgccggccctgtcctccctaccttctcaagattaggaaggggtgctggaggggacaggggcagcttgggagtggtgaggaagctcctagattcggggctcatcccctggggcctctgattcagaggatccagcagttctcccatctccgcttggtgtctccagccctggggccacacttccccctcggtccagcctcctgtccacctatgtttatttcagagcagtgccgggggtccggtcctggttgctaactgctgccactgctccacctgcaggtgctcccagcactggcttctgccaccacacctgttctttcccagctgcgaggtttagacctgggtccttcccttgagtccccaaagctaagctaagaccaagtggaacaaacttggccttggggacagcaggagattacaacacagaaaaggagggggaggcacaacgggacactgcataggactcacagtgtcccgagcccacacaccagcccctcctggcctcctctctctgctcccacccccagcaccctgctgacccggaagtgccttccgacaggccctgcatcctcctgcagctggcccatctctaccctcacattcttccttacgcacagaaccccactgcctgggacccaaagtgcccagataaaataaaacacctctctggggcttcttgtggataggagtggccaggggacacagctctgggcagtgagatgtaagcaggactgatgggtgggcttccagaaagttcttaaaagtcatcccttcctccacgccccacaaagcctcagttgtccaagtttgtggctctggtttttctctctcatccctccctctgctcttcagtcagcaggatggggaaggagccttcttgagacactgagcataacagtgtcaccctcaggatagtgaagggtggagccgggggtggaagttgcagagcctgggacacctgccttggctgcaacctctgcactgcttttatttatctacttatttttatagagttgaggtctcactatgttgcccaggctggtctcaaactcctaggctcaagtgagcctccggccttggcctcccgaagtgctgagattacaggcatgagccaccgcaccacctgcctgtcttactgtgtgagaaaaaaaataaacggtgatgtgattaaaacactagaa

SEQ ID NO: 158411 - DNA, 949 bp, Homo sapiens
  Payload ID: 11011
  Gene Symbol: NENF
  Gene Name: neudesin neurotrophic factor
  Uniprot ID: Q9UMX5
  ENST ID: ENST00000366988
  CDS Start-End: 58-576
gggcgtgctagggccccgccgccctggcccggccttgccttgcgctgcgcgctcaccatggtgggccccgcgccgcggcggcggctgcggccgctggcagcgctggccctggtcctggcgctggccccggggctgcccacagcccgggccgggcagacaccgcgccctgccgagcgggggcccccagtgcggcttttcaccgaggaggagctggcccgctatggcggggaggaggaagatcagcccatctacttggcagtgaagggagtggtgtttgatgtcacctccggaaaggagttttatggacgaggagccccctacaatgccttgacggggaaggactccactagaggggtagccaagatgtccttggatcctgcagacctcacccatgacactacgggtctcacggccaaggaactggaggccctggatgaggtcttcaccaaagtgtacaaagccaaataccccatcgtcggctacactgcccggagaattctcaatgaggatggcagccctaacctggacttcaagcctgaagaccagccccattttgacatcaaggatgagttctgatgttccccctgcaggagcaggttcttgggagcgtgaggcaggaagacactaggtgctgaatctcctgcaaaactggctgcctggaggccctgagccacccagatctgaataaaacagatgcttaccctggaagagcaaatgcctcctgttgtccttggtcaggggttctgtctacctggggacccctgtctgcacaccagggatcaataagagccaaagtgggacacctcctagatgtcagtatcagctggctgggcagtggaattttgagcgacctttactttatacttttctgtgcttgacagattttcagccatgaccatgttcactttataatcaaaacaaaaataaaggtcccatttttacaaaagga

SEQ ID NO: 158412 - DNA, 7237 bp, Homo sapiens
  Payload ID: 11012
  Gene Symbol: NGRN
  Gene Name: neugrin, neurite outgrowth associated
  Uniprot ID: Q9NPE2
  ENST ID: ENST00000379095
  CDS Start-End: 9-884
gcgtcgacatggcggttaccctgagtctcttgctgggcgggcgcgtttgcgccgccgtcactcgctgtgggttcgcgacccggggggtggcgggcccaggccctattggccgggagccggaccccgattccgactgggagccggaggaacgggagctgcaggaggtggagagcaccctgaaacgacagaaacaagcaatccgattccagaaaattcggaggcaaatggaggcgcctggtgccccgcccaggaccctgacgtgggaagccatggagcagatacggtatttacatgaggaatttccagagtcctggtcagttcccaggttggctgaaggctttgatgtcagcactgatgtgatccgaagagttttaaaaagcaagtttttacccacattggagcagaagctgaagcaggatcaaaaagtccttaagaaagctgggcttgcccactcgctgcagcacctccggggctctggaaatacctcaaagctgctccctgcaggccactctgtatcaggctctttgcttatgccagggcatgaagcctcatctaaagacccaaatcacagcacagctttgaaagtgatagagtcagacactcacaggacaaatacaccaaggagaaggaagggaagaaataaagaaatccaggacctggaggagagctttgtgcctgttgctgcacccctaggtcatccaagagagctgcagaagtactccagtgattctgagagccccagaggaactggcagtggtgcgttgccaagtggtcagaagctggaggagttgaaggcagaggagccagataacttcagcagcaaagtagtgcagaggggccgagagttctttgacagcaacgggaacttcctgtacagaatttgagtcggggcttggcttatggagatgcctcgtgaaacacagctgggcaagtattaatgtatatggaacagcctggatttctgcatatggataagccaccttggaataggaagaggtgttgagcctggactgtgggaggaaagagctgcgtggatagattcaaacttcctgtggtagtgctcccagtctgacctctgtagaccttcagtactcactcttcttgcttaggctctctgtgtgttgaaagccatcccgtgttgcatgtgttgttacaattttctgtgatacttgcaatttatgtttgagaagaagtgaaaagtttgccttctgacctcatttccttcttgatcagtgaacactaacattttggggacaacttagtcaattggttttccttacaacaaaataaagtaaaatgtagcagtctgcctctttggtgctctttggggtgggatggtttacctgtgaaccttggagagagggaaggacaaaggcagaaaggaaggatccctggtcagtaaacattgggagagagatggaaccagaggaatttcccagcaaagggctctgtgcagagcatcctgcttagtgagggattctgacaactgaaaactggacgcctttcttttagttgctggggttctggcagagattgggaaatgaggggttggcagaaaatacaaagcaggcaaaggctttagggcccttataatctccagccacattttaaagtttatattaagagctgggcatggcagaatgtgcctacagtcccagttacttgggaggccgaggtgggagaatcgcttgagcctcggaggttgaggctgcagtgagctatgattgcaccactgcactccagcctgggataacagtgagacccccatctctaaataaaatcaatcgatcttcaattatgtctcattatacagtttacttaaccagatttttacaatggtgccatggtgtaggcaatcccggattaagaggtcccttttacaaataaggaaatagactttaagatggctgccagtaagtggcagtgctgggacttaactcgggtctcatcattaatccagggcttctggaattccgggaatatggcactgtctgccataattttgttaatttactgcttgttttagaaatacatctgttataactagaaattcggggacagcttagtcaatttgttttccttacaagcaaaataaagtaaaatgtagcagtctgctcattagtgctctggtgggatggtttacctgtgaaccttggagaaccatgtcctgctttcacaatttaccaggaaaaatggctactccgaatttaaatatatgtaggacattaatggaaacacctacattccaactcagtcattgccactctgtagaatcttactgctatttcaaatgtccaattacagcaattaaaatactgattactgttgcttttatcaattattattgataacttgaggatctgttctcagtataaatgacaaagccctgtcacatgccaagcaaaattctacgatccagatgctggtaatacaacagtgggcagataggacctttgctgtcactgccctgtcactatcatgtagttcatagtagaagcttatcagtatttttatggttttgttatatttatggtatttaattgttaaagatgtgttagatgctgtttgattgtttaaatttgcatttctcactcctgcaaatatctgatcatgccatacccttttcgcagtgggctatagaaacctaaaggctgttcttaaaactttgttttttaatttatttttgacacggactctcgctctgtcgcccaggctggagtacagtggcacaatctcagctcactgcaacctccgcctcccaggttcaactgattctcctgcttcaacctcccgagtagctgggattacaggcgtctgccactgtgcccagctaatttttgtgtttttagtagagatggggtttcaccatgttggccaggctggtctcaaactctgacctcaagtgatctgcctgtctcggcctcctacagtgctaggattacaggtgtgagccaccacgcctggcctttatttttcttttgagacagggtctcactcttgtcgtccacactggagtacagtggctcaatcttgcctcactgcaacctctgcctcccaggttcaagcggttctcattcttcagcctcccgagtagctggaactacaggcgggcaccaccatgcccagctaattttttttatatttttagtagagacaggatttcaccatgttggccaagctggtctcaaactcctgacctcaagttatctacctgccttggcctcccaaagtgctgggattataggcgtgagccaacacgcctgacctttatttcttttgagacagggtcttgctctgtcatccatgctggagtgcagtggctcaatctcagctcactgcaatctctgcctcctgggttcaaactattctcattccttagcctcccgagtagctgggactacaggcatgcaccaccacacccagctaatcttttatttttagtagagataggatttcactatcttggccaggctggtctcgaactcctgtgctcaggtgatctgcctgcttcggcctcccaaaatgctgagattacaacgtgagccaccacgtgaggcaggcggatcacctgaggtcaggagtttcagaccagcctggccaacatggcaaaaccccatctctactaaaaatacaaaaattatctgggtgtggtggcagatgcctgtaatcccagctactgggaaggctgaggcaggagaattgcttgaacccgggaggcagaggttgcagtgagccgagattgtgccactgcacttcaccttgggtgacagtgagactccatctcaaacaaacaaacacctccaatgctgtatctcaaataccatgtctacccttcttcctgctttacttcatctattacacaagtaatacatactcattaaagaaaaagacaagcaaaatgaaaacaaaagtcatccctgatcccaccagtgaagagttactatcctaccaacatttttctaagcatatgtacaactttaagacaagcacgaaagaataatactgtgccaggcgcggtggctcacgcctgtggtcccaacagtttgggaggccgaggcgggtggatcacttgaggccaggatttcgagattagcttggccaacatggtgaaaccccgtctctactaaaaatacgagaattagcgactcccagccgccgcccgggcccgcgcgctcctccgccgcgctccgctcggctcctctcgaccccacaccgccggtcgacatgatccgctgcggcctggcctgcgagcgctgccgctggatcctgaccctgctcctactcagcgccatcgccttcgacatcatcgcgctggccggccgcggctggctgcagtcgagcgaccgcgtccagacgtcctcgctgtggtggagatgtttccttccacaggggcggcggcggcggcagcgggtcctaagaggacggctgccacagcctcatggagtacgcgtggggtcgagcagcgctgccatgcttttctggggcgtcagcatcctggtgatctgtttcatcctctccttcttcgtcctgtgtgtaccccagatacttgtcttcctaagagtgattggaggtctccttgccttggctgctgtgttccagatcatctccctggtaatttaccccgtgaagtacactcaaccttcaaccttcatgccaagccccgctgtcacttccatctataactgggcctgcggctttgggtgggcagccatgattatcctcattggctgtgctttcttctgctgctgcctccccagctgcgaagatgacctcctgggcaataccaagcccaggtacttctacacatccgcctaacttgggaatgagtgtgggagaaaatcgccactgccaagatggactccagaagaagaaactgtttctctaggctacttcgaacttattttttggcagtgttcatattctcaaactagtcaaaaatgctaaaataatttgggagaaaatatttttaaagtagtgttatagtttcatgttcatcttttattatgttttgtgaagttgtgtcttttcactaattacctatactatgccaatatttccttatatctacccataacatttatgctatgtttgtaagagaatatgaacatgaaacttaacactttataaggtaaaaatgagatggtttccaagatttaataattggatcaagttcttgttatttccaaatagaatggacttggtctgttaagggctaaggagaagaggaaggtaatggtaaaaattgtcaatgactggccgggtgtggtggctcacgcttgtaatctcagcactttgggaggccgaggcaggccaatcacctgaggtcacaagttcaagaccagcctggcaaacatggtgaaacgccgtctctactgaaaatacaaaaattagccaggcttggtggcacatgcctgtagtcccagctactggggaggctgaggcaggagaatcgcttgaaccagagaggtggaggttgcagtgaaccgagattgtgccattgcactacagcctggtcaacagagcaagactctgtctcaaaacaaacaaaaattgtcaatgaccaaacattctaaaagaaatgccaaaaaaaaagctttttttttcaagccttcaaactatttaaggaagcaaaatagtttcctaaatgcatattgtttgtgagaatttctcattaatatcctgaataattctttttttttttttgagacggagtctcactctgtctcccaggctggagtgtgatggcgtgatctcggctcactgcaagctctgcctctcgggttcacgctatcctcccgcctcagcctcccgagtagctgggactacaggcgtccaccaccacgcccggctaattttttgtatttttagtagagacagggttttaccgtgttagccatgatggtctcgatctcctgacctcgtgatctgcccacctcagcctcccaaagtgccgggattacaggcgtgagccaccgcgcccagccctgaataattcattcttgctaagcttcatgttgactctatatatcatctaagaaagtattgttttgtggtccaaacctgttgccgtggttagtaaggctttcttaggtgtgaaatatttagatgaaattttctcttttaaagttctgtatagggttagggtgttggaaaatgctatattaataaatctgtagtgttttgtgtttataggttcagaaccagagtaactggattgaaagatggactgatagattagatatatcagtctaatttatcatgactgatagatctggttaagttgtgtactaaaggattaggagagcccttcctgtcacaaaagtgccactaaaacagcctaaggagaaaaatggcttgcttttctaaacttcagatgtatctgggctctaatcatatagacaggcttctgatagattgcaactgtaagtagaaacctacatatagttaaaatcctggtctttcttggtaaacagatttaaaatgtctgatgtaaaacatgccacaggagaattcagggatttgagtttccctgaatagcatatatatgatgcatcaaatgggttattactattttttaccatttccacttacataatgaaaaacaattcattttaaatatcacattattattttgtaagtcatggaaaagggcaattgaagttttcattatgaagttttcccaataaaccaggaattctaaacttgaaaaaaaaaaatagaattagccaggtatggttgcacaggcctgtaatcccagctacccgggaggctgaggcaggagaatcacctgaacctgagaggcagaggcttcagtgagccgaggccacaccactgcactccggccttggtgacagagactctgcctcgaaagataaaaataataatgaaagtaatattgggattatactgtacattctttcttacatgtatggtgaatatattttgacaataaatatctttacatcagttaaaataaccacctcatattttgttttatggaatataatattattttgttgtatgaagtcaaatattagattgaaccatatatctgaccattttttacctataaaaatagcagttacctgtagtcccagctacttaggaggctgaggcaggagaatcccttgagcacaggagttcaaggctacagtgagctatataattattcttttgttgtgggacattttggtcatttctaaattttcaccactgttgtgataaacctcttttagcg

SEQ ID NO: 158413 - DNA, 388 bp, Homo sapiens
  Payload ID: 11012
  Gene Symbol: NGRN
  Gene Name: neugrin, neurite outgrowth associated
  ENST ID: ENST00000411845
  CDS Start-End: 1-72
gaggcgcctggtgccccgcccaggaccctgacgtgggaagccatggagcagatacgatacttgtcttcctaagagtgattggaggtctccttgccttggctgctgtgttccagatcatctccctggtaatttaccccgtgaagtacactcaaccttcaaccttcatgccaagccccgctgtcacttccatctataactgggcctgcggctttgggtgggcagccatgattatcctcattggctgtgctttcttctgctgctgcctccccagctgcgaagatgacctcctgggcaataccaagcccaggtacttctacacatccgcctaacttgggaatgagtgtgggagaaaatcgccactgccaagatggactccagaagaagaaac

SEQ ID NO: 158414 - DNA, 5837 bp, Homo sapiens
  Payload ID: 11013
  Gene Symbol: NCAM1
  Gene Name: neural cell adhesion molecule 1
  Uniprot ID: P13591
  ENST ID: ENST00000316851
  CDS Start-End: 212-2788
gctgaggctgggactgtcactcattctccgatcagcgcgtgaacgcagctcggctgccgctggcaggaaacaattctgcaaaaataatcatactcagcctggcaattgtctgcccctaggtctgtcgctcagccgccgtccacactcgctgcaggggggggggcacagaatttaccgcggcaagaacatccctcccagccagcagattacaatgctgcaaactaaggatctcatctggactttgtttttcctgggaactgcagtttctctgcaggtggatattgttcccagccagggggagatcagcgttggagagtccaaattcttcttatgccaagtggcaggagatgccaaagataaagacatctcctggttctcccccaatggagaaaagctcaccccaaaccagcagcggatctcagtggtgtggaatgatgattcctcctccaccctcaccatctataacgccaacatcgacgacgccggcatttacaagtgtgtggttacaggcgaggatggcagtgagtcagaggccaccgtcaacgtgaagatctttcagaagctcatgttcaagaatgcgccaaccccacaggagttccgggagggggaagatgccgtgattgtgtgtgatgtggtcagctccctcccaccaaccatcatctggaaacacaaaggccgagatgtcatcctgaaaaaagatgtccgattcatagtcctgtccaacaactacctgcagatccggggcatcaagaaaacagatgagggcacttatcgctgtgagggcagaatcctggcacggggggagatcaacttcaaggacattcaggtcattgtgaatgtgccacctaccatccaggccaggcagaatattgtgaatgccaccgccaacctcggccagtccgtcaccctggtgtgcgatgccgaaggcttcccagagcccaccatgagctggacaaaggatggggaacagatagagcaagaggaagacgatgagaagtacatcttcagcgacgatagttcccagctgaccatcaaaaaggtggataagaacgacgaggctgagtacatctgcattgctgagaacaaggctggcgagcaggatgcgaccatccacctcaaagtctttgcaaaacccaaaatcacatatgtagagaaccagactgccatggaattagaggagcaggtcactcttacctgtgaagcctccggagaccccattccctccatcacctggaggacttctacccggaacatcagcagcgaagaaaaggcttcgtggactcgaccagagaagcaagagactctggatgggcacatggtggtgcgtagccatgcccgtgtgtcgtcgctgaccctgaagagcatccagtacactgatgccggagagtacatctgcaccgccagcaacaccatcggccaggactcccagtccatgtaccttgaagtgcaatatgccccaaagctacagggccctgtggctgtgtacacttgggaggggaaccaggtgaacatcacctgcgaggtatttgcctatcccagtgccacgatctcatggtttcgggatggccagctgctgccaagctccaattacagcaatatcaagatctacaacaccccctctgccagctatctggaggtgaccccagactctgagaatgattttgggaactacaactgtactgcagtgaaccgcattgggcaggagtccttggaattcatccttgttcaagcagacaccccctcttcaccatccatcgaccaggtggagccatactccagcacagcccaggtgcagtttgatgaaccagaggccacaggtggggtgcccatcctcaaatacaaagctgagtggagagcagttggtgaagaagtatggcattccaagtggtatgatgccaaggaagccagcatggagggcatcgtcaccatcgtgggcctgaagcccgaaacaacgtacgccgtaaggctggcggcgctcaatggcaaagggctgggtgagatcagcgcggcctccgagttcaagacgcagccagtccaaggggaacccagtgcacctaagctcgaagggcagatgggagaggatggaaactctattaaagtgaacctgatcaagcaggatgacggcggctcccccatcagacactatctggtcaggtaccgagcgctctcctccgagtggaaaccagagatcaggctcccgtctggcagtgaccacgtcatgctgaagtccctggactggaatgctgagtatgaggtctacgtggtggctgagaaccagcaaggaaaatccaaggcggctcattttgtgttcaggacctcggcccagcccacagccatcccagccaacggcagccccacctcaggcctgagcaccggggccatcgtgggcatcctcatcgtcatcttcgtcctgctcctggtggttgtggacatcacctgctacttcctgaacaagtgtggcctgttcatgtgcattgcggtcaacctgtgtggaaaagccgggcccggggccaagggcaaggacatggaggagggcaaggccgccttctcgaaagatgagtccaaggagcccatcgtggaggttcgaacggaggaggagaggaccccaaaccatgatggagggaaacacacagagcccaacgagaccacgccactgacggagcccgagaagggccccgtagaagcaaagccagagtgccaggagacagaaacgaagccagcgccagccgaagtcaagacggtccccaatgacgccacacagacaaaggagaacgagagcaaagcatgatgggtgaagagaaccgagcaaagatcaaaataaaaagtgacacagcagcttcaccagagcatttccaacaccacagacacacacacgcacgcacacacacaaacacacatgcacacacacacatctcatttctctagtgtcttttgcctttaaaaaaaactaaacagataaaacatgggaatctcctttttgtaggtttatagaaagggtccctttgttgcacactcacttgtaagaaaatgagacaaaaaggttaaacccacagccaaactaggacactccgttccctgaaaccgttaaaaaatcaaacaaaaggaccccaaattaagaatctaggaagctcagaaacgaaatctaggttcaggaagaccacacttggtgttacccgattggcacagaccagtttcagagaaatactttcaggcactaagactaatcgaatgaacaaagtccacagtttatttttatactttcagtcaagtttgaactctgtaaaacctcataaataagttataatttctgttcactttgtatttgttcagtatgcaaagtgtgtcaccctttctagctgaattcaattcccacgtagactcttattttataggacgaatgccaaattgcagcttctgggggtagatctcaatttgcagtattcagacttctttttctttcttttacattcttttttctttctttctttctgccaactttgttttccagtgtttacaaggtgacaaatgtttgactttggttgtgtttaaatgtccgtgtaaaatagctgccttttattttttaaggtaacaaataccacctagaggtaggtaggatcatcccacgcttgctttagcacaggacaactttacaaaacatgattgtttacagctgctcttcccctcttttctgatctgcagtttttgcctgggtcccactcaggtgaaaatccatctcattctggaatggttttgcttttgaatttttggttatttttgtgtttctttgggggttagaccactttctgattagccgccacctgcctgcatctgtgaaaagggatctgctcccaggcgttctcacccttcttttgaaggactccttaggctttgttgaatgaagcagagaagattgtatagttggggctggtcttggtgaacacacattattaccccacacatcccctttgtgtagaaagccaaataaaatctatacataccatttccttttgagcccagaatctagatttgagcggaagagcatgtgtgcttcagggaattagtgtctttttttggaaatctgttgaagtaaagtaacatcggccttctgttcacttaggcagcatttatagaaacaaaagaagaaagaaacaacctactgtctggagtcataacacaactttcctggattggaaaccaagtgggggaaaaaatacagaaactttaagggggatgggaggggggggagaagggaaaagccagccctttgtatagaaattttgcttttttttccctcattctactttagaactgcaagcttgtgcactgtggatgcgtgaatattttagtgtgaaacgtgtttttgtcatagtattgaaataaaacttcaacatagtttggttgtggaaggtatagcagatagttcagaaaaaatattcaggaaacaaaaatcactcaaacggaatcgaagccttttaacaaagaaaatgaaatacagatgatgatgatgatgatgaagatgatgctaagtaaacagaaatcagtactccgcatgcgctcctctcctaaggtacaaagcagcaagaggttagggtggcaaggctgcctctgggtccattctgtgggccactctccccaacgttctgacacttctgcagtctgatcagtggcgatgctagattataatttcaaactgtgaagaataatggtcttgtcatttgctcaatgtggggttatgttgcattttctcagctcctggggatggaaatggaggatcccagaacacacagccctggcccctttgattctagggcctgcacagatctctggttcaaatgcacaggccctcagaatagaggaacatgaagagagatcttagagcacacagtagaatgtgagagcctgggtgtctgagaccgggagggcccagcagtgaggggcaggctcttctggtcaccaggctgttcagtggactcagttcttcatcttgtaatgtcgatggctttgccacaccaggccaagcccatgccataccttgtcaagactgtcaaagtggttgtggttaggtcaaactggttttggttctgatggttaggaagaaacaggtcagccctcagatcacctggcccgggacagctgaccccctagaaccctggctctgccattagctaggacctaagactctgcccacattttggtctgttctctcccattacacataggtttgtctcagcatgcaagagtttttcctttaaaaaaaaaaaaaaaaaaaaaaaaaaagcaatgctttctctaaaatcaaagagggagtcattttattccaagatgttttatcttttatgttaagagatcaaagcttataattttcttttttaatttttgaaggagggatcaactccagtttccaatgtctatgtgtctatgtgtgtatgtgccatacatatgtattcacatgaagaccggcatggccaagttctgctggaggagcactcaagtgtgacgagcagggccactggaccctgcagggctgtggtgtatatagtgcagctttggaggtggaactctattttcacacttttctatggagccttccgagtcccaggttttcacttgaggctgtctgtctggatggcggttttcagacctccattaacatccctacccagcattctgtacttcgggggccttctctcttgttataaaactttttaccaagtgaaacatcgataccacctttgtttccattctcactggtgtaaatactgagtactaactgagaattttgactttgcattctgtcggaatacttgtgttcaataaaaattgaaagaaaaaagcta

SEQ ID NO: 158415 - DNA, 2510 bp, Homo sapiens
  Payload ID: 11013
  Gene Symbol: NCAM1
  Gene Name: neural cell adhesion molecule 1
  ENST ID: ENST00000401611
  CDS Start-End: 246-2423
cgggccagcgcaaggatctccgagttgcgagtgtgctgaggctgggactgtcactcattctccgatcagcgcgtgaacgcagctcggctgccgctggcaggaaacaattctgcaaaaataatcatactcagcctggcaattgtctgcccctaggtctgtcgctcagccgccgtccacactcgctgcaggggggggggcacagaatttaccgcggcaagaacatccctcccagccagcagattacaatgctgcaaactaaggatctcatctggactttgtttttcctgggaactgcagtttctctgcaggtggatattgttcccagccagggggagatcagcgttggagagtccaaattcttcttatgccaagtggcaggagatgccaaagataaagacatctcctggttctcccccaatggagaaaagctcaccccaaaccagcagcggatctcagtggtgtggaatgatgattcctcctccaccctcaccatctataacgccaacatcgacgacgccggcatttacaagtgtgtggttacaggcgaggatggcagtgagtcagaggccaccgtcaacgtgaagatctttcagaagctcatgttcaagaatgcgccaaccccacaggagttccgggagggggaagatgccgtgattgtgtgtgatgtggtcagctccctcccaccaaccatcatctggaaacacaaaggccgagatgtcatcctgaaaaaagatgtccgattcatagtcctgtccaacaactacctgcagatccggggcatcaagaaaacagatgagggcacttatcgctgtgagggcagaatcctggcacggggggagatcaacttcaaggacattcaggtcattgtgaatgtgccacctaccatccaggccaggcagaatattgtgaatgccaccgccaacctcggccagtccgtcaccctggtgtgcgatgccgaaggcttcccagagcccaccatgagctggacaaaggatggggaacagatagagcaagaggaagacgatgagaagtacatcttcagcgacgatagttcccagctgaccatcaaaaaggtggataagaacgacgaggctgagtacatctgcattgctgagaacaaggctggcgagcaggatgcgaccatccacctcaaagtctttgcaaaacccaaaatcacatatgtagagaaccagactgccatggaattagaggagcaggtcactcttacctgtgaagcctccggagaccccattccctccatcacctggaggacttctacccggaacatcagcagcgaagaaaagactctggatgggcacatggtggtgcgtagccatgcccgtgtgtcgtcgctgaccctgaagagcatccagtacactgatgccggagagtacatctgcaccgccagcaacaccatcggccaggactcccagtccatgtaccttgaagtgcaatatgccccaaagctacagggccctgtggctgtgtacacttgggaggggaaccaggtgaacatcacctgcgaggtatttgcctatcccagtgccacgatctcatggtttcgggatggccagctgctgccaagctccaattacagcaatatcaagatctacaacaccccctctgccagctatctggaggtgaccccagactctgagaatgattttgggaactacaactgtactgcagtgaaccgcattgggcaggagtccttggaattcatccttgttcaagcagacaccccctcttcaccatccatcgaccaggtggagccatactccagcacagcccaggtgcagtttgatgaaccagaggccacaggtggggtgcccatcctcaaatacaaagctgagtggagagcagttggtgaagaagtatggcattccaagtggtatgatgccaaggaagccagcatggagggcatcgtcaccatcgtgggcctgaagcccgaaacaacgtacgccgtaaggctggcggcgctcaatggcaaagggctgggtgagatcagcgcggcctccgagttcaagacgcagccagtccgggaacccagtgcacctaagctcgaagggcagatgggagaggatggaaactctattaaagtgaacctgatcaagcaggatgacggcggctcccccatcagacactatctggtcaggtaccgagcgctctcctccgagtggaaaccagagatcaggctcccgtctggcagtgaccacgtcatgctgaagtccctggactggaatgctgagtatgaggtctacgtggtggctgagaaccagcaaggaaaatccaaggcggctcattttgtgttcaggacctcggcccagcccacagccatcccagcaaccttgggaggcaattctgcatcctacacctttgtctcattgcttttctctgcagtgactcttcttttgctctgttaggaacttgaacacaaaaattaaatttgcttaaaagcccagttcctatgaaaaagatcagtgccccctttggaagaacctggcaggacc

SEQ ID NO: 158416 - DNA, 1423 bp, Homo sapiens
  Payload ID: 11013
  Gene Symbol: NCAM1
  Gene Name: neural cell adhesion molecule 1
  ENST ID: ENST00000531817
  CDS Start-End: 1-498
gaattcatccttgttcaagcagacaccccctcttcaccatccatcgaccaggtggagccatactccagcacagcccaggtgcagtttgatgaaccagaggccacaggtggggtgcccatcctcaaatacaaagctgagtggagagcagttggtgaagaagtatggcattccaagtggtatgatgccaaggaagccagcatggagggcatcgtcaccatcgtgggcctgaagcccgaaacaacgtacgccgtaaggctggcggcgctcaatggcaaagggctgggtgagatcagcgcggcctccgagttcaagacgcagccagtccatagccctcctccaccggcatctgctagctcgtctacccctgttccattgtctccaccagatacaacttggcctcttcctgcccttgcaaccacagaaccagctaaaaacattgcacagaatcactgctgtaacatgttccaagctggtcttcataatgctctaatgaagtaagatgtgtgtggaggacctgaatctcctgaagaatccatatgagtatgcgtgcatgttcatagtgttcaagcatcaaagctgtgtgggagttttagattttataatatttctgcttgcacagaaaaaaaatggcatacatcccatcaagcagaacaagaaggcagaaagcagaaggggaacccagtgcacctaagctcgaagggcagatgggagaggatggaaactctattaaagtgaacctgatcaagcaggatgacggcggctcccccatcagacactatctggtcaggtaccgagcgctctcctccgagtggaaaccagagatcaggctcccgtctggcagtgaccacgtcatgctgaagtccctggactggaatgctgagtatgaggtctacgtggtggctgagaaccagcaaggaaaatccaaggcggctcattttgtgttcaggacctcggcccagcccacagccatcccagcaaccttgggaggcaattctgcatcctacacctttgtctcattgcttttctctgcagtgactcttcttttgctctgttaggaacttgaacacaaaaattaaatttgcttaaaagcccagttcctatgaaaaagatcagtgccccctttggaagaacctggcaggaccaccatggccacagctgctgagcaaccattctgtgtggaagagaaggttttgtgattggaaaaagctttacctccagacatgtcaccactcacagatacttttgtgccacttcataaggagtttgccccctttttaatggcagtaaaaagaatttgagagctctttctttaaatgctatttttaaaaaccatcatgctagatttacagagaagtttctgcatatctgctacttgttgcattttgggttcaaacctaaatatgatgtagcagaggaagaattc

SEQ ID NO: 158417 - DNA, 4922 bp, Homo sapiens
  Payload ID: 11013
  Gene Symbol: NCAM1
  Gene Name: neural cell adhesion molecule 1
  ENST ID: ENST00000621518
  CDS Start-End: 367-2652
tgtctctcttacctccttgatgttcggcactatttgtggccggcgtggtggaaggacacagtgaggttctcacccccgccccccgctcctcgctcccatcccagttccatcaaaacgaacccgggccagcgcaaggatctccgagttgcgagtgtgctgaggctgggactgtcactcattctccgatcagcgcgtgaacgcagctcggctgccgctggcaggaaacaattctgcaaaaataatcatactcagcctggcaattgtctgcccctaggtctgtcgctcagccgccgtccacactcgctgcaggggggggggcacagaatttaccgcggcaagaacatccctcccagccagcagattacaatgctgcaaactaaggatctcatctggactttgtttttcctgggaactgcagtttctctgcaggtggatattgttcccagccagggggagatcagcgttggagagtccaaattcttcttatgccaagtggcaggagatgccaaagataaagacatctcctggttctcccccaatggagaaaagctcaccccaaaccagcagcggatctcagtggtgtggaatgatgattcctcctccaccctcaccatctataacgccaacatcgacgacgccggcatttacaagtgtgtggttacaggcgaggatggcagtgagtcagaggccaccgtcaacgtgaagatctttcagaagctcatgttcaagaatgcgccaaccccacaggagttccgggagggggaagatgccgtgattgtgtgtgatgtggtcagctccctcccaccaaccatcatctggaaacacaaaggccgagatgtcatcctgaaaaaagatgtccgattcatagtcctgtccaacaactacctgcagatccggggcatcaagaaaacagatgagggcacttatcgctgtgagggcagaatcctggcacggggggagatcaacttcaaggacattcaggtcattgtgaatgtgccacctaccatccaggccaggcagaatattgtgaatgccaccgccaacctcggccagtccgtcaccctggtgtgcgatgccgaaggcttcccagagcccaccatgagctggacaaaggatggggaacagatagagcaagaggaagacgatgagaagtacatcttcagcgacgatagttcccagctgaccatcaaaaaggtggataagaacgacgaggctgagtacatctgcattgctgagaacaaggctggcgagcaggatgcgaccatccacctcaaagtctttgcaaaacccaaaatcacatatgtagagaaccagactgccatggaattagaggagcaggtcactcttacctgtgaagcctccggagaccccattccctccatcacctggaggacttctacccggaacatcagcagcgaagaaaagactctggatgggcacatggtggtgcgtagccatgcccgtgtgtcgtcgctgaccctgaagagcatccagtacactgatgccggagagtacatctgcaccgccagcaacaccatcggccaggactcccagtccatgtaccttgaagtgcaatatgccccaaagctacagggccctgtggctgtgtacacttgggaggggaaccaggtgaacatcacctgcgaggtatttgcctatcccagtgccacgatctcatggtttcgggatggccagctgctgccaagctccaattacagcaatatcaagatctacaacaccccctctgccagctatctggaggtgaccccagactctgagaatgattttgggaactacaactgtactgcagtgaaccgcattgggcaggagtccttggaattcatccttgttcaagcagacaccccctcttcaccatccatcgaccaggtggagccatactccagcacagcccaggtgcagtttgatgaaccagaggccacaggtggggtgcccatcctcaaatacaaagctgagtggagagcagttggtgaagaagtatggcattccaagtggtatgatgccaaggaagccagcatggagggcatcgtcaccatcgtgggcctgaagcccgaaacaacgtacgccgtaaggctggcggcgctcaatggcaaagggctgggtgagatcagcgcggcctccgagttcaagacgcagccagtccatagccctcctccaccggcatctgctagctcgtctacccctgttccattgtctccaccagatacaacttggcctcttcctgcccttgcaaccacagaaccagctacaggggaacccagtgcacctaagctcgaagggcagatgggagaggatggaaactctattaaagtgaacctgatcaagcaggatgacggcggctcccccatcagacactatctggtcaggtaccgagcgctctcctccgagtggaaaccagagatcaggctcccgtctggcagtgaccacgtcatgctgaagtccctggactggaatgctgagtatgaggtctacgtggtggctgagaaccagcaaggaaaatccaaggcggctcattttgtgttcaggacctcggcccagcccacagccatcccagcaaccttgggaggcaattctgcatcctacacctttgtctcattgcttttctctgcagtgactcttcttttgctctgttaggaacttgaacacaaaaattaaatttgcttaaaagcccagttcctatgaaaaagatcagtgccccctttggaagaacctggcaggaccaccatggccacagctgctgagcaaccattctgtgtggaagagaaggttttgtgattggaaaaagctttacctccagacatgtcaccactcacagatacttttgtgccacttcataaggagtttgccccctttttaatggcagtaaaaagaatttgagagctctttctttaaatgctatttttaaaaaccatcatgctagatttacagagaagtttctgcatatctgctacttgttgcattttgggttcaaacctaaatatgatgtagcagaggaagaattctaagtaccttctaaagcttgtgtcagattgttaaaatcaccacacattcccctcattctaactctgtgctccttgtcctcccttcaataataattggctttgcttgcaattaagcatttaagtgcccatgttaaaagagccagaccgcactgattcacatgagcgttttgctgacatgatgggcaactgaagtcacccctgttgcccatgcactggaaaaaaagttgaatttgttggatattttctggggctgatgaacgttctgggatgtgctttcagtcctcgtattacggccagcaccttacactgtctctgtgaacggggccaagccatgatgtgccaacaagtgtcagctttgaaaggtgtttgtctcccaatcggggtgactcccctgctgcctggcagcatgtcgcagatcagcacagagtggggccgtggttcagcagtgacccacagaatggctttgagcatcagtctacaggacaggttggaagcatccactgtgaaccaggcattagtcccctacctggcctgtgtgtgctcagtagagaaggagagggacaggccactcccagactgcccagcccaggagggttaataaattggggccgagccaacctgtcagtgcttcctgaatgccccagcctctgtattggtgcgttggttcagtgacattttctaaactctcctgaaaatccagctgctcctccctgctgcttgggagttcacccaggagaggaaatgggtgtgttttgttaaggtcccttgtggagactcagggctgaatcctgcttggtaatatcagtgtgtgtgcttggggatggaccttctactgaataaaaactccctccctccccccattgtggtcacatatcattctacatatctcatctctgagcatctccatggaagcttgatttttgttctttttggtttctttatgtatttttttctgttgttattattttttaatgttcaaagactagcctttccctttgggattccaaatgatcccatgctgtggtctgaggggcaaagccacctatgttggcgctcgccattaatccccagcgctcagtttagaggctcacgtgcagacatcagaggctccatgctgcacagtagctcaggcagggtagtgcctctcaacccagccacaaaactctccccgctggagtcccagatggcgcttcacaccagggcagtggaggcaggcatggtttttgggcacagggcagagcataaggatcccaggtcagtgtgggagagctactggctcttaggatcaccttgggcagaagtcacacggcttcatcctaggagggcccagcttgggagtctgcctccccctgatcccaggaccacccacaggagaggggcagtgtccatctttctgaagggaccctttggagatctcgtcctaagtgtggagaggactgacgtggccctgtcatctcaacacatcccagggtcaggcaggcctcagctgaaacaatgtcagggtcctcaagggtcccatttagacagacccacggcttgtaacagtgcgctcctcaggaggcagcactagcgcatacccactccccacggacactgagttcctggtgacagctgcagccccagccccgccaggagtcctggagacagcagccctcagagaccctgcaggagtgagtgcaccccaccttgctcagccacaccccactcccctgtgccctgtagttgtgctgcccatgctccacacaccatggggcccctttgctcatttttggactatttatacagcaggtttggatcatgtttttctactaataagaatgctaacattgttgtgtagataatcagtgagggctttatgaagtttacacctttgcattattaaaggaaataacagttcatgtg

SEQ ID NO: 158418 - DNA, 5937 bp, Homo sapiens
  Payload ID: 11013
  Gene Symbol: NCAM1
  Gene Name: neural cell adhesion molecule 1
  ENST ID: ENST00000618266
  CDS Start-End: 367-2913
tgtctctcttacctccttgatgttcggcactatttgtggccggcgtggtggaaggacacagtgaggttctcacccccgccccccgctcctcgctcccatcccagttccatcaaaacgaacccgggccagcgcaaggatctccgagttgcgagtgtgctgaggctgggactgtcactcattctccgatcagcgcgtgaacgcagctcggctgccgctggcaggaaacaattctgcaaaaataatcatactcagcctggcaattgtctgcccctaggtctgtcgctcagccgccgtccacactcgctgcaggggggggggcacagaatttaccgcggcaagaacatccctcccagccagcagattacaatgctgcaaactaaggatctcatctggactttgtttttcctgggaactgcagtttctctgcaggtggatattgttcccagccagggggagatcagcgttggagagtccaaattcttcttatgccaagtggcaggagatgccaaagataaagacatctcctggttctcccccaatggagaaaagctcaccccaaaccagcagcggatctcagtggtgtggaatgatgattcctcctccaccctcaccatctataacgccaacatcgacgacgccggcatttacaagtgtgtggttacaggcgaggatggcagtgagtcagaggccaccgtcaacgtgaagatctttcagaagctcatgttcaagaatgcgccaaccccacaggagttccgggagggggaagatgccgtgattgtgtgtgatgtggtcagctccctcccaccaaccatcatctggaaacacaaaggccgagatgtcatcctgaaaaaagatgtccgattcatagtcctgtccaacaactacctgcagatccggggcatcaagaaaacagatgagggcacttatcgctgtgagggcagaatcctggcacggggggagatcaacttcaaggacattcaggtcattgtgaatgtgccacctaccatccaggccaggcagaatattgtgaatgccaccgccaacctcggccagtccgtcaccctggtgtgcgatgccgaaggcttcccagagcccaccatgagctggacaaaggatggggaacagatagagcaagaggaagacgatgagaagtacatcttcagcgacgatagttcccagctgaccatcaaaaaggtggataagaacgacgaggctgagtacatctgcattgctgagaacaaggctggcgagcaggatgcgaccatccacctcaaagtctttgcaaaacccaaaatcacatatgtagagaaccagactgccatggaattagaggagcaggtcactcttacctgtgaagcctccggagaccccattccctccatcacctggaggacttctacccggaacatcagcagcgaagaaaagactctggatgggcacatggtggtgcgtagccatgcccgtgtgtcgtcgctgaccctgaagagcatccagtacactgatgccggagagtacatctgcaccgccagcaacaccatcggccaggactcccagtccatgtaccttgaagtgcaatatgccccaaagctacagggccctgtggctgtgtacacttgggaggggaaccaggtgaacatcacctgcgaggtatttgcctatcccagtgccacgatctcatggtttcgggatggccagctgctgccaagctccaattacagcaatatcaagatctacaacaccccctctgccagctatctggaggtgaccccagactctgagaatgattttgggaactacaactgtactgcagtgaaccgcattgggcaggagtccttggaattcatccttgttcaagcagacaccccctcttcaccatccatcgaccaggtggagccatactccagcacagcccaggtgcagtttgatgaaccagaggccacaggtggggtgcccatcctcaaatacaaagctgagtggagagcagttggtgaagaagtatggcattccaagtggtatgatgccaaggaagccagcatggagggcatcgtcaccatcgtgggcctgaagcccgaaacaacgtacgccgtaaggctggcggcgctcaatggcaaagggctgggtgagatcagcgcggcctccgagttcaagacgcagccagtcccaggggaacccagtgcacctaagctcgaagggcagatgggagaggatggaaactctattaaagtgaacctgatcaagcaggatgacggcggctcccccatcagacactatctggtcaggtaccgagcgctctcctccgagtggaaaccagagatcaggctcccgtctggcagtgaccacgtcatgctgaagtccctggactggaatgctgagtatgaggtctacgtggtggctgagaaccagcaaggaaaatccaaggcggctcattttgtgttcaggacctcggcccagcccacagccatcccagccaacggcagccccacctcaggcctgagcaccggggccatcgtgggcatcctcatcgtcatcttcgtcctgctcctggtggttgtggacatcacctgctacttcctgaacaagtgtggcctgttcatgtgcattgcggtcaacctgtgtggaaaagccgggcccggggccaagggcaaggacatggaggagggcaaggccgccttctcgaaagatgagtccaaggagcccatcgtggaggttcgaacggaggaggagaggaccccaaaccatgatggagggaaacacacagagcccaacgagaccacgccactgacggagcccgagaagggccccgtagaagcaaagccagagtgccaggagacagaaacgaagccagcgccagccgaagtcaagacggtccccaatgacgccacacagacaaaggagaacgagagcaaagcatgatgggtgaagagaaccgagcaaagatcaaaataaaaagtgacacagcagcttcaccagagcatttccaacaccacagacacacacacgcacgcacacacacaaacacacatgcacacacacacatctcatttctctagtgtcttttgcctttaaaaaaaactaaacagataaaacatgggaatctcctttttgtaggtttatagaaagggtccctttgttgcacactcacttgtaagaaaatgagacaaaaaggttaaacccacagccaaactaggacactccgttccctgaaaccgttaaaaaatcaaacaaaaggaccccaaattaagaatctaggaagctcagaaacgaaatctaggttcaggaagaccacacttggtgttacccgattggcacagaccagtttcagagaaatactttcaggcactaagactaatcgaatgaacaaagtccacagtttatttttatactttcagtcaagtttgaactctgtaaaacctcataaataagttataatttctgttcactttgtatttgttcagtatgcaaagtgtgtcaccctttctagctgaattcaattcccacgtagactcttattttataggacgaatgccaaattgcagcttctgggggtagatctcaatttgcagtattcagacttctttttctttcttttacattcttttttctttctttctttctgccaactttgttttccagtgtttacaaggtgacaaatgtttgactttggttgtgtttaaatgtccgtgtaaaatagctgccttttattttttaaggtaacaaataccacctagaggtaggtaggatcatcccacgcttgctttagcacaggacaactttacaaaacatgattgtttacagctgctcttcccctcttttctgatctgcagtttttgcctgggtcccactcaggtgaaaatccatctcattctggaatggttttgcttttgaatttttggttatttttgtgtttctttgggggttagaccactttctgattagccgccacctgcctgcatctgtgaaaagggatctgctcccaggcgttctcacccttcttttgaaggactccttaggctttgttgaatgaagcagagaagattgtatagttggggctggtcttggtgaacacacattattaccccacacatcccctttgtgtagaaagccaaataaaatctatacataccatttccttttgagcccagaatctagatttgagcggaagagcatgtgtgcttcagggaattagtgtctttttttggaaatctgttgaagtaaagtaacatcggccttctgttcacttaggcagcatttatagaaacaaaagaagaaagaaacaacctactgtctggagtcataacacaactttcctggattggaaaccaagtgggggaaaaaatacagaaactttaagggggatgggaggggggggagaagggaaaagccagccctttgtatagaaattttgcttttttttccctcattctactttagaactgcaagcttgtgcactgtggatgcgtgaatattttagtgtgaaacgtgtttttgtcatagtattgaaataaaacttcaacatagtttggttgtggaaggtatagcagatagttcagaaaaaatattcaggaaacaaaaatcactcaaacggaatcgaagccttttaacaaagaaaatgaaatacagatgatgatgatgatgatgaagatgatgctaagtaaacagaaatcagtactccgcatgcgctcctctcctaaggtacaaagcagcaagaggttagggtggcaaggctgcctctgggtccattctgtgggccactctccccaacgttctgacacttctgcagtctgatcagtggcgatgctagattataatttcaaactgtgaagaataatggtcttgtcatttgctcaatgtggggttatgttgcattttctcagctcctggggatggaaatggaggatcccagaacacacagccctggcccctttgattctagggcctgcacagatctctggttcaaatgcacaggccctcagaatagaggaacatgaagagagatcttagagcacacagtagaatgtgagagcctgggtgtctgagaccgggagggcccagcagtgaggggcaggctcttctggtcaccaggctgttcagtggactcagttcttcatcttgtaatgtcgatggctttgccacaccaggccaagcccatgccataccttgtcaagactgtcaaagtggttgtggttaggtcaaactggttttggttctgatggttaggaagaaacaggtcagccctcagatcacctggcccgggacagctgaccccctagaaccctggctctgccattagctaggacctaagactctgcccacattttggtctgttctctcccattacacataggtttgtctcagcatgcaagagtttttcctttaaaaaaaaaaaaaaaaaaaaaaaaaaagcaatgctttctctaaaatcaaagagggagtcattttattccaagatgttttatcttttatgttaagagatcaaagcttataattttcttttttaatttttgaaggagggatcaactccagtttccaatgtctatgtgtctatgtgtgtatgtgccatacatatgtattcacatgaagaccggcatggccaagttctgctggaggagcactcaagtgtgacgagcagggccactggaccctgcagggctgtggtgtatatagtgcagctttggaggtggaactctattttcacacttttctatggagccttccgagtcccaggttttcacttgaggctgtctgtctggatggcggttttcagacctccattaacatccctacccagcattctgtacttcgggggccttctctcttgttataaaactttttaccaagtgaaacatcgataccacctttgtttccattctcactggtgtaaatactgagtactaactgagaattttgactttgcattctgtcggaatacttgtgttc

SEQ ID NO: 158419 - DNA, 502 bp, Homo sapiens
  Payload ID: 11013
  Gene Symbol: NCAM1
  Gene Name: neural cell adhesion molecule 1
  ENST ID: ENST00000524916
  CDS Start-End: 1-253
gcaggatgacggcggctcccccatcagacactatctggtcaggtaccgagcgctctcctccgagtggaaaccagagatcaggctcccgtctggcagtgaccacgtcatgctgaagtccctggactggaatgctgagtatgaggtctacgtggtggctgagaaccagcaaggaaaatccaaggcggctcattttgtgttcaggacctcggcccagcccacagccatcccagtgactcttcttttgctctgttaggaacttgaacacaaaaattaaatttgcttaaaagcccagttcctatgaaaaagatcagtgccccctttggaagaacctggcaggaccaccatggccacagctgctgagcaaccattctgtgtggaagagaaggttttgtgattggaaaaagctttacctccagacatgtcaccactcacagatacttttgtgccacttcataaggagtttgccccctttttaatggcagtaaaaagaatttgagagctc

SEQ ID NO: 158420 - DNA, 6045 bp, Homo sapiens
  Payload ID: 11013
  Gene Symbol: NCAM1
  Gene Name: neural cell adhesion molecule 1
  ENST ID: ENST00000615285
  CDS Start-End: 367-3021
tgtctctcttacctccttgatgttcggcactatttgtggccggcgtggtggaaggacacagtgaggttctcacccccgccccccgctcctcgctcccatcccagttccatcaaaacgaacccgggccagcgcaaggatctccgagttgcgagtgtgctgaggctgggactgtcactcattctccgatcagcgcgtgaacgcagctcggctgccgctggcaggaaacaattctgcaaaaataatcatactcagcctggcaattgtctgcccctaggtctgtcgctcagccgccgtccacactcgctgcaggggggggggcacagaatttaccgcggcaagaacatccctcccagccagcagattacaatgctgcaaactaaggatctcatctggactttgtttttcctgggaactgcagtttctctgcaggtggatattgttcccagccagggggagatcagcgttggagagtccaaattcttcttatgccaagtggcaggagatgccaaagataaagacatctcctggttctcccccaatggagaaaagctcaccccaaaccagcagcggatctcagtggtgtggaatgatgattcctcctccaccctcaccatctataacgccaacatcgacgacgccggcatttacaagtgtgtggttacaggcgaggatggcagtgagtcagaggccaccgtcaacgtgaagatctttcagaagctcatgttcaagaatgcgccaaccccacaggagttccgggagggggaagatgccgtgattgtgtgtgatgtggtcagctccctcccaccaaccatcatctggaaacacaaaggccgagatgtcatcctgaaaaaagatgtccgattcatagtcctgtccaacaactacctgcagatccggggcatcaagaaaacagatgagggcacttatcgctgtgagggcagaatcctggcacggggggagatcaacttcaaggacattcaggtcattgtgaatgtgccacctaccatccaggccaggcagaatattgtgaatgccaccgccaacctcggccagtccgtcaccctggtgtgcgatgccgaaggcttcccagagcccaccatgagctggacaaaggatggggaacagatagagcaagaggaagacgatgagaagtacatcttcagcgacgatagttcccagctgaccatcaaaaaggtggataagaacgacgaggctgagtacatctgcattgctgagaacaaggctggcgagcaggatgcgaccatccacctcaaagtctttgcaaaacccaaaatcacatatgtagagaaccagactgccatggaattagaggagcaggtcactcttacctgtgaagcctccggagaccccattccctccatcacctggaggacttctacccggaacatcagcagcgaagaaaaggcttcgtggactcgaccagagaagcaagaggtacatgcaccatggaactggcaagtgggcagacagaaaggacaggctggcagtgcaggtttcccaggatctcatgagactctggatgggcacatggtggtgcgtagccatgcccgtgtgtcgtcgctgaccctgaagagcatccagtacactgatgccggagagtacatctgcaccgccagcaacaccatcggccaggactcccagtccatgtaccttgaagtgcaatatgccccaaagctacagggccctgtggctgtgtacacttgggaggggaaccaggtgaacatcacctgcgaggtatttgcctatcccagtgccacgatctcatggtttcgggatggccagctgctgccaagctccaattacagcaatatcaagatctacaacaccccctctgccagctatctggaggtgaccccagactctgagaatgattttgggaactacaactgtactgcagtgaaccgcattgggcaggagtccttggaattcatccttgttcaagcagacaccccctcttcaccatccatcgaccaggtggagccatactccagcacagcccaggtgcagtttgatgaaccagaggccacaggtggggtgcccatcctcaaatacaaagctgagtggagagcagttggtgaagaagtatggcattccaagtggtatgatgccaaggaagccagcatggagggcatcgtcaccatcgtgggcctgaagcccgaaacaacgtacgccgtaaggctggcggcgctcaatggcaaagggctgggtgagatcagcgcggcctccgagttcaagacgcagccagtcccaggggaacccagtgcacctaagctcgaagggcagatgggagaggatggaaactctattaaagtgaacctgatcaagcaggatgacggcggctcccccatcagacactatctggtcaggtaccgagcgctctcctccgagtggaaaccagagatcaggctcccgtctggcagtgaccacgtcatgctgaagtccctggactggaatgctgagtatgaggtctacgtggtggctgagaaccagcaaggaaaatccaaggcggctcattttgtgttcaggacctcggcccagcccacagccatcccagccaacggcagccccacctcaggcctgagcaccggggccatcgtgggcatcctcatcgtcatcttcgtcctgctcctggtggttgtggacatcacctgctacttcctgaacaagtgtggcctgttcatgtgcattgcggtcaacctgtgtggaaaagccgggcccggggccaagggcaaggacatggaggagggcaaggccgccttctcgaaagatgagtccaaggagcccatcgtggaggttcgaacggaggaggagaggaccccaaaccatgatggagggaaacacacagagcccaacgagaccacgccactgacggagcccgagaagggccccgtagaagcaaagccagagtgccaggagacagaaacgaagccagcgccagccgaagtcaagacggtccccaatgacgccacacagacaaaggagaacgagagcaaagcatgatgggtgaagagaaccgagcaaagatcaaaataaaaagtgacacagcagcttcaccagagcatttccaacaccacagacacacacacgcacgcacacacacaaacacacatgcacacacacacatctcatttctctagtgtcttttgcctttaaaaaaaactaaacagataaaacatgggaatctcctttttgtaggtttatagaaagggtccctttgttgcacactcacttgtaagaaaatgagacaaaaaggttaaacccacagccaaactaggacactccgttccctgaaaccgttaaaaaatcaaacaaaaggaccccaaattaagaatctaggaagctcagaaacgaaatctaggttcaggaagaccacacttggtgttacccgattggcacagaccagtttcagagaaatactttcaggcactaagactaatcgaatgaacaaagtccacagtttatttttatactttcagtcaagtttgaactctgtaaaacctcataaataagttataatttctgttcactttgtatttgttcagtatgcaaagtgtgtcaccctttctagctgaattcaattcccacgtagactcttattttataggacgaatgccaaattgcagcttctgggggtagatctcaatttgcagtattcagacttctttttctttcttttacattcttttttctttctttctttctgccaactttgttttccagtgtttacaaggtgacaaatgtttgactttggttgtgtttaaatgtccgtgtaaaatagctgccttttattttttaaggtaacaaataccacctagaggtaggtaggatcatcccacgcttgctttagcacaggacaactttacaaaacatgattgtttacagctgctcttcccctcttttctgatctgcagtttttgcctgggtcccactcaggtgaaaatccatctcattctggaatggttttgcttttgaatttttggttatttttgtgtttctttgggggttagaccactttctgattagccgccacctgcctgcatctgtgaaaagggatctgctcccaggcgttctcacccttcttttgaaggactccttaggctttgttgaatgaagcagagaagattgtatagttggggctggtcttggtgaacacacattattaccccacacatcccctttgtgtagaaagccaaataaaatctatacataccatttccttttgagcccagaatctagatttgagcggaagagcatgtgtgcttcagggaattagtgtctttttttggaaatctgttgaagtaaagtaacatcggccttctgttcacttaggcagcatttatagaaacaaaagaagaaagaaacaacctactgtctggagtcataacacaactttcctggattggaaaccaagtgggggaaaaaatacagaaactttaagggggatgggaggggggggagaagggaaaagccagccctttgtatagaaattttgcttttttttccctcattctactttagaactgcaagcttgtgcactgtggatgcgtgaatattttagtgtgaaacgtgtttttgtcatagtattgaaataaaacttcaacatagtttggttgtggaaggtatagcagatagttcagaaaaaatattcaggaaacaaaaatcactcaaacggaatcgaagccttttaacaaagaaaatgaaatacagatgatgatgatgatgatgaagatgatgctaagtaaacagaaatcagtactccgcatgcgctcctctcctaaggtacaaagcagcaagaggttagggtggcaaggctgcctctgggtccattctgtgggccactctccccaacgttctgacacttctgcagtctgatcagtggcgatgctagattataatttcaaactgtgaagaataatggtcttgtcatttgctcaatgtggggttatgttgcattttctcagctcctggggatggaaatggaggatcccagaacacacagccctggcccctttgattctagggcctgcacagatctctggttcaaatgcacaggccctcagaatagaggaacatgaagagagatcttagagcacacagtagaatgtgagagcctgggtgtctgagaccgggagggcccagcagtgaggggcaggctcttctggtcaccaggctgttcagtggactcagttcttcatcttgtaatgtcgatggctttgccacaccaggccaagcccatgccataccttgtcaagactgtcaaagtggttgtggttaggtcaaactggttttggttctgatggttaggaagaaacaggtcagccctcagatcacctggcccgggacagctgaccccctagaaccctggctctgccattagctaggacctaagactctgcccacattttggtctgttctctcccattacacataggtttgtctcagcatgcaagagtttttcctttaaaaaaaaaaaaaaaaaaaaaaaaaaagcaatgctttctctaaaatcaaagagggagtcattttattccaagatgttttatcttttatgttaagagatcaaagcttataattttcttttttaatttttgaaggagggatcaactccagtttccaatgtctatgtgtctatgtgtgtatgtgccatacatatgtattcacatgaagaccggcatggccaagttctgctggaggagcactcaagtgtgacgagcagggccactggaccctgcagggctgtggtgtatatagtgcagctttggaggtggaactctattttcacacttttctatggagccttccgagtcccaggttttcacttgaggctgtctgtctggatggcggttttcagacctccattaacatccctacccagcattctgtacttcgggggccttctctcttgttataaaactttttaccaagtgaaacatcgataccacctttgtttccattctcactggtgtaaatactgagtactaactgagaattttgactttgcattctgtcggaatacttgtgttc

SEQ ID NO: 158421 - DNA, 610 bp, Homo sapiens
  Payload ID: 11013
  Gene Symbol: NCAM1
  Gene Name: neural cell adhesion molecule 1
  ENST ID: ENST00000613217
  CDS Start-End: 212-610
gctgaggctgggactgtcactcattctccgatcagcgcgtgaacgcagctcggctgccgctggcaggaaacaattctgcaaaaataatcatactcagcctggcaattgtctgcccctaggtctgtcgctcagccgccgtccacactcgctgcaggggggggggcacagaatttaccgcggcaagaacatccctcccagccagcagattacaatgctgcaaactaaggatctcatctggactttgtttttcctgggaactgcagcaaaacccaaaatcacatatgtagagaaccagactgccatggaattagaggagcaggtcactcttacctgtgaagcctccggagaccccattccctccatcacctggaggacttctacccggaacatcagcagcgaagaaaagactctggatgggcacatggtggtgcgtagccatgcccgtgtgtcgtcgctgaccctgaagagcatccagtacactgatgccggagagtacatctgcaccgccagcaacaccatcggccaggactcccagtccatgtaccttgaagtgcaatatgccccaaagctacagggccctgtggctgtgtacacttgggaggggaaccag

SEQ ID NO: 158422 - DNA, 1260 bp, Homo sapiens
  Payload ID: 11013
  Gene Symbol: NCAM1
  Gene Name: neural cell adhesion molecule 1
  ENST ID: ENST00000526322
  CDS Start-End: 1-918
tacaacaccccctctgccagctatctggaggtgaccccagactctgagaatgattttgggaactacaactgtactgcagtgaaccgcattgggcaggagtccttggaattcatccttgttcaagcagacaccccctcttcaccatccatcgaccaggtggagccatactccagcacagcccaggtgcagtttgatgaaccagaggccacaggtggggtgcccatcctcaaatacaaagctgagtggagagcagttggtgaagaagtatggcattccaagtggtatgatgccaaggaagccagcatggagggcatcgtcaccatcgtgggcctgaagcccgaaacaacgtacgccgtaaggctggcggcgctcaatggcaaagggctgggtgagatcagcgcggcctccgagttcaagacgcagccagtccatagccctcctccaccggcatctgctagctcgtctacccctgttccattgtctccaccagatacaacttggcctcttcctgcccttgcaaccacagaaccagctagggaacccagtgcacctaagctcgaagggcagatgggagaggatggaaactctattaaagtgaacctgatcaagcaggatgacggcggctcccccatcagacactatctggtcaggtaccgagcgctctcctccgagtggaaaccagagatcaggctcccgtctggcagtgaccacgtcatgctgaagtccctggactggaatgctgagtatgaggtctacgtggtggctgagaaccagcaaggaaaatccaaggcggctcattttgtgttcaggacctcggcccagcccacagccatcccagcaaccttgggaggcaattctgcatcctacacctttgtctcattgcttttctctgcagtgactcttcttttgctctgttaggaacttgaacacaaaaattaaatttgcttaaaagcccagttcctatgaaaaagatcagtgccccctttggaagaacctggcaggaccaccatggccacagctgctgagcaaccattctgtgtggaagagaaggttttgtgattggaaaaagctttacctccagacatgtcaccactcacagatacttttgtgccacttcataaggagtttgccccctttttaatggcagtaaaaagaatttgagagctctttctttaaatgctatttttaaaaaccatcatgctagatttacagagaagtttctgcatatctgctacttgttgcattttgggttcaaaccta

SEQ ID NO: 158423 - DNA, 2993 bp, Homo sapiens
  Payload ID: 11013
  Gene Symbol: NCAM1
  Gene Name: neural cell adhesion molecule 1
  ENST ID: ENST00000619839
  CDS Start-End: 339-2993
actatttgtggccggcgtggtggaaggacacagtgaggttctcacccccgccccccgctcctcgctcccatcccagttccatcaaaacgaacccgggccagcgcaaggatctccgagttgcgagtgtgctgaggctgggactgtcactcattctccgatcagcgcgtgaacgcagctcggctgccgctggcaggaaacaattctgcaaaaataatcatactcagcctggcaattgtctgcccctaggtctgtcgctcagccgccgtccacactcgctgcaggggggggggcacagaatttaccgcggcaagaacatccctcccagccagcagattacaatgctgcaaactaaggatctcatctggactttgtttttcctgggaactgcagtttctctgcaggtggatattgttcccagccagggggagatcagcgttggagagtccaaattcttcttatgccaagtggcaggagatgccaaagataaagacatctcctggttctcccccaatggagaaaagctcaccccaaaccagcagcggatctcagtggtgtggaatgatgattcctcctccaccctcaccatctataacgccaacatcgacgacgccggcatttacaagtgtgtggttacaggcgaggatggcagtgagtcagaggccaccgtcaacgtgaagatctttcagaagctcatgttcaagaatgcgccaaccccacaggagttccgggagggggaagatgccgtgattgtgtgtgatgtggtcagctccctcccaccaaccatcatctggaaacacaaaggccgagatgtcatcctgaaaaaagatgtccgattcatagtcctgtccaacaactacctgcagatccggggcatcaagaaaacagatgagggcacttatcgctgtgagggcagaatcctggcacggggggagatcaacttcaaggacattcaggtcattgtgaatgtgccacctaccatccaggccaggcagaatattgtgaatgccaccgccaacctcggccagtccgtcaccctggtgtgcgatgccgaaggcttcccagagcccaccatgagctggacaaaggatggggaacagatagagcaagaggaagacgatgagaagtacatcttcagcgacgatagttcccagctgaccatcaaaaaggtggataagaacgacgaggctgagtacatctgcattgctgagaacaaggctggcgagcaggatgcgaccatccacctcaaagtctttgcaaaacccaaaatcacatatgtagagaaccagactgccatggaattagaggagcaggtcactcttacctgtgaagcctccggagaccccattccctccatcacctggaggacttctacccggaacatcagcagcgaagaaaaggcttcgtggactcgaccagagaagcaagaggtacatgcaccatggaactggcaagtgggcagacagaaaggacaggctggcagtgcaggtttcccaggatctcatgagactctggatgggcacatggtggtgcgtagccatgcccgtgtgtcgtcgctgaccctgaagagcatccagtacactgatgccggagagtacatctgcaccgccagcaacaccatcggccaggactcccagtccatgtaccttgaagtgcaatatgccccaaagctacagggccctgtggctgtgtacacttgggaggggaaccaggtgaacatcacctgcgaggtatttgcctatcccagtgccacgatctcatggtttcgggatggccagctgctgccaagctccaattacagcaatatcaagatctacaacaccccctctgccagctatctggaggtgaccccagactctgagaatgattttgggaactacaactgtactgcagtgaaccgcattgggcaggagtccttggaattcatccttgttcaagcagacaccccctcttcaccatccatcgaccaggtggagccatactccagcacagcccaggtgcagtttgatgaaccagaggccacaggtggggtgcccatcctcaaatacaaagctgagtggagagcagttggtgaagaagtatggcattccaagtggtatgatgccaaggaagccagcatggagggcatcgtcaccatcgtgggcctgaagcccgaaacaacgtacgccgtaaggctggcggcgctcaatggcaaagggctgggtgagatcagcgcggcctccgagttcaagacgcagccagtccaaggggaacccagtgcacctaagctcgaagggcagatgggagaggatggaaactctattaaagtgaacctgatcaagcaggatgacggcggctcccccatcagacactatctggtcaggtaccgagcgctctcctccgagtggaaaccagagatcaggctcccgtctggcagtgaccacgtcatgctgaagtccctggactggaatgctgagtatgaggtctacgtggtggctgagaaccagcaaggaaaatccaaggcggctcattttgtgttcaggacctcggcccagcccacagccatcccagccaacggcagccccacctcaggcctgagcaccggggccatcgtgggcatcctcatcgtcatcttcgtcctgctcctggtggttgtggacatcacctgctacttcctgaacaagtgtggcctgttcatgtgcattgcggtcaacctgtgtggaaaagccgggcccggggccaagggcaaggacatggaggagggcaaggccgccttctcgaaagatgagtccaaggagcccatcgtggaggttcgaacggaggaggagaggaccccaaaccatgatggagggaaacacacagagcccaacgagaccacgccactgacggagcccgagaagggccccgtagaagcaaagccagagtgccaggagacagaaacgaagccagcgccagccgaagtcaagacggtccccaatgacgccacacagacaaaggagaacgagagcaaagcatga

SEQ ID NO: 158424 - DNA, 1179 bp, Homo sapiens
  Payload ID: 11013
  Gene Symbol: NCAM1
  Gene Name: neural cell adhesion molecule 1
  ENST ID: ENST00000528590
  CDS Start-End: 1-1118
acaccccctcttcaccatccatcgaccaggtggagccatactccagcacagcccaggtgcagtttgatgaaccagaggccacaggtggggtgcccatcctcaaatacaaagctgagtggagagcagttggtgaagaagtatggcattccaagtggtatgatgccaaggaagccagcatggagggcatcgtcaccatcgtgggcctgaagcccgaaacaacgtacgccgtaaggctggcggcgctcaatggcaaagggctgggtgagatcagcgcggcctccgagttcaagacgcagccagtccatagccctcctccaccggcatctgctagctcgtctacccctgttccattgtctccaccagataaaggggaacccagtgcacctaagctcgaagggcagatgggagaggatggaaactctattaaagtgaacctgatcaagcaggatgacggcggctcccccatcagacactatctggtcaggtaccgagcgctctcctccgagtggaaaccagagatcaggctcccgtctggcagtgaccacgtcatgctgaagtccctggactggaatgctgagtatgaggtctacgtggtggctgagaaccagcaaggaaaatccaaggcggctcattttgtgttcaggacctcggcccagcccacagccatcccagccaacggcagccccacctcaggcctgagcaccggggccatcgtgggcatcctcatcgtcatcttcgtcctgctcctggtggttgtggacatcacctgctacttcctgaacaagtgtggcctgttcatgtgcattgcggtcaacctgtgtggaaaagccgggcccggggccaagggcaaggacatggaggagggcaaggccgccttctcgaaagatgagtccaaggagcccatcgtggaggttcgaacggaggaggagaggaccccaaaccatgatggagggaaacacacagagcccaacgagaccacgccactgacggagcccgagaagggccccgtagaagcaaagccagagtgccaggagacagaaacgaagccagcgccagccgaagtcaagacggtccccaatgacgccacacagacaaaggagaacgagagcaaagcatgatgggtgaagagaaccgagcaaagatcaaaataaaaagtgacacagcagcttcaccagagca

SEQ ID NO: 158425 - DNA, 2787 bp, Homo sapiens
  Payload ID: 11013
  Gene Symbol: NCAM1
  Gene Name: neural cell adhesion molecule 1
  Uniprot ID: P13591
  ENST ID: ENST00000621850
  CDS Start-End: 134-2419
caaaaataatcatactcagcctggcaattgtctgcccctaggtctgtcgctcagccgccgtccacactcgctgcaggggggggggcacagaatttaccgcggcaagaacatccctcccagccagcagattacaatgctgcaaactaaggatctcatctggactttgtttttcctgggaactgcagtttctctgcaggtggatattgttcccagccagggggagatcagcgttggagagtccaaattcttcttatgccaagtggcaggagatgccaaagataaagacatctcctggttctcccccaatggagaaaagctcaccccaaaccagcagcggatctcagtggtgtggaatgatgattcctcctccaccctcaccatctataacgccaacatcgacgacgccggcatttacaagtgtgtggttacaggcgaggatggcagtgagtcagaggccaccgtcaacgtgaagatctttcagaagctcatgttcaagaatgcgccaaccccacaggagttccgggagggggaagatgccgtgattgtgtgtgatgtggtcagctccctcccaccaaccatcatctggaaacacaaaggccgagatgtcatcctgaaaaaagatgtccgattcatagtcctgtccaacaactacctgcagatccggggcatcaagaaaacagatgagggcacttatcgctgtgagggcagaatcctggcacggggggagatcaacttcaaggacattcaggtcattgtgaatgtgccacctaccatccaggccaggcagaatattgtgaatgccaccgccaacctcggccagtccgtcaccctggtgtgcgatgccgaaggcttcccagagcccaccatgagctggacaaaggatggggaacagatagagcaagaggaagacgatgagaagtacatcttcagcgacgatagttcccagctgaccatcaaaaaggtggataagaacgacgaggctgagtacatctgcattgctgagaacaaggctggcgagcaggatgcgaccatccacctcaaagtctttgcaaaacccaaaatcacatatgtagagaaccagactgccatggaattagaggagcaggtcactcttacctgtgaagcctccggagaccccattccctccatcacctggaggacttctacccggaacatcagcagcgaagaaaagactctggatgggcacatggtggtgcgtagccatgcccgtgtgtcgtcgctgaccctgaagagcatccagtacactgatgccggagagtacatctgcaccgccagcaacaccatcggccaggactcccagtccatgtaccttgaagtgcaatatgccccaaagctacagggccctgtggctgtgtacacttgggaggggaaccaggtgaacatcacctgcgaggtatttgcctatcccagtgccacgatctcatggtttcgggatggccagctgctgccaagctccaattacagcaatatcaagatctacaacaccccctctgccagctatctggaggtgaccccagactctgagaatgattttgggaactacaactgtactgcagtgaaccgcattgggcaggagtccttggaattcatccttgttcaagcagacaccccctcttcaccatccatcgaccaggtggagccatactccagcacagcccaggtgcagtttgatgaaccagaggccacaggtggggtgcccatcctcaaatacaaagctgagtggagagcagttggtgaagaagtatggcattccaagtggtatgatgccaaggaagccagcatggagggcatcgtcaccatcgtgggcctgaagcccgaaacaacgtacgccgtaaggctggcggcgctcaatggcaaagggctgggtgagatcagcgcggcctccgagttcaagacgcagccagtccatagccctcctccaccggcatctgctagctcgtctacccctgttccattgtctccaccagatacaacttggcctcttcctgcccttgcaaccacagaaccagctaaaggggaacccagtgcacctaagctcgaagggcagatgggagaggatggaaactctattaaagtgaacctgatcaagcaggatgacggcggctcccccatcagacactatctggtcaggtaccgagcgctctcctccgagtggaaaccagagatcaggctcccgtctggcagtgaccacgtcatgctgaagtccctggactggaatgctgagtatgaggtctacgtggtggctgagaaccagcaaggaaaatccaaggcggctcattttgtgttcaggacctcggcccagcccacagccatcccagcaaccttgggaggcaattctgcatcctacacctttgtctcattgcttttctctgcagtgactcttcttttgctctgttaggaacttgaacacaaaaattaaatttgcttaaaagcccagttcctatgaaaaagatcagtgccccctttggaagaacctggcaggaccaccatggccacagctgctgagcaaccattctgtgtggaagagaaggttttgtgattggaaaaagctttacctccagacatgtcaccactcacagatacttttgtgccacttcataaggagtttgccccctttttaatggcagtaaaaagaatttgagagctctttctttaaatgctatttttaaaaaccatcatgctagatttacagagaagtttctgcatatctgctacttgttgcattttgggttcaaacctaaatatgatgtagcagaggaagaattc

SEQ ID NO: 158426 - DNA, 5967 bp, Homo sapiens
  Payload ID: 11013
  Gene Symbol: NCAM1
  Gene Name: neural cell adhesion molecule 1
  ENST ID: ENST00000615112
  CDS Start-End: 367-2943
tgtctctcttacctccttgatgttcggcactatttgtggccggcgtggtggaaggacacagtgaggttctcacccccgccccccgctcctcgctcccatcccagttccatcaaaacgaacccgggccagcgcaaggatctccgagttgcgagtgtgctgaggctgggactgtcactcattctccgatcagcgcgtgaacgcagctcggctgccgctggcaggaaacaattctgcaaaaataatcatactcagcctggcaattgtctgcccctaggtctgtcgctcagccgccgtccacactcgctgcaggggggggggcacagaatttaccgcggcaagaacatccctcccagccagcagattacaatgctgcaaactaaggatctcatctggactttgtttttcctgggaactgcagtttctctgcaggtggatattgttcccagccagggggagatcagcgttggagagtccaaattcttcttatgccaagtggcaggagatgccaaagataaagacatctcctggttctcccccaatggagaaaagctcaccccaaaccagcagcggatctcagtggtgtggaatgatgattcctcctccaccctcaccatctataacgccaacatcgacgacgccggcatttacaagtgtgtggttacaggcgaggatggcagtgagtcagaggccaccgtcaacgtgaagatctttcagaagctcatgttcaagaatgcgccaaccccacaggagttccgggagggggaagatgccgtgattgtgtgtgatgtggtcagctccctcccaccaaccatcatctggaaacacaaaggccgagatgtcatcctgaaaaaagatgtccgattcatagtcctgtccaacaactacctgcagatccggggcatcaagaaaacagatgagggcacttatcgctgtgagggcagaatcctggcacggggggagatcaacttcaaggacattcaggtcattgtgaatgtgccacctaccatccaggccaggcagaatattgtgaatgccaccgccaacctcggccagtccgtcaccctggtgtgcgatgccgaaggcttcccagagcccaccatgagctggacaaaggatggggaacagatagagcaagaggaagacgatgagaagtacatcttcagcgacgatagttcccagctgaccatcaaaaaggtggataagaacgacgaggctgagtacatctgcattgctgagaacaaggctggcgagcaggatgcgaccatccacctcaaagtctttgcaaaacccaaaatcacatatgtagagaaccagactgccatggaattagaggagcaggtcactcttacctgtgaagcctccggagaccccattccctccatcacctggaggacttctacccggaacatcagcagcgaagaaaaggcttcgtggactcgaccagagaagcaagagactctggatgggcacatggtggtgcgtagccatgcccgtgtgtcgtcgctgaccctgaagagcatccagtacactgatgccggagagtacatctgcaccgccagcaacaccatcggccaggactcccagtccatgtaccttgaagtgcaatatgccccaaagctacagggccctgtggctgtgtacacttgggaggggaaccaggtgaacatcacctgcgaggtatttgcctatcccagtgccacgatctcatggtttcgggatggccagctgctgccaagctccaattacagcaatatcaagatctacaacaccccctctgccagctatctggaggtgaccccagactctgagaatgattttgggaactacaactgtactgcagtgaaccgcattgggcaggagtccttggaattcatccttgttcaagcagacaccccctcttcaccatccatcgaccaggtggagccatactccagcacagcccaggtgcagtttgatgaaccagaggccacaggtggggtgcccatcctcaaatacaaagctgagtggagagcagttggtgaagaagtatggcattccaagtggtatgatgccaaggaagccagcatggagggcatcgtcaccatcgtgggcctgaagcccgaaacaacgtacgccgtaaggctggcggcgctcaatggcaaagggctgggtgagatcagcgcggcctccgagttcaagacgcagccagtcccaggggaacccagtgcacctaagctcgaagggcagatgggagaggatggaaactctattaaagtgaacctgatcaagcaggatgacggcggctcccccatcagacactatctggtcaggtaccgagcgctctcctccgagtggaaaccagagatcaggctcccgtctggcagtgaccacgtcatgctgaagtccctggactggaatgctgagtatgaggtctacgtggtggctgagaaccagcaaggaaaatccaaggcggctcattttgtgttcaggacctcggcccagcccacagccatcccagccaacggcagccccacctcaggcctgagcaccggggccatcgtgggcatcctcatcgtcatcttcgtcctgctcctggtggttgtggacatcacctgctacttcctgaacaagtgtggcctgttcatgtgcattgcggtcaacctgtgtggaaaagccgggcccggggccaagggcaaggacatggaggagggcaaggccgccttctcgaaagatgagtccaaggagcccatcgtggaggttcgaacggaggaggagaggaccccaaaccatgatggagggaaacacacagagcccaacgagaccacgccactgacggagcccgagaagggccccgtagaagcaaagccagagtgccaggagacagaaacgaagccagcgccagccgaagtcaagacggtccccaatgacgccacacagacaaaggagaacgagagcaaagcatgatgggtgaagagaaccgagcaaagatcaaaataaaaagtgacacagcagcttcaccagagcatttccaacaccacagacacacacacgcacgcacacacacaaacacacatgcacacacacacatctcatttctctagtgtcttttgcctttaaaaaaaactaaacagataaaacatgggaatctcctttttgtaggtttatagaaagggtccctttgttgcacactcacttgtaagaaaatgagacaaaaaggttaaacccacagccaaactaggacactccgttccctgaaaccgttaaaaaatcaaacaaaaggaccccaaattaagaatctaggaagctcagaaacgaaatctaggttcaggaagaccacacttggtgttacccgattggcacagaccagtttcagagaaatactttcaggcactaagactaatcgaatgaacaaagtccacagtttatttttatactttcagtcaagtttgaactctgtaaaacctcataaataagttataatttctgttcactttgtatttgttcagtatgcaaagtgtgtcaccctttctagctgaattcaattcccacgtagactcttattttataggacgaatgccaaattgcagcttctgggggtagatctcaatttgcagtattcagacttctttttctttcttttacattcttttttctttctttctttctgccaactttgttttccagtgtttacaaggtgacaaatgtttgactttggttgtgtttaaatgtccgtgtaaaatagctgccttttattttttaaggtaacaaataccacctagaggtaggtaggatcatcccacgcttgctttagcacaggacaactttacaaaacatgattgtttacagctgctcttcccctcttttctgatctgcagtttttgcctgggtcccactcaggtgaaaatccatctcattctggaatggttttgcttttgaatttttggttatttttgtgtttctttgggggttagaccactttctgattagccgccacctgcctgcatctgtgaaaagggatctgctcccaggcgttctcacccttcttttgaaggactccttaggctttgttgaatgaagcagagaagattgtatagttggggctggtcttggtgaacacacattattaccccacacatcccctttgtgtagaaagccaaataaaatctatacataccatttccttttgagcccagaatctagatttgagcggaagagcatgtgtgcttcagggaattagtgtctttttttggaaatctgttgaagtaaagtaacatcggccttctgttcacttaggcagcatttatagaaacaaaagaagaaagaaacaacctactgtctggagtcataacacaactttcctggattggaaaccaagtgggggaaaaaatacagaaactttaagggggatgggaggggggggagaagggaaaagccagccctttgtatagaaattttgcttttttttccctcattctactttagaactgcaagcttgtgcactgtggatgcgtgaatattttagtgtgaaacgtgtttttgtcatagtattgaaataaaacttcaacatagtttggttgtggaaggtatagcagatagttcagaaaaaatattcaggaaacaaaaatcactcaaacggaatcgaagccttttaacaaagaaaatgaaatacagatgatgatgatgatgatgaagatgatgctaagtaaacagaaatcagtactccgcatgcgctcctctcctaaggtacaaagcagcaagaggttagggtggcaaggctgcctctgggtccattctgtgggccactctccccaacgttctgacacttctgcagtctgatcagtggcgatgctagattataatttcaaactgtgaagaataatggtcttgtcatttgctcaatgtggggttatgttgcattttctcagctcctggggatggaaatggaggatcccagaacacacagccctggcccctttgattctagggcctgcacagatctctggttcaaatgcacaggccctcagaatagaggaacatgaagagagatcttagagcacacagtagaatgtgagagcctgggtgtctgagaccgggagggcccagcagtgaggggcaggctcttctggtcaccaggctgttcagtggactcagttcttcatcttgtaatgtcgatggctttgccacaccaggccaagcccatgccataccttgtcaagactgtcaaagtggttgtggttaggtcaaactggttttggttctgatggttaggaagaaacaggtcagccctcagatcacctggcccgggacagctgaccccctagaaccctggctctgccattagctaggacctaagactctgcccacattttggtctgttctctcccattacacataggtttgtctcagcatgcaagagtttttcctttaaaaaaaaaaaaaaaaaaaaaaaaaaagcaatgctttctctaaaatcaaagagggagtcattttattccaagatgttttatcttttatgttaagagatcaaagcttataattttcttttttaatttttgaaggagggatcaactccagtttccaatgtctatgtgtctatgtgtgtatgtgccatacatatgtattcacatgaagaccggcatggccaagttctgctggaggagcactcaagtgtgacgagcagggccactggaccctgcagggctgtggtgtatatagtgcagctttggaggtggaactctattttcacacttttctatggagccttccgagtcccaggttttcacttgaggctgtctgtctggatggcggttttcagacctccattaacatccctacccagcattctgtacttcgggggccttctctcttgttataaaactttttaccaagtgaaacatcgataccacctttgtttccattctcactggtgtaaatactgagtactaactgagaattttgactttgcattctgtcggaatacttgtgttc

SEQ ID NO: 158427 - DNA, 4698 bp, Homo sapiens
  Payload ID: 11013
  Gene Symbol: NCAM1
  Gene Name: neural cell adhesion molecule 1
  Uniprot ID: P13591
  ENST ID: ENST00000621128
  CDS Start-End: 246-2426
cgggccagcgcaaggatctccgagttgcgagtgtgctgaggctgggactgtcactcattctccgatcagcgcgtgaacgcagctcggctgccgctggcaggaaacaattctgcaaaaataatcatactcagcctggcaattgtctgcccctaggtctgtcgctcagccgccgtccacactcgctgcaggggggggggcacagaatttaccgcggcaagaacatccctcccagccagcagattacaatgctgcaaactaaggatctcatctggactttgtttttcctgggaactgcagtttctctgcaggtggatattgttcccagccagggggagatcagcgttggagagtccaaattcttcttatgccaagtggcaggagatgccaaagataaagacatctcctggttctcccccaatggagaaaagctcaccccaaaccagcagcggatctcagtggtgtggaatgatgattcctcctccaccctcaccatctataacgccaacatcgacgacgccggcatttacaagtgtgtggttacaggcgaggatggcagtgagtcagaggccaccgtcaacgtgaagatctttcagaagctcatgttcaagaatgcgccaaccccacaggagttccgggagggggaagatgccgtgattgtgtgtgatgtggtcagctccctcccaccaaccatcatctggaaacacaaaggccgagatgtcatcctgaaaaaagatgtccgattcatagtcctgtccaacaactacctgcagatccggggcatcaagaaaacagatgagggcacttatcgctgtgagggcagaatcctggcacggggggagatcaacttcaaggacattcaggtcattgtgaatgtgccacctaccatccaggccaggcagaatattgtgaatgccaccgccaacctcggccagtccgtcaccctggtgtgcgatgccgaaggcttcccagagcccaccatgagctggacaaaggatggggaacagatagagcaagaggaagacgatgagaagtacatcttcagcgacgatagttcccagctgaccatcaaaaaggtggataagaacgacgaggctgagtacatctgcattgctgagaacaaggctggcgagcaggatgcgaccatccacctcaaagtctttgcaaaacccaaaatcacatatgtagagaaccagactgccatggaattagaggagcaggtcactcttacctgtgaagcctccggagaccccattccctccatcacctggaggacttctacccggaacatcagcagcgaagaaaagactctggatgggcacatggtggtgcgtagccatgcccgtgtgtcgtcgctgaccctgaagagcatccagtacactgatgccggagagtacatctgcaccgccagcaacaccatcggccaggactcccagtccatgtaccttgaagtgcaatatgccccaaagctacagggccctgtggctgtgtacacttgggaggggaaccaggtgaacatcacctgcgaggtatttgcctatcccagtgccacgatctcatggtttcgggatggccagctgctgccaagctccaattacagcaatatcaagatctacaacaccccctctgccagctatctggaggtgaccccagactctgagaatgattttgggaactacaactgtactgcagtgaaccgcattgggcaggagtccttggaattcatccttgttcaagcagacaccccctcttcaccatccatcgaccaggtggagccatactccagcacagcccaggtgcagtttgatgaaccagaggccacaggtggggtgcccatcctcaaatacaaagctgagtggagagcagttggtgaagaagtatggcattccaagtggtatgatgccaaggaagccagcatggagggcatcgtcaccatcgtgggcctgaagcccgaaacaacgtacgccgtaaggctggcggcgctcaatggcaaagggctgggtgagatcagcgcggcctccgagttcaagacgcagccagtccaaggggaacccagtgcacctaagctcgaagggcagatgggagaggatggaaactctattaaagtgaacctgatcaagcaggatgacggcggctcccccatcagacactatctggtcaggtaccgagcgctctcctccgagtggaaaccagagatcaggctcccgtctggcagtgaccacgtcatgctgaagtccctggactggaatgctgagtatgaggtctacgtggtggctgagaaccagcaaggaaaatccaaggcggctcattttgtgttcaggacctcggcccagcccacagccatcccagcaaccttgggaggcaattctgcatcctacacctttgtctcattgcttttctctgcagtgactcttcttttgctctgttaggaacttgaacacaaaaattaaatttgcttaaaagcccagttcctatgaaaaagatcagtgccccctttggaagaacctggcaggaccaccatggccacagctgctgagcaaccattctgtgtggaagagaaggttttgtgattggaaaaagctttacctccagacatgtcaccactcacagatacttttgtgccacttcataaggagtttgccccctttttaatggcagtaaaaagaatttgagagctctttctttaaatgctatttttaaaaaccatcatgctagatttacagagaagtttctgcatatctgctacttgttgcattttgggttcaaacctaaatatgatgtagcagaggaagaattctaagtaccttctaaagcttgtgtcagattgttaaaatcaccacacattcccctcattctaactctgtgctccttgtcctcccttcaataataattggctttgcttgcaattaagcatttaagtgcccatgttaaaagagccagaccgcactgattcacatgagcgttttgctgacatgatgggcaactgaagtcacccctgttgcccatgcactggaaaaaaagttgaatttgttggatattttctggggctgatgaacgttctgggatgtgctttcagtcctcgtattacggccagcaccttacactgtctctgtgaacggggccaagccatgatgtgccaacaagtgtcagctttgaaaggtgtttgtctcccaatcggggtgactcccctgctgcctggcagcatgtcgcagatcagcacagagtggggccgtggttcagcagtgacccacagaatggctttgagcatcagtctacaggacaggttggaagcatccactgtgaaccaggcattagtcccctacctggcctgtgtgtgctcagtagagaaggagagggacaggccactcccagactgcccagcccaggagggttaataaattggggccgagccaacctgtcagtgcttcctgaatgccccagcctctgtattggtgcgttggttcagtgacattttctaaactctcctgaaaatccagctgctcctccctgctgcttgggagttcacccaggagaggaaatgggtgtgttttgttaaggtcccttgtggagactcagggctgaatcctgcttggtaatatcagtgtgtgtgcttggggatggaccttctactgaataaaaactccctccctccccccattgtggtcacatatcattctacatatctcatctctgagcatctccatggaagcttgatttttgttctttttggtttctttatgtatttttttctgttgttattattttttaatgttcaaagactagcctttccctttgggattccaaatgatcccatgctgtggtctgaggggcaaagccacctatgttggcgctcgccattaatccccagcgctcagtttagaggctcacgtgcagacatcagaggctccatgctgcacagtagctcaggcagggtagtgcctctcaacccagccacaaaactctccccgctggagtcccagatggcgcttcacaccagggcagtggaggcaggcatggtttttgggcacagggcagagcataaggatcccaggtcagtgtgggagagctactggctcttaggatcaccttgggcagaagtcacacggcttcatcctaggagggcccagcttgggagtctgcctccccctgatcccaggaccacccacaggagaggggcagtgtccatctttctgaagggaccctttggagatctcgtcctaagtgtggagaggactgacgtggccctgtcatctcaacacatcccagggtcaggcaggcctcagctgaaacaatgtcagggtcctcaagggtcccatttagacagacccacggcttgtaacagtgcgctcctcaggaggcagcactagcgcatacccactccccacggacactgagttcctggtgacagctgcagccccagccccgccaggagtcctggagacagcagccctcagagaccctgcaggagtgagtgcaccccaccttgctcagccacaccccactcccctgtgccctgtagttgtgctgcccatgctccacacaccatggggcccctttgctcatttttggactatttatacagcaggtttggatcatgtttttctactaataagaatgctaacattgttgtgtagataatcagtgagggctttatgaagtttacacctttgcattattaaaggaaataacagttcatgtgaa

SEQ ID NO: 158428 - DNA, 1843 bp, Homo sapiens
  Payload ID: 11013
  Gene Symbol: NCAM1
  Gene Name: neural cell adhesion molecule 1
  Uniprot ID: P13591
  ENST ID: ENST00000529356
  CDS Start-End: 177-1271
cgcgtgaacgcagctcggctgccgctggcaggaaacaattctgcaaaaataatcatactcagcctggcaattgtctgcccctaggtctgtcgctcagccgccgtccacactcgctgcaggggggggggcacagaatttaccgcggcaagaacatccctcccagccagcagattacaatgctgcaaactaaggatctcatctggactttgtttttcctgggaactgcagtttctctgcaggtggatattgttcccagccagggggagatcagcgttggagagtccaaattcttcttatgccaagtggcaggagatgccaaagataaagacatctcctggttctcccccaatggagaaaagctcaccccaaaccagcagcggatctcagtggtgtggaatgatgattcctcctccaccctcaccatctataacgccaacatcgacgacgccggcatttacaagtgtgtggttacaggcgaggatggcagtgagtcagaggccaccgtcaacgtgaagatctttcagaagctcatgttcaagaatgcgccaaccccacaggagttccgggagggggaagatgccgtgattgtgtgtgatgtggtcagctccctcccaccaaccatcatctggaaacacaaaggccgagatgtcatcctgaaaaaagatgtccgattcatagtcctgtccaacaactacctgcagatccggggcatcaagaaaacagatgagggcacttatcgctgtgagggcagaatcctggcacggggggagatcaacttcaaggacattcaggtcattgtgaatgtgccacctaccatccaggccaggcagaatattgtgaatgccaccgccaacctcggccagtccgtcaccctggtgtgcgatgccgaaggcttcccagagcccaccatgagctggacaaaggatggggaacagatagagcaagaggaagacgatgagaagtacatcttcagcgacgatagttcccagctgaccatcaaaaaggtggataagaacgacgaggctgagtacatctgcattgctgagaacaaggctggcgagcaggatgcgaccatccacctcaaagtctttgcaaaacccaaaatcacatatgtagagaaccagactgccatggaattagaggagcaggtcactcttacctgtgaagcctccggagaccccattccctccatcacctggaggacttctacccggaacatcagcagcgaagaaaaggcttcgtggactcgaccagagaagcaagaggtatagcttacctgaccactagccagtctttagttttgaaagcattacagtttaactcaccattgcagtttaataaccagacatgctaaactaattagtaatttagctaaagaataggtcgatagtggtagacattacttagcaatagtatcattttaggatgagcaagcaagctgtgttgggagtggatgaacaaatccatattatttcctaaaactggatcttattctcttgctggtgctggtaaaatcacatccaggtaattacaccaatagaaataaattgcccccaattcccaggccaggcattttgaaatggtgaaagttttttgactcacatggttgatgtggctctggaccataaagtcacagagttagtgatctaaaaacccactcctccctttcctttccagctcaactcatcttgttgctcacttattttataatgatcagtcttggtaaattatcacatcacgtttcatctcaaaagcaatgcaaatgacatctctcgttggttttcccaaattgctaaacgtatctctgttacttttatagagcattaaatttatgagattagaa

SEQ ID NO: 158429 - DNA, 585 bp, Homo sapiens
  Payload ID: 11013
  Gene Symbol: NCAM1
  Gene Name: neural cell adhesion molecule 1
  ENST ID: ENST00000620046
  CDS Start-End: 179-585
agcgcgtgaacgcagctcggctgccgctggcaggaaacaattctgcaaaaataatcatactcagcctggcaattgtctgcccctaggtctgtcgctcagccgccgtccacactcgctgcaggggggggggcacagaatttaccgcggcaagaacatccctcccagccagcagattacaatgctgcaaactaaggatctcatctggactttgtttttcctgggaactgcaggggaacccagtgcacctaagctcgaagggcagatgggagaggatggaaactctattaaagtgaacctgatcaagcaggatgacggcggctcccccatcagacactatctggtcaggtaccgagcgctctcctccgagtggaaaccagagatcaggctcccgtctggcagtgaccacgtcatgctgaagtccctggactggaatgctgagtatgaggtctacgtggtggctgagaaccagcaaggaaaatccaaggcggctcattttgtgttcaggacctcggcccagcccacagccatcccagccaacggcagccccacctcaggcctgagcaccggggccatcgtgggcatcct

SEQ ID NO: 158430 - DNA, 686 bp, Homo sapiens
  Payload ID: 11013
  Gene Symbol: NCAM1
  Gene Name: neural cell adhesion molecule 1
  ENST ID: ENST00000530543
  CDS Start-End: 1-686
acgatctcatggtttcgggatggccagctgctgccaagctccaattacagcaatatcaagatctacaacaccccctctgccagctatctggaggtgaccccagactctgagaatgattttgggaactacaactgtactgcagtgaaccgcattgggcaggagtccttggaattcatccttgttcaagcagacaccccctcttcaccatccatcgaccaggtggagccatactccagcacagcccaggtgcagtttgatgaaccagaggccacaggtggggtgcccatcctcaaatacaaagctgagtggagagcagttggtgaagaagtatggcattccaagtggtatgatgccaaggaagccagcatggagggcatcgtcaccatcgtgggcctgaagcccgaaacaacgtacgccgtaaggctggcggcgctcaatggcaaagggctgggtgagatcagcgcggcctccgagttcaagacgcagccagtccatagccctcctccacgggaacccagtgcacctaagctcgaagggcagatgggagaggatggaaactctattaaagtgaacctgatcaagcaggatgacggcggctcccccatcagacactatctggtcaggtaccgagcgctctcctccgagtggaaaccagagatcaggctcccgtctggcagtgaccacgt

SEQ ID NO: 158431 - DNA, 2826 bp, Homo sapiens
  Payload ID: 11013
  Gene Symbol: NCAM1
  Gene Name: neural cell adhesion molecule 1
  Uniprot ID: P13591
  ENST ID: ENST00000531044
  CDS Start-End: 178-2724
gcgcgtgaacgcagctcggctgccgctggcaggaaacaattctgcaaaaataatcatactcagcctggcaattgtctgcccctaggtctgtcgctcagccgccgtccacactcgctgcaggggggggggcacagaatttaccgcggcaagaacatccctcccagccagcagattacaatgctgcaaactaaggatctcatctggactttgtttttcctgggaactgcagtttctctgcaggtggatattgttcccagccagggggagatcagcgttggagagtccaaattcttcttatgccaagtggcaggagatgccaaagataaagacatctcctggttctcccccaatggagaaaagctcaccccaaaccagcagcggatctcagtggtgtggaatgatgattcctcctccaccctcaccatctataacgccaacatcgacgacgccggcatttacaagtgtgtggttacaggcgaggatggcagtgagtcagaggccaccgtcaacgtgaagatctttcagaagctcatgttcaagaatgcgccaaccccacaggagttccgggagggggaagatgccgtgattgtgtgtgatgtggtcagctccctcccaccaaccatcatctggaaacacaaaggccgagatgtcatcctgaaaaaagatgtccgattcatagtcctgtccaacaactacctgcagatccggggcatcaagaaaacagatgagggcacttatcgctgtgagggcagaatcctggcacggggggagatcaacttcaaggacattcaggtcattgtgaatgtgccacctaccatccaggccaggcagaatattgtgaatgccaccgccaacctcggccagtccgtcaccctggtgtgcgatgccgaaggcttcccagagcccaccatgagctggacaaaggatggggaacagatagagcaagaggaagacgatgagaagtacatcttcagcgacgatagttcccagctgaccatcaaaaaggtggataagaacgacgaggctgagtacatctgcattgctgagaacaaggctggcgagcaggatgcgaccatccacctcaaagtctttgcaaaacccaaaatcacatatgtagagaaccagactgccatggaattagaggagcaggtcactcttacctgtgaagcctccggagaccccattccctccatcacctggaggacttctacccggaacatcagcagcgaagaaaagactctggatgggcacatggtggtgcgtagccatgcccgtgtgtcgtcgctgaccctgaagagcatccagtacactgatgccggagagtacatctgcaccgccagcaacaccatcggccaggactcccagtccatgtaccttgaagtgcaatatgccccaaagctacagggccctgtggctgtgtacacttgggaggggaaccaggtgaacatcacctgcgaggtatttgcctatcccagtgccacgatctcatggtttcgggatggccagctgctgccaagctccaattacagcaatatcaagatctacaacaccccctctgccagctatctggaggtgaccccagactctgagaatgattttgggaactacaactgtactgcagtgaaccgcattgggcaggagtccttggaattcatccttgttcaagcagacaccccctcttcaccatccatcgaccaggtggagccatactccagcacagcccaggtgcagtttgatgaaccagaggccacaggtggggtgcccatcctcaaatacaaagctgagtggagagcagttggtgaagaagtatggcattccaagtggtatgatgccaaggaagccagcatggagggcatcgtcaccatcgtgggcctgaagcccgaaacaacgtacgccgtaaggctggcggcgctcaatggcaaagggctgggtgagatcagcgcggcctccgagttcaagacgcagccagtccaaggggaacccagtgcacctaagctcgaagggcagatgggagaggatggaaactctattaaagtgaacctgatcaagcaggatgacggcggctcccccatcagacactatctggtcaggtaccgagcgctctcctccgagtggaaaccagagatcaggctcccgtctggcagtgaccacgtcatgctgaagtccctggactggaatgctgagtatgaggtctacgtggtggctgagaaccagcaaggaaaatccaaggcggctcattttgtgttcaggacctcggcccagcccacagccatcccagccaacggcagccccacctcaggcctgagcaccggggccatcgtgggcatcctcatcgtcatcttcgtcctgctcctggtggttgtggacatcacctgctacttcctgaacaagtgtggcctgttcatgtgcattgcggtcaacctgtgtggaaaagccgggcccggggccaagggcaaggacatggaggagggcaaggccgccttctcgaaagatgagtccaaggagcccatcgtggaggttcgaacggaggaggagaggaccccaaaccatgatggagggaaacacacagagcccaacgagaccacgccactgacggagcccgagaagggccccgtagaagcaaagccagagtgccaggagacagaaacgaagccagcgccagccgaagtcaagacggtccccaatgacgccacacagacaaaggagaacgagagcaaagcatgatgggtgaagagaaccgagcaaagatcaaaataaaaagtgacacagcagcttcaccagagcatttccaacaccacagacacacacacgcacgcacacacacaa

SEQ ID NO: 158432 - DNA, 1758 bp, Homo sapiens
  Payload ID: 11013
  Gene Symbol: NCAM1
  Gene Name: neural cell adhesion molecule 1
  ENST ID: ENST00000528158
  CDS Start-End: 1-1405
gtctggcagtgaccacgtcatgctgaagtccctggactggaatgctgagtatgaggtctacgtggtggctgagaaccagcaaggaaaatccaaggcggctcattttgtgttcaggacctcggcccagcccacagccatcccagccaacggcagccccacctcaggcctgagcaccggggccatcgtgggcatcctcatcgtcatcttcgtcctgctcctggtggttgtggacatcacctgctacttcctgaacaagtgtggcctgttcatgtgcattgcggtcaacctgtgtggaaaagccgggcccggggccaagggcaaggacatggaggagggcaaggccgccttctcgaaagatgagtccaaggagcccatcgtggaggttcgaacggaggaggagaggaccccaaaccatgatggagggaaacacacagagcccaacgagaccacgccactgacggagcccgagctgcctgccgacactacggccactgtcgaggacatgctgccttctgtcaccaccgtcaccactaactctgacactatcaccgaaacctttgccactgctcagaacagccccaccagtgagaccaccaccctgacctccagtattgccccgccggccacggccacgcctgactcaaactctgtaccggctggccaggccaccccttccaaggggcccagcgcctctgccccctccccggccccagcttcagcccccaaggtcgcccccctcgttgacctgagcgacaccccgacctcaacccctgccgctagcaatttgtcttctagtgtcctggctaaccaaggggctgtcctcagcccaagcgcccctgctggtgtcggggaggcctctaaggctcctccggccagcaagcccacccctgcaccagtccccaccccgactggggcagccagtcctctagcagcagcggctgcccctgccacagaagcccctcaggccaagcaggaggctcccagcaccaaaggcccggacccggagcccacccagcccggagccgcgaagagcccggccgaggcagccacagcccttgctagcccgaagagcgaggctgcctccgtcagcaccacaaacccttcccagggcgaggactttaaaatggacgaagggaacttcaagaccccagatattgaccttgcaaaggatgtttttgcagccctgggctctcctgctcccgccgctggggccagtggacaagcccctgagcttgctccttccactgcagacagctctgtttcgcctgcgccagcaaagaccgagaagggccccgtagaagcaaagccagagtgccaggagacagaaacgaagccagcgccagccgaagtcaagacggtccccaatgacgccacacagacaaaggagaacgagagcaaagcatgatgggtgaagagaaccgagcaaagatcaaaataaaaagtgacacagcagcttcaccagagcatttccaacaccacagacacacacacgcacgcacacacacaaacacacatgcacacacacacatctcatttctctagtgtcttttgcctttaaaaaaaactaaacagataaaacatgggaatctcctttttgtaggtttatagaaagggtccctttgttgcacactcacttgtaagaaaatgagacaaaaaggttaaacccacagccaaactaggacactccgttccctgaaaccgttaaaaaatcaaacaaaaggaccccaaattaagaatctaggaagctcagaaacgaaa

SEQ ID NO: 158433 - DNA, 1648 bp, Homo sapiens
  Payload ID: 11013
  Gene Symbol: NCAM1
  Gene Name: neural cell adhesion molecule 1
  ENST ID: ENST00000533073
  CDS Start-End: 1-1072
attcatccttgttcaagcagacaccccctcttcaccatccatcgaccaggtggagccatactccagcacagcccaggtgcagtttgatgaaccagaggccacaggtggggtgcccatcctcaaatacaaagctgagtggagagcagttggtgaagaagtatggcattccaagtggtatgatgccaaggaagccagcatggagggcatcgtcaccatcgtgggcctgaagcccgaaacaacgtacgccgtaaggctggcggcgctcaatggcaaagggctgggtgagatcagcgcggcctccgagttcaagacgcagccagtccgggaacccagtgcacctaagctcgaagggcagatgggagaggatggaaactctattaaagtgaacctgatcaagcaggatgacggcggctcccccatcagacactatctggtcaggtaccgagcgctctcctccgagtggaaaccagagatcaggctcccgtctggcagtgaccacgtcatgctgaagtccctggactggaatgctgagtatgaggtctacgtggtggctgagaaccagcaaggaaaatccaaggcggctcattttgtgttcaggacctcggcccagcccacagccatcccagccaacggcagccccacctcaggcctgagcaccggggccatcgtgggcatcctcatcgtcatcttcgtcctgctcctggtggttgtggacatcacctgctacttcctgaacaagtgtggcctgttcatgtgcattgcggtcaacctgtgtggaaaagccgggcccggggccaagggcaaggacatggaggagggcaaggccgccttctcgaaagatgagtccaaggagcccatcgtggaggttcgaacggaggaggagaggaccccaaaccatgatggagggaaacacacagagcccaacgagaccacgccactgacggagcccgagaagggccccgtagaagcaaagccagagtgccaggagacagaaacgaagccagcgccagccgaagtcaagacggtccccaatgacgccacacagacaaaggagaacgagagcaaagcatgatgggtgaagagaaccgagcaaagatcaaaataaaaagtgacacagcagcttcaccagagcatttccaacaccacagacacacacacgcacgcacacacacaaacacacatgcacacacacacatctcatttctctagtgtcttttgcctttaaaaaaaactaaacagataaaacatgggaatctcctttttgtaggtttatagaaagggtccctttgttgcacactcacttgtaagaaaatgagacaaaaaggttaaacccacagccaaactaggacactccgttccctgaaaccgttaaaaaatcaaacaaaaggaccccaaattaagaatctaggaagctcagaaacgaaatctaggttcaggaagaccacacttggtgttacccgattggcacagaccagtttcagagaaatactttcaggcactaagactaatcgaatgaacaaagtccacagtttatttttatactttcagtcaagtttgaactctgtaaaacctcataaataagttataatttctgttcactttgtatttgttcagtatgcaaagtgtgtcaccctttctagctgaattc

SEQ ID NO: 158434 - DNA, 4699 bp, Homo sapiens
  Payload ID: 11014
  Gene Symbol: NCAM2
  Gene Name: neural cell adhesion molecule 2
  ENST ID: ENST00000284894
  CDS Start-End: 2-2461
agctcttcttcaagtgacaatttcacttagcaaagtagagcttagtgttggagaatctaaattcttcacatgtacagcgattggtgaacctgaaagtatagattggtataatcctcaaggagagaagataatttcaacacagagggtagtagtgcaaaaggaaggtgttaggtcacggttaaccatctacaatgcaaatatagaagatgcagggatatatcgttgtcaagcaacagatgccaaaggacaaacacaagaagctacagtagttttggaaatttaccaaaaactcactttcagagaagtggtatctccacaagaattcaaacaaggagaagatgcagaagtggtttgccgagttagcagttcacctgcacctgctgtcagctggttgtatcataatgaggaagtcaccactatttccgacaatcggttcgctatgttagcaaacaataacctgcagattctcaacatcaataaaagtgatgaaggtatatacagatgtgaaggaagagtggaggccaggggagaaattgacttccgtgatatcattgttattgttaatgtgccgccagcaatctcaatgcctcagaaatcttttaatgccacagcagagagaggagaagaaatgacattttcctgcagggcctcaggctctccagaacccgccatctcctggttcaggaatggcaagctcattgaagaaaatgagaagtacatattgaaagggagcaatacagaactcactgtcaggaacataatcaatagtgatggtggtccttatgtctgcagggccacaaataaggcaggagaagatgaaaagcaagctttcctccaagtctttgtacagcctcacataatacagcttaaaaatgaaactacatatgagaatggtcaagtcacactcgtatgtgatgcggaaggggagcctattccagaaatcacttggaaaagagctgtggatggcttcacgttcactgaaggcgataagagcctggacggccgtatcgaagtcaaagggcagcatggaagctcatcactgcatattaaagatgtgaagttgtcagattcagggagatatgactgtgaagctgcaagcagaattggagggcatcaaaagagcatgtaccttgatattgaatatgcccccaagtttatatcaaaccaaacaatttattactcttgggaaggaaatcctatcaatataagttgtgatgtgaaatcgaatccaccagcatcaattcactggagaagagataaattagtcttacctgctaaaaacacgaccaatttaaagacttatagtacaggaagaaagatgatattagagattgcacctacatctgacaatgactttggacgctataattgcacagccactaatcatataggaacaagatttcaagaatatattcttgctttggctgacgtgccatccagtccctatggagtgaagatcatagagctgtcgcagaccacggccaaggtttccttcaacaaaccggactcccatggaggtgtacctattcatcactatcaggtggatgtcaaagaagtagcgtcagaaatctggaaaattgtacgctcccatggagttcaaacaatggttgttttgaacaacctggaaccaaatacaacttatgaaatcagggttgcagctgtaaatggaaagggacaaggagactacagtaaaatagaaatcttccaaacattaccagttcgtgaaccaagtcctccatccatacatggacagccaagcagtggaaagagctttaaactcagcatcaccaaacaggacgatggaggggcccctattttggaatacattgtgaaatatagaagtaaagataaggaagaccaatggctagagaaaaaagtgcaaggaaataaagaccacatcattttggagcatctccagtggaccatggggtatgaagttcagattacagctgccaatagattgggatattctgaaccgacagtttatgaattcagcatgccaccaaagcccaacattattaaagacacgctgtttaatggtcttgggcttggagcagtaattggcctgggagttgctgcactgctgctaattcttgtggtaacagacgtcagctgcttctttattcggcaatgtgggttgctgatgtgcatcactaggagaatgtgtggaaagaaaagtggctccagtggcaaaagtaaagaactcgaagaaggaaaagctgcatacctgaaagatggatcaaaagaaccaatagtggagatgagaacagaggatgaaagagttactaatcacgaagatgggagcccagtaaatgagccaaatgaaaccacaccactgacagaacctgaaaaattgcctttaaaggaagaagatgggaaagaagctctaaatccagaaactatagaaattaaagtttctaacgacatcattcaatcaaaagaagacgacagcaaagcataacaacaatattacaggggcttgaacaacactacgaagagtatttggattgcgtgaccctatgaccaaaactattccattgaccttaatttcttgggaaacttctagcttggaatagcttgtacacatatacatatgatcaaatactcctgcccatgatccattcccttttgttattgttgttgttgttgctgttgttgttaattttgttaagaatttcaatatcaagactgactggcaccaacactttggtattcaatttgattctatgactgaagtactggaatttattatgtggctaaagtgctctatttattaagaactatatttaataccaccaacaaatataggggttaaggaaaaaaaacgtgagctacatgtgtaagaaggccctgcatgtgtatgagtcctattctgggcaaatagattcttaaagtggctttcaacttcaagatgaaggagcttaataatggttactcattttatcaggggaatttcagggaacgtaggcgtcaaagagccagttatctttagcagatattaaaaattgaaaactttggagaactcatttcaagttatgattcagtgcattttcaacattgatttttgatagactgaagtgccagatcaaaattgttacccatttgaaagaatattagttgtatataaaattagattagaaagactttctaaatctctatctctttatatatgtcctattcattcacaatggattatacaaaaaaaagtgtattgcaagtgaaataatattgatttctgccctcagcttcaaataaagtaaattgaaatgggaacaatatcaatatggtgtcttgatatatttataaatatgtgattatcatttatttttaaaataatttatcaaaaaacaagtctttagtgttcaaatacttcaaatcatatcctcagatatatttttagcccatggttttatataatctttaagaactaattttaccactgttataggttcaccattaaatataattggctaataaaaattttaaggttgactaaattaagaagaaattatttaacattttaatgtgccataaaagagtaaatgataaataattaaatgccactatgtgttctattccggatgttctagctagaagtcattttaagattttgataaacaactttggttgaagaaattccttaagtattcaacacaaactttctaatatcttttgttagggttataccagaataaaatgcttctttacttccaagctatgcaagctcccagaggtaatagagtgacacatgatttaacttatatgtaaggtttaaaaaagtatttatcattataaacatacataccatttgggagcaggtttattaaccttgagagccaaaggtttccttaggccctgtaacattcagaacctttggtgtttcaggtggtattatagctcaaatagtgacaggacagggaatgcgttccaaaggaatattggagcaattttaacattgcagaaacctgctctgggtgtgtctctctgtagagataacctgatgattattaaatgtaaaattaaggcaactcatgaatatttttatttacaaagtgcttgaaactcagccaaggagagaaaactaagtacttttatataattcatcacttttctggctacagcaggacagaatatgaccatcttcgtttgaaggcaccaaatcgtcgcagtgtctttgccataagttgcagggttaaatgcgggaatctctccttgcgttcctgtctggcgtattctgaagaaaagaacagaattcttgtgcctacctaagaatttgagtagtgtctaaacaaacaaagcagttaggtcattttaactgacttgattatccaactggtctttgacagatttgactgttcatatttagtttatgtttgtctgatcatccagtttgctttattttgctgtgttttattttgttgtttgttttgttttgtaccagtgtactaaaactagtcaaaatacttgaattagtttgtttgtgcaaagtgtacaagcttagtaaagtgtccatgaagcaatagccatgaatgctaattatttctaaatagggccacatggttttaaactaatgatggtgaaagaaatacgatgactgagaaagtcatttcgcatgtttactattgttatattcgtgctttacttcaagagtgcagaaatcataataaataacaaactatttttgtgttttctcaatgtg

SEQ ID NO: 158435 - DNA, 8135 bp, Homo sapiens
  Payload ID: 11014
  Gene Symbol: NCAM2
  Gene Name: neural cell adhesion molecule 2
  Uniprot ID: O15394
  ENST ID: ENST00000400546
  CDS Start-End: 250-2763
gctgccgccgcggcggccgctgctgctgctgcttctgccgccgctgccgccgccgctgcctggatatagtgcggcaagagcggagcttgcagtcactttgcgaggaggagcgcgcgggctgcgggcggctggggcaccgcgggagcggcggcggcggctctagcagaggcggccggggcagcgaaaggttctctctccagggctggacttaataactttgaaactgtccaccggtgtcacgtcctgaacatgagcctcctcctctccttctacctgctggggttgcttgtcagtagcgggcaagctcttcttcaagtgacaatttcacttagcaaagtagagcttagtgttggagaatctaaattcttcacatgtacagcgattggtgaacctgaaagtatagattggtataatcctcaaggagagaagataatttcaacacagagggtagtagtgcaaaaggaaggtgttaggtcacggttaaccatctacaatgcaaatatagaagatgcagggatatatcgttgtcaagcaacagatgccaaaggacaaacacaagaagctacagtagttttggaaatttaccaaaaactcactttcagagaagtggtatctccacaagaattcaaacaaggagaagatgcagaagtggtttgccgagttagcagttcacctgcacctgctgtcagctggttgtatcataatgaggaagtcaccactatttccgacaatcggttcgctatgttagcaaacaataacctgcagattctcaacatcaataaaagtgatgaaggtatatacagatgtgaaggaagagtggaggccaggggagaaattgacttccgtgatatcattgttattgttaatgtgccgccagcaatctcaatgcctcagaaatcttttaatgccacagcagagagaggagaagaaatgacattttcctgcagggcctcaggctctccagaacccgccatctcctggttcaggaatggcaagctcattgaagaaaatgagaagtacatattgaaagggagcaatacagaactcactgtcaggaacataatcaatagtgatggtggtccttatgtctgcagggccacaaataaggcaggagaagatgaaaagcaagctttcctccaagtctttgtacagcctcacataatacagcttaaaaatgaaactacatatgagaatggtcaagtcacactcgtatgtgatgcggaaggggagcctattccagaaatcacttggaaaagagctgtggatggcttcacgttcactgaaggcgataagagcctggacggccgtatcgaagtcaaagggcagcatggaagctcatcactgcatattaaagatgtgaagttgtcagattcagggagatatgactgtgaagctgcaagcagaattggagggcatcaaaagagcatgtaccttgatattgaatatgcccccaagtttatatcaaaccaaacaatttattactcttgggaaggaaatcctatcaatataagttgtgatgtgaaatcgaatccaccagcatcaattcactggagaagagataaattagtcttacctgctaaaaacacgaccaatttaaagacttatagtacaggaagaaagatgatattagagattgcacctacatctgacaatgactttggacgctataattgcacagccactaatcatataggaacaagatttcaagaatatattcttgctttggctgacgtgccatccagtccctatggagtgaagatcatagagctgtcgcagaccacggccaaggtttccttcaacaaaccggactcccatggaggtgtacctattcatcactatcaggtggatgtcaaagaagtagcgtcagaaatctggaaaattgtacgctcccatggagttcaaacaatggttgttttgaacaacctggaaccaaatacaacttatgaaatcagggttgcagctgtaaatggaaagggacaaggagactacagtaaaatagaaatcttccaaacattaccagttcgtgaaccaagtcctccatccatacatggacagccaagcagtggaaagagctttaaactcagcatcaccaaacaggacgatggaggggcccctattttggaatacattgtgaaatatagaagtaaagataaggaagaccaatggctagagaaaaaagtgcaaggaaataaagaccacatcattttggagcatctccagtggaccatggggtatgaagttcagattacagctgccaatagattgggatattctgaaccgacagtttatgaattcagcatgccaccaaagcccaacattattaaagacacgctgtttaatggtcttgggcttggagcagtaattggcctgggagttgctgcactgctgctaattcttgtggtaacagacgtcagctgcttctttattcggcaatgtgggttgctgatgtgcatcactaggagaatgtgtggaaagaaaagtggctccagtggcaaaagtaaagaactcgaagaaggaaaagctgcatacctgaaagatggatcaaaagaaccaatagtggagatgagaacagaggatgaaagagttactaatcacgaagatgggagcccagtaaatgagccaaatgaaaccacaccactgacagaacctgaaaaattgcctttaaaggaagaagatgggaaagaagctctaaatccagaaactatagaaattaaagtttctaacgacatcattcaatcaaaagaagacgacagcaaagcataacaacaatattacaggggcttgaacaacactacgaagagtatttggattgcgtgaccctatgaccaaaactattccattgaccttaatttcttgggaaacttctagcttggaatagcttgtacacatatacatatgatcaaatactcctgcccatgatccattcccttttgttattgttgttgttgttgctgttgttgttaattttgttaagaatttcaatatcaagactgactggcaccaacactttggtattcaatttgattctatgactgaagtactggaatttattatgtggctaaagtgctctatttattaagaactatatttaataccaccaacaaatataggggttaaggaaaaaaaacgtgagctacatgtgtaagaaggccctgcatgtgtatgagtcctattctgggcaaatagattcttaaagtggctttcaacttcaagatgaaggagcttaataatggttactcattttatcaggggaatttcagggaacgtaggcgtcaaagagccagttatctttagcagatattaaaaattgaaaactttggagaactcatttcaagttatgattcagtgcattttcaacattgatttttgatagactgaagtgccagatcaaaattgttacccatttgaaagaatattagttgtatataaaattagattagaaagactttctaaatctctatctctttatatatgtcctattcattcacaatggattatacaaaaaaaagtgtattgcaagtgaaataatattgatttctgccctcagcttcaaataaagtaaattgaaatgggaacaatatcaatatggtgtcttgatatatttataaatatgtgattatcatttatttttaaaataatttatcaaaaaacaagtctttagtgttcaaatacttcaaatcatatcctcagatatatttttagcccatggttttatataatctttaagaactaattttaccactgttataggttcaccattaaatataattggctaataaaaattttaaggttgactaaattaagaagaaattatttaacattttaatgtgccataaaagagtaaatgataaataattaaatgccactatgtgttctattccggatgttctagctagaagtcattttaagattttgataaacaactttggttgaagaaattccttaagtattcaacacaaactttctaatatcttttgttagggttataccagaataaaatgcttctttacttccaagctatgcaagctcccagaggtaatagagtgacacatgatttaacttatatgtaaggtttaaaaaagtatttatcattataaacatacataccatttgggagcaggtttattaaccttgagagccaaaggtttccttaggccctgtaacattcagaacctttggtgtttcaggtggtattatagctcaaatagtgacaggacagggaatgcgttccaaaggaatattggagcaattttaacattgcagaaacctgctctgggtgtgtctctctgtagagataacctgatgattattaaatgtaaaattaaggcaactcatgaatatttttatttacaaagtgcttgaaactcagccaaggagagaaaactaagtacttttatataattcatcacttttctggctacagcaggacagaatatgaccatcttcgtttgaaggcaccaaatcgtcgcagtgtctttgccataagttgcagggttaaatgcgggaatctctccttgcgttcctgtctggcgtattctgaagaaaagaacagaattcttgtgcctacctaagaatttgagtagtgtctaaacaaacaaagcagttaggtcattttaactgacttgattatccaactggtctttgacagatttgactgttcatatttagtttatgtttgtctgatcatccagtttgctttattttgctgtgttttattttgttgtttgttttgttttgtaccagtgtactaaaactagtcaaaatacttgaattagtttgtttgtgcaaagtgtacaagcttagtaaagtgtccatgaagcaatagccatgaatgctaattatttctaaatagggccacatggttttaaactaatgatggtgaaagaaatacgatgactgagaaagtcatttcgcatgtttactattgttatattcgtgctttacttcaagagtgcagaaatcataataaataacaaactatttttgtgttttctcaatgtgacatttctgtttctctcatttattcggattttccttgtaaagaaattgacatatatttcatatatatatacacatatatatatatacacatatatatacatatatatatatgatgttaaatttcctgccactcatgtggagtaatgatctgaaattaacagataatctgaagctaattatattcagactatttcaagtgcactgtttcagttgcccgggtggtccttacctcttgtccttgaaatccatgccatgctgaagcaaggcaatactgtgataaagtattttttttaatatttcaatggaatgctccaaatgatttataaaaatttcaaaataaaagatggcttgtagtaaattgtaaaatatgagtagaactgaaataacctgtttcattcttattctagattaaacaaacatatacatataaccatataaatgttatttttattgtctgagagtactcttaaatattagtataaagtgtcaaaagaattgactgaatataagtactgttaaaataatttgaaccctatgatattttaaaccaagaggcaaagatatcacctaaaacttggtatttcttgataggttaggtgcaattaggcagtgacaatctgtattcaacaacatataagaggaaagagtaatatcagaattttgacacaaattaatgtgtcaacatattttacaatgattgtcaaaggaatttaagaattgtatttttaaagatttatttattatttttgtgggctaagacattgccattctattgatactaatgtctaacattaatgtttcttgttttcttttatttttaatattaataactataaaagcatttttcaaaggctatttgatccagcacacttcatatggatcttagtctttgaattaaatatttatataaatagattttattaatcaaattatttatttgtgtgccaacaattaattgtaactttatgatcatatctttgtttatgcttcttattttaaataattaagatgtatctgtgccttttaattagcatgacagtctgctttattaaaagaaaaaaactacaattaacatcattactagtatattttgcttagatttgagatactcaaatgatgctgtcttatttacagtcagtaattaagttcaattcaaactattttaccttgaatataaaatctaaatataataaactatactgtataatttactttaattcatgtcaaaacaattctttttatacacacacatgaaatattcttaatctgttctgtattgtttttctaaacaataaatacattctagatattgttgaaattaaattttgccagttgtaagacaaagacaacagataacttttgaaaatcaagcaaattactatggtgtttcttgggtcttcattattccatttatatatattttttatttcgaataataaatcaacctttatttttggcaataagattatcactgacgaaaatatgtacagttcaagaagtagaaataatattttccattagttaatttaggaaatattggaatagcatattataattatttatgaggttcccaatgttgtttttcacagaaaataaggtaaacattcaacttaaatcccccatgaagttttttcatgctcatactcataatcattatcacataatgtgcttattcaacaaactttgtatctggatatatttttaacaataagtttgttagcattatttatttatctttagagagaaaatatttgcatctgtttatttaccctttgaagcattaatacttagtcactcacattgaaattgcatatggatgtatcaacataggctaaaattaaattatggatgtcgcagaaatgaaatacttcatcttagaaggtaaaattttcaagaaagtattttattcatggacttaataatgtcttaagatgaaacaattttatgtccaaatgagaaatttataaaaagacccacatatagtagttgctgaacaaacataattttcttccagctcccatccttcctttttgaaaaattgaatttacccatgtagatgcagctatttacaattatacaagaatgcgaatagattaattatatcttctcatataaaggcaaagaattttatattatatataatgctaaatatttatttgataacacaatattcttagaaaaatagtttattactttaggattttatctataacataaatatattatttgttattacctctttaaattttcattttatacaatttttgagattctggccacacaacattcagaattattgctcatgtaaatttaaatattgctacttattttttttcttttctgaaatgaaaacatgaatcttttggcatctgtttttagcctcccatggaagacagtaagcaaaaccatcactgttggagaatttcaaatcacaacccgacataggagagtagagaaacaaagaaatgagtggatctagaaaggcaaactgaattgctatatttggaatagctaagaaggacctgactttgagaagtgctagaccagggactaggaacgttgcttagataaaaattatggccgattacactgatgcgaaggagaaaacagtgtaacacagaggagaaagttaacagagatagaatctatgatttaattttgcaaatagtttttttagagaacaacatgcatactataaaagaaatgatactattaagaacaaacctacttgttccaactcttaaagaaatattcatggtttagcatttgcctctaaaccctgttagaaatatgtgaagttagaaataaaggtttttttaaaaaaaaagcttttttggtatgtgaactgtatgctgtgctcagtatgtactgaaacatactatcttttattttctttaatttatatattccattcaaattctatattcttaagttagctaccacaacgttttcttattgtttcaatatggtatgtcccaatgaaatgctgtatatatatgtctaaactgtaaaaattatactgcaaatgttgaagttttgtatttatgagagacattgaaagtatggcttacagtatatcaaacttgtcacacttcaccatttgtatattaatagtaaagatacttttactttaa

SEQ ID NO: 158436 - DNA, 3329 bp, Homo sapiens
  Payload ID: 11015
  Gene Symbol: NELL1
  Gene Name: neural EGFL like 1
  ENST ID: ENST00000298925
  CDS Start-End: 154-2670
atatgcgagcgcagcacccggcgctgccgagccacctcccccgccgcccgctagcaagtttggcggctccaagccaggcgcgcctcaggatccaggctcatttgcttccacctagcttcggtgccccctgctaggcggggaccctcgagagcgatgccgatggatttgattttagttgtgtggttctgtgtgtgcactgccaggacagcagaagatatgaagccacccgtgttatcgctgatatggagaactagagttctgaagtctctgcttcagcaatcccttcagggagtggtgggctttgggatggaccctgaccttcagatggatatcgtcaccgagcttgaccttgtgaacaccacccttggagttgctcaggtgtctggaatgcacaatgccagcaaagcatttttatttcaagacatagaaagagagatccatgcagctcctcatgtgagtgagaaattaattcagctgttccggaacaagagtgaattcaccattttggccactgtacagcagaagccatccacttcaggagtgatactgtccattcgagaactggagcacagctattttgaactggagagcagtggcctgagggatgagattcggtatcactacatacacaatgggaagccaaggacagaggcacttccttaccgcatggcagatggacaatggcacaaggttgcactgtcagttagcgcctctcatctcctgctccatgtcgactgtaacaggatttatgagcgtgtgatagaccctccagataccaaccttcccccaggaatcaatttatggcttggccagcgcaaccaaaagcatggcttattcaaagggatcatccaagatgggaagatcatctttatgccgaatggatatataacacagtgtccaaatctaaatcacacttgcccaacctgcagtgatttcttaagcctggtgcaaggaataatggatttacaagagcttttggccaagatgactgcaaaactaaattatgcagagacaagacttagtcaattggaaaactgtcattgtgagaagacttgtcaagtgagtggactgctctatcgagatcaagactcttgggtagatggtgaccattgcaggaactgcacttgcaaaagtggtgccgtggaatgccgaaggatgtcctgtccccctctcaattgctccccagactccctcccagtgcacattgctggccagtgctgtaaggtctgccgaccaaaatgtatctatggaggaaaagttcttgcagaaggccagcggattttaaccaagagctgtcgggaatgccgaggtggagttttagtaaaaattacagaaatgtgtcctcctttgaactgctcagaaaaggatcacattcttcctgagaatcagtgctgccgtgtctgtagaggtcataacttttgtgcagaaggacctaaatgtggtgaaaactcagagtgcaaaaactggaatacaaaagctacttgtgagtgcaagagtggttacatctctgtccagggagactctgcctactgtgaagatattgatgagtgtgcagctaagatgcattactgtcatgccaatactgtgtgtgtcaaccttcctgggttatatcgctgtgactgtgtcccaggatacattcgtgtggatgacttctcttgtacagaacacgatgaatgtggcagcggccagcacaactgtgatgagaatgccatctgcaccaacactgtccagggacacagctgcacctgcaaaccgggctacgtggggaacgggaccatctgcagagctttctgtgaagagggctgcagatacggtggaacgtgtgtggctcccaacaaatgtgtctgtccatctggattcacaggaagccactgcgagaaagatattgatgaatgttcagagggaatcattgagtgccacaaccattcccgctgcgttaacctgccagggtggtaccactgtgagtgcagaagcggtttccatgacgatgggacctattcactgtccggggagtcctgtattgacattgatgaatgtgccttaagaactcacacctgttggaacgattctgcctgcatcaacctggcagggggctttgactgtctctgcccctctgggccctcctgctctggtgactgtcctcatgaaggggggctgaagcacaatggccaggtgtggaccttgaaagaagacaggtgttctgtctgctcctgcaaggatggcaagatattctgccgacggacagcttgtgattgccagaatccaagtgctgacctattctgttgcccagaatgtgacaccagagtcacaagtcaatgtttagaccaaaatggtcacaagctgtatcgaagtggagacaattggacccatagctgtcagcagtgtcggtgtctggaaggagaggtagattgctggccactcacttgccccaacttgagctgtgagtatacagctatcttagaaggggaatgttgtccccgctgtgtcagtgacccctgcctagctgataacatcacctatgacatcagaaaaacttgcctggacagctatggtgtttcacggcttagtggctcagtgtggacgatggctggatctccctgcacaacctgtaaatgcaagaatggaagagtctgttgttctgtggattttgagtgtcttcaaaataattgaagtatttacagtggactcaacgcagaagaatggacgaaatgaccatccaacgtgattaaggataggaatcggtagtttggtttttttgtttgttttgtttttttaaccacagataattgccaaagtttccacctgaggacggtgtttggaggttgccttttggacctaccactttgctcattcttgctaacctagtctaggtgacctacagtgccgtgcatttaagtcaatggttgttaaaagaagtttcccgtgttgtaaatcatgtttcccttatcagatcatttgcaaatacatttaaatgatctcatggtaaatgttgatgtattttttggtttattttgtgtactaacataatagagagagactcagctccttttatttattttgttgatttatggatcaaattctaaaataaagttgcctgttgtgacttttgtcccatctactgcatacttagtgctgagatccctgtaaaatgttttgatgaaaatatgtatgtagagtccagtcgcattatacatacatttcatagtgctgaaccttcttaaatgcctactcattcagcttaaacaggctgaagccaagtatgacaaagaggggaagggccaaaaacataatcaaagaataattttaaagagaattcttgtctctcttgc

SEQ ID NO: 158437 - DNA, 3094 bp, Homo sapiens
  Payload ID: 11015
  Gene Symbol: NELL1
  Gene Name: neural EGFL like 1
  ENST ID: ENST00000325319
  CDS Start-End: 174-2435
ggggctgccttcccgggcgcatatgcgagcgcagcacccggcgctgccgagccacctcccccgccgcccgctagcaagtttggcggctccaagccaggcgcgcctcaggatccaggctcatttgcttccacctagcttcggtgccccctgctaggcggggaccctcgagagcgatgccgatggatttgattttagttgtgtggttctgtgtgtgcactgccaggacagtggtgggctttgggatggaccctgaccttcagatggatatcgtcaccgagcttgaccttgtgaacaccacccttggagttgctcaggtgtctggaatgcacaatgccagcaaagcatttttatttcaagacatagaaagagagatccatgcagctcctcatgtgagtgagaaattaattcagctgttccggaacaagagtgaattcaccattttggccactgtacagcagaagccatccacttcaggagtgatactgtccattcgagaactggagcacaggatttatgagcgtgtgatagaccctccagataccaaccttcccccaggaatcaatttatggcttggccagcgcaaccaaaagcatggcttattcaaagggatcatccaagatgggaagatcatctttatgccgaatggatatataacacagtgtccaaatctaaatcacacttgcccaacctgcagtgatttcttaagcctggtgcaaggaataatggatttacaagagcttttggccaagatgactgcaaaactaaattatgcagagacaagacttagtcaattggaaaactgtcattgtgagaagacttgtcaagtgagtggactgctctatcgagatcaagactcttgggtagatggtgaccattgcaggaactgcacttgcaaaagtggtgccgtggaatgccgaaggatgtcctgtccccctctcaattgctccccagactccctcccagtgcacattgctggccagtgctgtaaggtctgccgaccaaaatgtatctatggaggaaaagttcttgcagaaggccagcggattttaaccaagagctgtcgggaatgccgaggtggagttttagtaaaaattacagaaatgtgtcctcctttgaactgctcagaaaaggatcacattcttcctgagaatcagtgctgccgtgtctgtagaggtcataacttttgtgcagaaggacctaaatgtggtgaaaactcagagtgcaaaaactggaatacaaaagctacttgtgagtgcaagagtggttacatctctgtccagggagactctgcctactgtgaagatattgatgagtgtgcagctaagatgcattactgtcatgccaatactgtgtgtgtcaaccttcctgggttatatcgctgtgactgtgtcccaggatacattcgtgtggatgacttctcttgtacagaacacgatgaatgtggcagcggccagcacaactgtgatgagaatgccatctgcaccaacactgtccagggacacagctgcacctgcaaaccgggctacgtggggaacgggaccatctgcagagctttctgtgaagagggctgcagatacggtggaacgtgtgtggctcccaacaaatgtgtctgtccatctggattcacaggaagccactgcgagaaagatattgatgaatgttcagagggaatcattgagtgccacaaccattcccgctgcgttaacctgccagggtggtaccactgtgagtgcagaagcggtttccatgacgatgggacctattcactgtccggggagtcctgtattgacattgatgaatgtgccttaagaactcacacctgttggaacgattctgcctgcatcaacctggcagggggctttgactgtctctgcccctctgggccctcctgctctggtgactgtcctcatgaaggggggctgaagcacaatggccaggtgtggaccttgaaagaagacaggtgttctgtctgctcctgcaaggatggcaagatattctgccgacggacagcttgtgattgccagaatccaagtgctgacctattctgttgcccagaatgtgacaccagagtcacaagtcaatgtttagaccaaaatggtcacaagctgtatcgaagtggagacaattggacccatagctgtcagcagtgtcggtgtctggaaggagaggtagattgctggccactcacttgccccaacttgagctgtgagtatacagctatcttagaaggggaatgttgtccccgctgtgtcagtgacccctgcctagctgataacatcacctatgacatcagaaaaacttgcctggacagctatggtgtttcacggcttagtggctcagtgtggacgatggctggatctccctgcacaacctgtaaatgcaagaatggaagagtctgttgttctgtggattttgagtgtcttcaaaataattgaagtatttacagtggactcaacgcagaagaatggacgaaatgaccatccaacgtgattaaggataggaatcggtagtttggtttttttgtttgttttgtttttttaaccacagataattgccaaagtttccacctgaggacggtgtttggaggttgccttttggacctaccactttgctcattcttgctaacctagtctaggtgacctacagtgccgtgcatttaagtcaatggttgttaaaagaagtttcccgtgttgtaaatcatgtttcccttatcagatcatttgcaaatacatttaaatgatctcatggtaaatgttgatgtattttttggtttattttgtgtactaacataatagagagagactcagctccttttatttattttgttgatttatggatcaaattctaaaataaagttgcctgttgtgacttttgtcccatctactgcatacttagtgctgagatccctgtaaaatgttttgatgaaaatatgtatgtagagtccagtcgcattatacatacatttcatagtgctgaaccttcttaaatgcctactcattcagcttaaacaggctgaagccaagtatgacaaagaggggaagggccaaaaacataatcaaagaataattttaaagagaattcttgtctctcttgc

SEQ ID NO: 158438 - DNA, 3022 bp, Homo sapiens
  Payload ID: 11015
  Gene Symbol: NELL1
  Gene Name: neural EGFL like 1
  Uniprot ID: Q92832
  ENST ID: ENST00000357134
  CDS Start-End: 153-2585
tatgcgagcgcagcacccggcgctgccgagccacctcccccgccgcccgctagcaagtttggcggctccaagccaggcgcgcctcaggatccaggctcatttgcttccacctagcttcggtgccccctgctaggcggggaccctcgagagcgatgccgatggatttgattttagttgtgtggttctgtgtgtgcactgccaggacagtggtgggctttgggatggaccctgaccttcagatggatatcgtcaccgagcttgaccttgtgaacaccacccttggagttgctcaggtgtctggaatgcacaatgccagcaaagcatttttatttcaagacatagaaagagagatccatgcagctcctcatgtgagtgagaaattaattcagctgttccggaacaagagtgaattcaccattttggccactgtacagcagaagccatccacttcaggagtgatactgtccattcgagaactggagcacagctattttgaactggagagcagtggcctgagggatgagattcggtatcactacatacacaatgggaagccaaggacagaggcacttccttaccgcatggcagatggacaatggcacaaggttgcactgtcagttagcgcctctcatctcctgctccatgtcgactgtaacaggatttatgagcgtgtgatagaccctccagataccaaccttcccccaggaatcaatttatggcttggccagcgcaaccaaaagcatggcttattcaaagggatcatccaagatgggaagatcatctttatgccgaatggatatataacacagtgtccaaatctaaatcacacttgcccaacctgcagtgatttcttaagcctggtgcaaggaataatggatttacaagagcttttggccaagatgactgcaaaactaaattatgcagagacaagacttagtcaattggaaaactgtcattgtgagaagacttgtcaagtgagtggactgctctatcgagatcaagactcttgggtagatggtgaccattgcaggaactgcacttgcaaaagtggtgccgtggaatgccgaaggatgtcctgtccccctctcaattgctccccagactccctcccagtgcacattgctggccagtgctgtaaggtctgccgaccaaaatgtatctatggaggaaaagttcttgcagaaggccagcggattttaaccaagagctgtcgggaatgccgaggtggagttttagtaaaaattacagaaatgtgtcctcctttgaactgctcagaaaaggatcacattcttcctgagaatcagtgctgccgtgtctgtagaggtcataacttttgtgcagaaggacctaaatgtggtgaaaactcagagtgcaaaaactggaatacaaaagctacttgtgagtgcaagagtggttacatctctgtccagggagactctgcctactgtgaagatattgatgagtgtgcagctaagatgcattactgtcatgccaatactgtgtgtgtcaaccttcctgggttatatcgctgtgactgtgtcccaggatacattcgtgtggatgacttctcttgtacagaacacgatgaatgtggcagcggccagcacaactgtgatgagaatgccatctgcaccaacactgtccagggacacagctgcacctgcaaaccgggctacgtggggaacgggaccatctgcagagctttctgtgaagagggctgcagatacggtggaacgtgtgtggctcccaacaaatgtgtctgtccatctggattcacaggaagccactgcgagaaagatattgatgaatgttcagagggaatcattgagtgccacaaccattcccgctgcgttaacctgccagggtggtaccactgtgagtgcagaagcggtttccatgacgatgggacctattcactgtccggggagtcctgtattgacattgatgaatgtgccttaagaactcacacctgttggaacgattctgcctgcatcaacctggcagggggctttgactgtctctgcccctctgggccctcctgctctggtgactgtcctcatgaaggggggctgaagcacaatggccaggtgtggaccttgaaagaagacaggtgttctgtctgctcctgcaaggatggcaagatattctgccgacggacagcttgtgattgccagaatccaagtgctgacctattctgttgcccagaatgtgacaccagagtcacaagtcaatgtttagaccaaaatggtcacaagctgtatcgaagtggagacaattggacccatagctgtcagcagtgtcggtgtctggaaggagaggtagattgctggccactcacttgccccaacttgagctgtgagtatacagctatcttagaaggggaatgttgtccccgctgtgtcagtgacccctgcctagctgataacatcacctatgacatcagaaaaacttgcctggacagctatggtgtttcacggcttagtggctcagtgtggacgatggctggatctccctgcacaacctgtaaatgcaagaatggaagagtctgttgttctgtggattttgagtgtcttcaaaataattgaagtatttacagtggactcaacgcagaagaatggacgaaatgaccatccaacgtgattaaggataggaatcggtagtttggtttttttgtttgttttgtttttttaaccacagataattgccaaagtttccacctgaggacggtgtttggaggttgccttttggacctaccactttgctcattcttgctaacctagtctaggtgacctacagtgccgtgcatttaagtcaatggttgttaaaagaagtttcccgtgttgtaaatcatgtttcccttatcagatcatttgcaaatacatttaaatgatctcatggtaaatgttgatgtattttttggtttattttgtgtactaacataatagagagagactcagctccttttatttattttgttgatttatggatcaaattctaaaataaagttgcctgttgtgacttt

SEQ ID NO: 158439 - DNA, 2400 bp, Homo sapiens
  Payload ID: 11015
  Gene Symbol: NELL1
  Gene Name: neural EGFL like 1
  Uniprot ID: Q92832
  ENST ID: ENST00000532434
  CDS Start-End: 64-2355
tccaggctcatttgcttccacctagcttcggtgccccctgctaggcggggaccctcgagagcgatgccgatggatttgattttagttgtgtggttctgtgtgtgcactgccaggacagtggtgggctttgggatggaccctgaccttcagatggatatcgtcaccgagcttgaccttgtgaacaccacccttggagttgctcaggtgtctggaatgcacaatgccagcaaagcatttttatttcaagacatagaaagagagatccatgcagctcctcatgtgagtgagaaattaattcagctgttccggaacaagagtgaattcaccattttggccactgtacagcagaagccatccacttcaggagtgatactgtccattcgagaactggagcacagctattttgaactggagagcagtggcctgagggatgagattcggtatcactacatacacaatgggaagccaaggacagaggcacttccttaccgcatggcagatggacaatggcacaaggttgcactgtcagttagcgcctctcatctcctgctccatgtcgactgtaacaggatttatgagcgtgtgatagaccctccagataccaaccttcccccaggaatcaatttatggcttggccagcgcaaccaaaagcatggcttattcaaagggatcatccaagatgggaagatcatctttatgccgaatggatatataacacagtgtccaaatctaaatcacacttgcccaacctgcagtgatttcttaagcctggtgcaaggaataatggatttacaagagcttttggccaagatgactgcaaaactaaattatgcagagacaagacttagtcaattggaaaactgtcattgtgagaagacttgtcaagtgagtggactgctctatcgagatcaagactcttgggtagatggtgaccattgcaggaactgcacttgcaaaagtggtgccgtggaatgccgaaggatgtcctgtccccctctcaattgctccccagactccctcccagtgcacattgctggccagtgctgtaaggtctgccgaccaaaatgtatctatggaggaaaagttcttgcagaaggccagcggattttaaccaagagctgtcgggaatgccgaggtggagttttagtaaaaattacagaaatgtgtcctcctttgaactgctcagaaaaggatcacattcttcctgagaatcagtgctgccgtgtctgtagaggtcataacttttgtgcagaaggacctaaatgtggtgaaaactcagagtgcaaaaactggaatacaaaagctacttgtgagtgcaagagtggttacatctctgtccagggagactctgcctactgtgaagatattgatgagtgtgcagctaagatgcattactgtcatgccaatactgtgtgtgtcaaccttcctgggttatatcgctgtgactgtgtcccaggatacattcgtgtggatgacttctcttgtacagaacacgatgaatgtggcagcggccagcacaactgtgatgagaatgccatctgcaccaacactgtccagggacacagctgcacctgcaaaccgggctacgtggggaacgggaccatctgcagagctttctgtgaagagggctgcagatacggtggaacgtgtgtggctcccaacaaatgtgtctgtccatctggattcacaggaagccactgcgagaaagacattgatgaatgtgccttaagaactcacacctgttggaacgattctgcctgcatcaacctggcagggggctttgactgtctctgcccctctgggccctcctgctctggtgactgtcctcatgaaggggggctgaagcacaatggccaggtgtggaccttgaaagaagacaggtgttctgtctgctcctgcaaggatggcaagatattctgccgacggacagcttgtgattgccagaatccaagtgctgacctattctgttgcccagaatgtgacaccagagtcacaagtcaatgtttagaccaaaatggtcacaagctgtatcgaagtggagacaattggacccatagctgtcagcagtgtcggtgtctggaaggagaggtagattgctggccactcacttgccccaacttgagctgtgagtatacagctatcttagaaggggaatgttgtccccgctgtgtcagtgacccctgcctagctgataacatcacctatgacatcagaaaaacttgcctggacagctatggtgtttcacggcttagtggctcagtgtggacgatggctggatctccctgcacaacctgtaaatgcaagaatggaagagtctgttgttctgtggattttgagtgtcttcaaaataattgaagtatttacagtggactcaacgcagaagaatggacgaaatgacca

SEQ ID NO: 158440 - DNA, 2746 bp, Homo sapiens
  Payload ID: 11015
  Gene Symbol: NELL1
  Gene Name: neural EGFL like 1
  ENST ID: ENST00000619031
  CDS Start-End: 602-2314
atcagggactgacattgcttcatgactcctggctgctgtggaaaataatttttcccctccttctgatagcaagacatagaaagagagatccatgcagctcctcatgtgagtgagaaattaattcagctgttccggaacaagagtgaattcaccattttggccactgtacagcagaagccatccacttcaggagtgatactgtccattcgagaactggagcacagctattttgaactggagagcagtggcctgagggatgagattcggtatcactacatacacaatgggaagccaaggacagaggcacttccttaccgcatggcagatggacaatggcacaaggttgcactgtcagttagcgcctctcatctcctgctccatgtcgactgtaacaggatttatgagcgtgtgatagaccctccagataccaaccttcccccaggaatcaatttatggcttggccagcgcaaccaaaagcatggcttattcaaagggatcatccaagatgggaagatcatctttatgccgaatggatatataacacagtgtccaaatctcttgcccaacctgcagtgatttcttaagcctggtgcaaggaataatggatttacaagagcttttggccaagatgactgcaaaactaaattatgcagagacaagacttagtcaattggaaaactgtcattgtgagaagacttgtcaagtgagtggactgctctatcgagatcaagactcttgggtagatggtgaccattgcaggaactgcacttgcaaaagtggtgccgtggaatgccgaaggatgtcctgtccccctctcaattgctccccagactccctcccagtgcacattgctggccagtgctgtaaggtctgccgaccaaaatgtatctatggaggaaaagttcttgcagaaggccagcggattttaaccaagagctgtcgggaatgccgaggtggagttttagtaaaaattacagaaatgtgtcctcctttgaactgctcagaaaaggatcacattcttcctgagaatcagtgctgccgtgtctgtagaggtcataacttttgtgcagaaggacctaaatgtggtgaaaactcagagtgcaaaaactggaatacaaaagctacttgtgagtgcaagagtggttacatctctgtccagggagactctgcctactgtgaagatattgatgagtgtgcagctaagatgcattactgtcatgccaatactgtgtgtgtcaaccttcctgggttatatcgctgtgactgtgtcccaggatacattcgtgtggatgacttctcttgtacagaacacgatgaatgtggcagcggccagcacaactgtgatgagaatgccatctgcaccaacactgtccagggacacagctgcacctgcaaaccgggctacgtggggaacgggaccatctgcagagctttctgtgaagagggctgcagatacggtggaacgtgtgtggctcccaacaaatgtgtctgtccatctggattcacaggaagccactgcgagaaagatattgatgaatgttcagagggaatcattgagtgccacaaccattcccgctgcgttaacctgccagggtggtaccactgtgagtgcagaagcggtttccatgacgatgggacctattcactgtccggggagtcctgtattgacattgatgaatgtgccttaagaactcacacctgttggaacgattctgcctgcatcaacctggcagggggctttgactgtctctgcccctctgggccctcctgctctggtgactgtcctcatgaaggggggctgaagcacaatggccaggtgtggaccttgaaagaagacaggtgttctgtctgctcctgcaaggatggcaagatattctgccgacggacagcttgtgattgccagaatccaagtgctgacctattctgttgcccagaatgtgacaccagagtcacaagtcaatgtttagaccaaaatggtcacaagctgtatcgaagtggagacaattggacccatagctgtcagcagtgtcggtgtctggaaggagaggtagattgctggccactcacttgccccaacttgagctgtgagtatacagctatcttagaaggggaatgttgtccccgctgtgtcagtgacccctgcctagctgataacatcacctatgacatcagaaaaacttgcctggacagctatggtgtttcacggcttagtggctcagtgtggacgatggctggatctccctgcacaacctgtaaatgcaagaatggaagagtctgttgttctgtggattttgagtgtcttcaaaataattgaagtatttacagtggactcaacgcagaagaatggacgaaatgaccatccaacgtgattaaggataggaatcggtagtttggtttttttgtttgttttgtttttttaaccacagataattgccaaagtttccacctgaggacggtgtttggaggttgccttttggacctaccactttgctcattcttgctaacctagtctaggtgacctacagtgccgtgcatttaagtcaatggttgttaaaagaagtttcccgtgttgtaaatcatgtttcccttatcagatcatttgcaaatacatttaaatgatctcatggtaaatgttgatgtattttttggtttattttgtgtactaacataatagagagagactcagctccttttatttattttgttgatttatggatcaaattctaaaataaagttgcctgttgtg

SEQ ID NO: 158441 - DNA, 2943 bp, Homo sapiens
  Payload ID: 11016
  Gene Symbol: NELL2
  Gene Name: neural EGFL like 2
  Uniprot ID: Q99435
  ENST ID: ENST00000333837
  CDS Start-End: 93-2612
agaaggatccatctaacatttactgaaataaggaagatgctttattcaatctaaaagtgaaaaaagaaccttttagacattattattataaaatgtctataagaagacttctcattttaatcctcaaaatagggagacgatggactgagctgatccgcaccatggagtctcgggtcttactgagaacattctgtttgatcttcggtctcggagcagtttgggggcttggtgtggacccttccctacagattgacgtcttaacagagttagaacttggggagtccacgaccggagtgcgtcaggtcccggggctgcataatgggacgaaagcctttctctttcaagatactcccagaagcataaaagcatccactgctacagctgaacagttttttcagaagctgagaaataaacatgaatttactattttggtgaccctaaaacagacccacttaaattcaggagttattctctcaattcaccacttggatcacaggtacctggaactggaaagtagtggccatcggaatgaagtcagactgcattaccgctcaggcagtcaccgccctcacacagaagtgtttccttacattttggctgatgacaagtggcacaagctctccttagccatcagtgcttcccatttgattttacacattgactgcaataaaatttatgaaagggtagtagaaaagccctccacagacttgcctctaggcacaacattttggctaggacagagaaataatgcgcatggatattttaagggtataatgcaagatgtccaattacttgtcatgccccagggatttattgctcagtgcccagatcttaatcgcacctgtccaacttgcaatgacttccatggacttgtgcagaaaatcatggagctacaggatattttagccaaaacatcagccaagctgtctcgagctgaacagcgaatgaatagattggatcagtgctattgtgaaaggacttgcaccatgaagggaaccacctaccgagaatttgagtcctggatagacggctgtaagaactgcacatgcctgaatggaaccatccagtgtgaaactctaatctgcccaaatcctgactgcccacttaagtcggctcttgcgtatgtggatggcaaatgctgtaaggaatgcaaatcgatatgccaatttcaaggacgaacctactttgaaggagaaagaaatacagtctattcctcttctggagtatgtgttctctatgagtgcaaggaccagaccatgaaacttgttgagagttcaggctgtccagctttggattgtccagagtctcatcagataaccttgtctcacagctgttgcaaagtttgtaaaggttatgacttttgttctgaaaggcataactgcatggagaattccatctgcagaaatctgaatgacagggctgtttgtagctgtcgagatggttttagggctcttcgagaggataatgcctactgtgaagacatcgatgagtgtgctgaagggcgccattactgtcgtgaaaatacaatgtgtgtcaacaccccgggttcttttatgtgcatctgcaaaactggatacatcagaattgatgattattcatgtacagaacatgatgagtgtatcacaaatcagcacaactgtgatgaaaatgctttatgcttcaacactgttggaggacacaactgtgtttgcaagccgggctatacagggaatggaacgacatgcaaagcattttgcaaagatggctgtaggaatggaggagcctgtattgccgctaatgtgtgtgcctgcccacaaggcttcactggacccagctgtgaaacggacattgatgaatgctctgatggttttgttcaatgtgacagtcgtgctaattgcattaacctgcctggatggtaccactgtgagtgcagagatggctaccatgacaatgggatgttttcaccaagtggagaatcgtgtgaagatattgatgagtgtgggaccgggaggcacagctgtgccaatgataccatttgcttcaatttggatggcggatatgattgtcgatgtcctcatggaaagaattgcacaggggactgcatccatgatggaaaagttaagcacaatggtcagatttgggtgttggaaaatgacaggtgctctgtgtgctcatgtcagaatggattcgttatgtgtcgacggatggtctgtgactgtgagaatcccacagttgatcttttttgctgccctgaatgtgacccaaggcttagtagtcagtgcctccatcaaaatggggaaactttgtataacagtggtgacacctgggtccagaattgtcaacagtgccgctgcttgcaaggggaagttgattgttggcccctgccttgcccagatgtggagtgtgaattcagcattctcccagagaatgagtgctgcccgcgctgtgtcacagacccttgccaggctgacaccatccgcaatgacatcaccaagacttgcctggacgaaatgaatgtggttcgcttcaccgggtcctcttggatcaaacatggcactgagtgtactctctgccagtgcaagaatggccacatctgttgctcagtggatccacagtgccttcaggaactgtgaagttaactgtctcatgggagatttctgttaaaagaatgttctttcattaaaagaccaaaaagaagttaaaacttaaattgggtgatttgtgggcagctaaatgcagctttgttaatagctgagtgaactttcaattatgaaatttgtggagcttgacaaaatcacaaaaggaaaattactggggcaaaattagacctcaagtctgcctctactgtgtctcacatcaccatgtagaagaatgggcgtacagtatataccgtgacatcctgaaccctggatagaaagcctgagcccattggatctgtgaaagcctctagcttcactggtgcag

SEQ ID NO: 158442 - DNA, 3203 bp, Homo sapiens
  Payload ID: 11016
  Gene Symbol: NELL2
  Gene Name: neural EGFL like 2
  Uniprot ID: Q99435
  ENST ID: ENST00000395487
  CDS Start-End: 97-2544
gtgcttgccttggagaccgcgaggcggatcacgcccctagtccagggtcggagggctgagggggaactttgcagagagaagggtttaaaggaggtcatggaaacgggactgggtgctccgctatttaaagcttggctgctgatctcagtttgggggcttggtgtggacccttccctacagattgacgtcttaacagagttagaacttggggagtccacgaccggagtgcgtcaggtcccggggctgcataatgggacgaaagcctttctctttcaagatactcccagaagcataaaagcatccactgctacagctgaacagttttttcagaagctgagaaataaacatgaatttactattttggtgaccctaaaacagacccacttaaattcaggagttattctctcaattcaccacttggatcacaggtacctggaactggaaagtagtggccatcggaatgaagtcagactgcattaccgctcaggcagtcaccgccctcacacagaagtgtttccttacattttggctgatgacaagtggcacaagctctccttagccatcagtgcttcccatttgattttacacattgactgcaataaaatttatgaaagggtagtagaaaagccctccacagacttgcctctaggcacaacattttggctaggacagagaaataatgcgcatggatattttaagggtataatgcaagatgtccaattacttgtcatgccccagggatttattgctcagtgcccagatcttaatcgcacctgtccaacttgcaatgacttccatggacttgtgcagaaaatcatggagctacaggatattttagccaaaacatcagccaagctgtctcgagctgaacagcgaatgaatagattggatcagtgctattgtgaaaggacttgcaccatgaagggaaccacctaccgagaatttgagtcctggatagacggctgtaagaactgcacatgcctgaatggaaccatccagtgtgaaactctaatctgcccaaatcctgactgcccacttaagtcggctcttgcgtatgtggatggcaaatgctgtaaggaatgcaaatcgatatgccaatttcaaggacgaacctactttgaaggagaaagaaatacagtctattcctcttctggagtatgtgttctctatgagtgcaaggaccagaccatgaaacttgttgagagttcaggctgtccagctttggattgtccagagtctcatcagataaccttgtctcacagctgttgcaaagtttgtaaaggttatgacttttgttctgaaaggcataactgcatggagaattccatctgcagaaatctgaatgacagggctgtttgtagctgtcgagatggttttagggctcttcgagaggataatgcctactgtgaagacatcgatgagtgtgctgaagggcgccattactgtcgtgaaaatacaatgtgtgtcaacaccccgggttcttttatgtgcatctgcaaaactggatacatcagaattgatgattattcatgtacagaacatgatgagtgtatcacaaatcagcacaactgtgatgaaaatgctttatgcttcaacactgttggaggacacaactgtgtttgcaagccgggctatacagggaatggaacgacatgcaaagcattttgcaaagatggctgtaggaatggaggagcctgtattgccgctaatgtgtgtgcctgcccacaaggcttcactggacccagctgtgaaacggacattgatgaatgctctgatggttttgttcaatgtgacagtcgtgctaattgcattaacctgcctggatggtaccactgtgagtgcagagatggctaccatgacaatgggatgttttcaccaagtggagaatcgtgtgaagatattgatgagtgtgggaccgggaggcacagctgtgccaatgataccatttgcttcaatttggatggcggatatgattgtcgatgtcctcatggaaagaattgcacaggggactgcatccatgatggaaaagttaagcacaatggtcagatttgggtgttggaaaatgacaggtgctctgtgtgctcatgtcagaatggattcgttatgtgtcgacggatggtctgtgactgtgagaatcccacagttgatcttttttgctgccctgaatgtgacccaaggcttagtagtcagtgcctccatcaaaatggggaaactttgtataacagtggtgacacctgggtccagaattgtcaacagtgccgctgcttgcaaggggaagttgattgttggcccctgccttgcccagatgtggagtgtgaattcagcattctcccagagaatgagtgctgcccgcgctgtgtcacagacccttgccaggctgacaccatccgcaatgacatcaccaagacttgcctggacgaaatgaatgtggttcgcttcaccgggtcctcttggatcaaacatggcactgagtgtactctctgccagtgcaagaatggccacatctgttgctcagtggatccacagtgccttcaggaactgtgaagttaactgtctcatgggagatttctgttaaaagaatgttctttcattaaaagaccaaaaagaagttaaaacttaaattgggtgatttgtgggcagctaaatgcagctttgttaatagctgagtgaactttcaattatgaaatttgtggagcttgacaaaatcacaaaaggaaaattactggggcaaaattagacctcaagtctgcctctactgtgtctcacatcaccatgtagaagaatgggcgtacagtatataccgtgacatcctgaaccctggatagaaagcctgagcccattggatctgtgaaagcctctagcttcactggtgcagaaaattttcctctagatcagaatcttcaagaatcagttaggttcctcactgcaagaaataaaatgtcaggcagtgaatgaattatattttcagaagtaaagcaaagaagctataacatgttatgtacagtacactctgaaaagaaatctgaaacaagttattgtaatgataaaaataatgcacaggcatggttacttaatattttctaacaggaaaagtcatccctatttccttgttttactgcacttaatattatttggttgaatttgttcagtataagctcgttcttgtgcaaaattaaataaatatttctcttaccttataacac

SEQ ID NO: 158443 - DNA, 3612 bp, Homo sapiens
  Payload ID: 11016
  Gene Symbol: NELL2
  Gene Name: neural EGFL like 2
  Uniprot ID: Q99435
  ENST ID: ENST00000429094
  CDS Start-End: 506-2956
ggcccgcccctccctccccggaggagcagtctctccgcgcgtctcccggagctttctccattgtctctgcctttacaacaggttcgggcggcggggaagacgggggggtgcggggccgccccagcccgggctttcttggggccgccccccttctaccgggtgtgcgagtctttggctgcttttattcggctcgggagctaattccccgacggagccgcgccggggcgagtccgacccctccctccgggccccctccgggccgcgctgccgcctcggccctgcgtgtgggaatgatgtgcgcattggagggtctaagttcttcacgcgcctggggaggcctcccttttctttcttaggcaaccaaagcgtattaatcctactgatcagtaaatccgaggcagcagcaggagagacaaacgttattttcccgcttgattccaagaacctcttcgatttttatttttatttttaaagagggagacgatggactgagctgatccgcaccatggagtctcgggtcttactgagaacattctgtttgatcttcggtctcggagcagtttgggggcttggtgtggacccttccctacagattgacgtcttaacagagttagaacttggggagtccacgaccggagtgcgtcaggtcccggggctgcataatgggacgaaagcctttctctttcaagatactcccagaagcataaaagcatccactgctacagctgaacagttttttcagaagctgagaaataaacatgaatttactattttggtgaccctaaaacagacccacttaaattcaggagttattctctcaattcaccacttggatcacaggtacctggaactggaaagtagtggccatcggaatgaagtcagactgcattaccgctcaggcagtcaccgccctcacacagaagtgtttccttacattttggctgatgacaagtggcacaagctctccttagccatcagtgcttcccatttgattttacacattgactgcaataaaatttatgaaagggtagtagaaaagccctccacagacttgcctctaggcacaacattttggctaggacagagaaataatgcgcatggatattttaagggtataatgcaagatgtccaattacttgtcatgccccagggatttattgctcagtgcccagatcttaatcgcacctgtccaacttgcaatgacttccatggacttgtgcagaaaatcatggagctacaggatattttagccaaaacatcagccaagctgtctcgagctgaacagcgaatgaatagattggatcagtgctattgtgaaaggacttgcaccatgaagggaaccacctaccgagaatttgagtcctggatagacggctgtaagaactgcacatgcctgaatggaaccatccagtgtgaaactctaatctgcccaaatcctgactgcccacttaagtcggctcttgcgtatgtggatggcaaatgctgtaaggaatgcaaatcgatatgccaatttcaaggacgaacctactttgaaggagaaagaaatacagtctattcctcttctggagtatgtgttctctatgagtgcaaggaccagaccatgaaacttgttgagagttcaggctgtccagctttggattgtccagagtctcatcagataaccttgtctcacagctgttgcaaagtttgtaaaggttatgacttttgttctgaaaggcataactgcatggagaattccatctgcagaaatctgaatgacagggctgtttgtagctgtcgagatggttttagggctcttcgagaggataatgcctactgtgaagacatcgatgagtgtgctgaagggcgccattactgtcgtgaaaatacaatgtgtgtcaacaccccgggttcttttatgtgcatctgcaaaactggatacatcagaattgatgattattcatgtacagaacatgatgagtgtatcacaaatcagcacaactgtgatgaaaatgctttatgcttcaacactgttggaggacacaactgtgtttgcaagccgggctatacagggaatggaacgacatgcaaagcattttgcaaagatggctgtaggaatggaggagcctgtattgccgctaatgtgtgtgcctgcccacaaggcttcactggacccagctgtgaaacggacattgatgaatgctctgatggttttgttcaatgtgacagtcgtgctaattgcattaacctgcctggatggtaccactgtgagtgcagagatggctaccatgacaatgggatgttttcaccaagtggagaatcgtgtgaagatattgatgagtgtgggaccgggaggcacagctgtgccaatgataccatttgcttcaatttggatggcggatatgattgtcgatgtcctcatggaaagaattgcacaggggactgcatccatgatggaaaagttaagcacaatggtcagatttgggtgttggaaaatgacaggtgctctgtgtgctcatgtcagaatggattcgttatgtgtcgacggatggtctgtgactgtgagaatcccacagttgatcttttttgctgccctgaatgtgacccaaggcttagtagtcagtgcctccatcaaaatggggaaactttgtataacagtggtgacacctgggtccagaattgtcaacagtgccgctgcttgcaaggggaagttgattgttggcccctgccttgcccagatgtggagtgtgaattcagcattctcccagagaatgagtgctgcccgcgctgtgtcacagacccttgccaggctgacaccatccgcaatgacatcaccaagacttgcctggacgaaatgaatgtggttcgcttcaccgggtcctcttggatcaaacatggcactgagtgtactctctgccagtgcaagaatggccacatctgttgctcagtggatccacagtgccttcaggaactgtgaagttaactgtctcatgggagatttctgttaaaagaatgttctttcattaaaagaccaaaaagaagttaaaacttaaattgggtgatttgtgggcagctaaatgcagctttgttaatagctgagtgaactttcaattatgaaatttgtggagcttgacaaaatcacaaaaggaaaattactggggcaaaattagacctcaagtctgcctctactgtgtctcacatcaccatgtagaagaatgggcgtacagtatataccgtgacatcctgaaccctggatagaaagcctgagcccattggatctgtgaaagcctctagcttcactggtgcagaaaattttcctctagatcagaatcttcaagaatcagttaggttcctcactgcaagaaataaaatgtcaggcagtgaatgaattatattttcagaagtaaagcaaagaagctataacatgttatgtacagtacactctgaaaagaaatctgaaacaagttattgtaatgataaaaataatgcacaggcatggttacttaatattttctaacaggaaaagtcatccctatttccttgttttactgcacttaatattatttggttgaatttgttcagtataagctcgttcttgtgcaaaattaaataaatatttctcttaccttataa

SEQ ID NO: 158444 - DNA, 3196 bp, Homo sapiens
  Payload ID: 11016
  Gene Symbol: NELL2
  Gene Name: neural EGFL like 2
  Uniprot ID: Q99435
  ENST ID: ENST00000452445
  CDS Start-End: 94-2544
ggaggagcagtctctccgcgcgtctcccggagctttctccattgtctctgcctttacaacagagggagacgatggactgagctgatccgcaccatggagtctcgggtcttactgagaacattctgtttgatcttcggtctcggagcagtttgggggcttggtgtggacccttccctacagattgacgtcttaacagagttagaacttggggagtccacgaccggagtgcgtcaggtcccggggctgcataatgggacgaaagcctttctctttcaagatactcccagaagcataaaagcatccactgctacagctgaacagttttttcagaagctgagaaataaacatgaatttactattttggtgaccctaaaacagacccacttaaattcaggagttattctctcaattcaccacttggatcacaggtacctggaactggaaagtagtggccatcggaatgaagtcagactgcattaccgctcaggcagtcaccgccctcacacagaagtgtttccttacattttggctgatgacaagtggcacaagctctccttagccatcagtgcttcccatttgattttacacattgactgcaataaaatttatgaaagggtagtagaaaagccctccacagacttgcctctaggcacaacattttggctaggacagagaaataatgcgcatggatattttaagggtataatgcaagatgtccaattacttgtcatgccccagggatttattgctcagtgcccagatcttaatcgcacctgtccaacttgcaatgacttccatggacttgtgcagaaaatcatggagctacaggatattttagccaaaacatcagccaagctgtctcgagctgaacagcgaatgaatagattggatcagtgctattgtgaaaggacttgcaccatgaagggaaccacctaccgagaatttgagtcctggatagacggctgtaagaactgcacatgcctgaatggaaccatccagtgtgaaactctaatctgcccaaatcctgactgcccacttaagtcggctcttgcgtatgtggatggcaaatgctgtaaggaatgcaaatcgatatgccaatttcaaggacgaacctactttgaaggagaaagaaatacagtctattcctcttctggagtatgtgttctctatgagtgcaaggaccagaccatgaaacttgttgagagttcaggctgtccagctttggattgtccagagtctcatcagataaccttgtctcacagctgttgcaaagtttgtaaaggttatgacttttgttctgaaaggcataactgcatggagaattccatctgcagaaatctgaatgacagggctgtttgtagctgtcgagatggttttagggctcttcgagaggataatgcctactgtgaagacatcgatgagtgtgctgaagggcgccattactgtcgtgaaaatacaatgtgtgtcaacaccccgggttcttttatgtgcatctgcaaaactggatacatcagaattgatgattattcatgtacagaacatgatgagtgtatcacaaatcagcacaactgtgatgaaaatgctttatgcttcaacactgttggaggacacaactgtgtttgcaagccgggctatacagggaatggaacgacatgcaaagcattttgcaaagatggctgtaggaatggaggagcctgtattgccgctaatgtgtgtgcctgcccacaaggcttcactggacccagctgtgaaacggacattgatgaatgctctgatggttttgttcaatgtgacagtcgtgctaattgcattaacctgcctggatggtaccactgtgagtgcagagatggctaccatgacaatgggatgttttcaccaagtggagaatcgtgtgaagatattgatgagtgtgggaccgggaggcacagctgtgccaatgataccatttgcttcaatttggatggcggatatgattgtcgatgtcctcatggaaagaattgcacaggggactgcatccatgatggaaaagttaagcacaatggtcagatttgggtgttggaaaatgacaggtgctctgtgtgctcatgtcagaatggattcgttatgtgtcgacggatggtctgtgactgtgagaatcccacagttgatcttttttgctgccctgaatgtgacccaaggcttagtagtcagtgcctccatcaaaatggggaaactttgtataacagtggtgacacctgggtccagaattgtcaacagtgccgctgcttgcaaggggaagttgattgttggcccctgccttgcccagatgtggagtgtgaattcagcattctcccagagaatgagtgctgcccgcgctgtgtcacagacccttgccaggctgacaccatccgcaatgacatcaccaagacttgcctggacgaaatgaatgtggttcgcttcaccgggtcctcttggatcaaacatggcactgagtgtactctctgccagtgcaagaatggccacatctgttgctcagtggatccacagtgccttcaggaactgtgaagttaactgtctcatgggagatttctgttaaaagaatgttctttcattaaaagaccaaaaagaagttaaaacttaaattgggtgatttgtgggcagctaaatgcagctttgttaatagctgagtgaactttcaattatgaaatttgtggagcttgacaaaatcacaaaaggaaaattactggggcaaaattagacctcaagtctgcctctactgtgtctcacatcaccatgtagaagaatgggcgtacagtatataccgtgacatcctgaaccctggatagaaagcctgagcccattggatctgtgaaagcctctagcttcactggtgcagaaaattttcctctagatcagaatcttcaagaatcagttaggttcctcactgcaagaaataaaatgtcaggcagtgaatgaattatattttcagaagtaaagcaaagaagctataacatgttatgtacagtacactctgaaaagaaatctgaaacaagttattgtaatgataaaaataatgcacaggcatggttacttaatattttctaacaggaaaagtcatccctatttccttgttttactgcacttaatattatttggttgaatttgttcagtataagctcgttcttgtgcaaaattaaataaatatttctcttacctt

SEQ ID NO: 158445 - DNA, 3279 bp, Homo sapiens
  Payload ID: 11016
  Gene Symbol: NELL2
  Gene Name: neural EGFL like 2
  Uniprot ID: Q99435
  ENST ID: ENST00000437801
  CDS Start-End: 373-2973
gctcagttccccttgccttctgctgtatgctggtcccagagagcccgagtccgggtctccacgctttatttggcagggggcgcgcgggttccggagctgtccagcacctcctggccaagttctctgcgctctccgcgcccgggaagctctccgcgccggggaagctctccagcgccccgcccccggcagggaacctctccaccaggacacccggggcttcccaggctcgccatccgtccccaccagtctctacctactttgcccagctccacctcggcagtgcagcgtgttttggtggccttcctccgcacgccctggagggggagtgccctgcaccccggggctgctccggagcccagtgcacgagtgcacatgggcttccctcctttgcttaaagggcaggcgagcgctactcgctccagccttgcctcctgcagctgggtggtcttttttctctcctgtctttcaagacacgcgcccgaaatcgagggagggagacgatggactgagctgatccgcaccatggagtctcgggtcttactgagaacattctgtttgatcttcggtctcggagcagtttgggggcttggtgtggacccttccctacagattgacgtcttaacagagttagaacttggggagtccacgaccggagtgcgtcaggtcccggggctgcataatgggacgaaagcctttctctttcaagatactcccagaagcataaaagcatccactgctacagctgaacagttttttcagaagctgagaaataaacatgaatttactattttggtgaccctaaaacagacccacttaaattcaggagttattctctcaattcaccacttggatcacaggtacctggaactggaaagtagtggccatcggaatgaagtcagactgcattaccgctcaggcagtcaccgccctcacacagaagtgtttccttacattttggctgatgacaagtggcacaagctctccttagccatcagtgcttcccatttgattttacacattgactgcaataaaatttatgaaagggtagtagaaaagccctccacagacttgcctctaggcacaacattttggctaggacagagaaataatgcgcatggatattttaagggtataatgcaagatgtccaattacttgtcatgccccagggatttattgctcagtgcccagatcttaatcgcacctgtccaacttgcaatgacttccatggacttgtgcagaaaatcatggagctacaggatattttagccaaaacatcagccaagctgtctcgagctgaacagcgaatgaatagattggatcagtgctattgtgaaaggacttgcaccatgaagggaaccacctaccgagaatttgagtcctggatagacggctgtaagaactgcacatgcctgaatggaaccatccagtgtgaaactctaatctgcccaaatcctgactgcccacttaagtcggctcttgcgtatgtggatggcaaatgctgtaaggaatgcaaatcgatatgccaatttcaaggacgaacctactttgaaggagaaagaaatacagtctattcctcttctggagtatgtgttctctatgagtgcaaggaccagaccatgaaacttgttgagagttcaggctgtccagctttggattgtccagagtctcatcagataaccttgtctcacagctgttgcaaagtttgtaaaggttatgacttttgttctgaaaggcataactgcatggagaattccatctgcagaaatctgaatgacagggctgtttgtagctgtcgagatggttttagggctcttcgagaggataatgcctactgtgaagacatcgatgagtgtgctgaagggcgccattactgtcgtgaaaatacaatgtgtgtcaacaccccgggttcttttatgtgcatctgcaaaactggatacatcagaattgatgattattcatgtacagaacatgatgagtgtatcacaaatcagcacaactgtgatgaaaatgctttatgcttcaacactgttggaggacacaactgtgtttgcaagccgggctatacagggaatggaacgacatgcaaagcattttgcaaagatggctgtaggaatggaggagcctgtattgccgctaatgtgtgtgcctgcccacaaggcttcactggacccagctgtgaaacggacattgatgaatgctctgatggttttgttcaatgtgacagtcgtgctaattgcattaacctgcctggatggtaccactgtgagtgcagagatggctaccatgacaatgggatgttttcaccaagtggagaatcgtgtgaagatattgatgagtgtgggaccgggaggcacagctgtgccaatgataccatttgcttcaatttggatggcggatatgattgtcgatgtcctcatggaaagaattgcacaggggactgcatccatgatggaaaagttaagcacaatggtcagatttgggtgttggaaaatgacaggtgctctgtgtgctcatgtcagaatggattcgttatgtgtcgacggatggtctgtgactgtgagaatcccacagttgatcttttttgctgccctgaatgtgacccaaggcttagtagtcagtgcctccatcaaaatggggaaactttgtataacagtggtgacacctgggtccagaattgtcaacagtgccgctgcttgcaaggggaagttgattgttggcccctgccttgcccagatgtggagtgtgaattcagcattctcccagagaatgagtgctgcccgcgctgtgtcacagacccttgccaggctgacaccatccgcaatgacatcaccaagacttgcctggacgaaatgaatgtggttcgcttcaccgggtcctcttggatcaaacatggcactgagtgtactctctgccagtgcaagaatggccacatctgttgctcagtggatccacagtgccttcaggaactgtgaagttaactgtctcatgggagatttctgttaaaagaatgttctttcattaaaagaccaaaaagaagttaaaacttaaattgggtgatttgtgggcagctaaatgcagctttgttaatagctgagtgaactttcaattatgaaatttgtggagcttgacaaaatcacaaaaggaaaattactggggcaaaattagacctcaagtctgcctctactgtgtctcacatcaccatgtagaagaatgggcgtacagtatataccgtgacatcctgaaccctggatagaaagcctgagcccattggatctgtg

SEQ ID NO: 158446 - DNA, 500 bp, Homo sapiens
  Payload ID: 11016
  Gene Symbol: NELL2
  Gene Name: neural EGFL like 2
  ENST ID: ENST00000551949
  CDS Start-End: 434-500
acttctttggatgctattttgaggatagactgaagggaatgatgatagcagggagaccagttaggatgatgacttagaccatggcagttgtgggtggagatggtaactgccagattctgtctatatattgagaagtagcaggcaggatgtactgagcaattggatgtgggatgtgagagaaatgactccaaggtttttggcctgagcaatcagaaggatccatctaacatttactgaaataaggaagatgctttattcaatctaaaagtgaaaaaagaaccttttagacattattattataaaatgtctataagaagacttctcattttaatcctcaaaatcactctggttatggattcctataagtgtatcctgttgaagtttgctgagctccttgaatctagggagacgatggactgagctgatccgcaccatggagtctcgggtcttactgagaacattctgtttgatcttcggtctcggagcagtttgggggcttg

SEQ ID NO: 158447 - DNA, 1053 bp, Homo sapiens
  Payload ID: 11016
  Gene Symbol: NELL2
  Gene Name: neural EGFL like 2
  ENST ID: ENST00000552993
  CDS Start-End: 91-1053
aaaccacatgtgaactgaagctgtcaggttccacaaaggcagaagtactctctgaaaagagggagacgatggactgagctgatccgcaccatggagtctcgggtcttactgagaacattctgtttgatcttcggtctcggagcagtttgggggcttggtgtggacccttccctacagattgacgtcttaacagagttagaacttggggagtccacgaccggagtgcgtcaggtcccggggctgcataatgggacgaaagcctttctctttcaagatactcccagaagcataaaagcatccactgctacagctgaacagttttttcagaagctgagaaataaacatgaatttactattttggtgaccctaaaacagacccacttaaattcaggagttattctctcaattcaccacttggatcacaggtacctggaactggaaagtagtggccatcggaatgaagtcagactgcattaccgctcaggcagtcaccgccctcacacagaagtgtttccttacattttggctgatgacaagtggcacaagctctccttagccatcagtgcttcccatttgattttacacattgactgcaataaaatttatgaaagggtagtagaaaagccctccacagacttgcctctaggcacaacattttggctaggacagagaaataatgcgcatggatattttaagggtataatgcaagatgtccaattacttgtcatgccccagggatttattgctcagtgcccagatcttaatcgcacctgtccaacttgcaatgacttccatggacttgtgcagaaaatcatggagctacaggatattttagccaaaacatcagccaagctgtctcgagctgaacagcgaatgaatagattggatcagtgctattgtgaaaggacttgcaccatgaagggaaccacctaccgagaatttgagtcctggatagacggctgtaagaactgcacatgcctgaatggaaccatccagtgtgaaactctaatctgcccaaatcctgactgcccacttaagtcggctcttgcgtat

SEQ ID NO: 158448 - DNA, 569 bp, Homo sapiens
  Payload ID: 11016
  Gene Symbol: NELL2
  Gene Name: neural EGFL like 2
  ENST ID: ENST00000553120
  CDS Start-End: 70-569
tcttcagttcccaatattgtcgcgaaaacgcggttctttgctgccctggaggaagagacttgcattttgatggagcttttcctttttctctctcccacctcatacccctcaccagtttgggggcttggtgtggacccttccctacagattgacgtcttaacagagttagaacttggggagtccacgaccggagtgcgtcaggtcccggggctgcataatgggacgaaagcctttctctttcaagatactcccagaagcataaaagcatccactgctacagctgaacagttttttcagaagctgagaaataaacatgaatttactattttggtgaccctaaaacagacccacttaaattcaggagttattctctcaattcaccacttggatcacaggtacctggaactggaaagtagtggccatcggaatgaagtcagactgcattaccgctcaggcagtcaccgccctcacacagaagtgtttccttacattttggctgatgacaagtggcacaagctctccttagccatcagtgcttcccatttgattttacacattgactgcaataa

SEQ ID NO: 158449 - DNA, 3036 bp, Homo sapiens
  Payload ID: 11016
  Gene Symbol: NELL2
  Gene Name: neural EGFL like 2
  Uniprot ID: Q99435
  ENST ID: ENST00000549027
  CDS Start-End: 190-2637
attgtctctgcctttacaacagagggagacgatggactgagctgatccgcaccatggagtctcgggtcttactgagaacattctgtttgatcttcggtctcggagcagaccgcgaggcggatcacgcccctagtccagggtcggagggctgagggggaactttgcagagagaagggtttaaaggaggtcatggaaacgggactgggtgctccgctatttaaagcttggctgctgatctcagtttgggggcttggtgtggacccttccctacagattgacgtcttaacagagttagaacttggggagtccacgaccggagtgcgtcaggtcccggggctgcataatgggacgaaagcctttctctttcaagatactcccagaagcataaaagcatccactgctacagctgaacagttttttcagaagctgagaaataaacatgaatttactattttggtgaccctaaaacagacccacttaaattcaggagttattctctcaattcaccacttggatcacaggtacctggaactggaaagtagtggccatcggaatgaagtcagactgcattaccgctcaggcagtcaccgccctcacacagaagtgtttccttacattttggctgatgacaagtggcacaagctctccttagccatcagtgcttcccatttgattttacacattgactgcaataaaatttatgaaagggtagtagaaaagccctccacagacttgcctctaggcacaacattttggctaggacagagaaataatgcgcatggatattttaagggtataatgcaagatgtccaattacttgtcatgccccagggatttattgctcagtgcccagatcttaatcgcacctgtccaacttgcaatgacttccatggacttgtgcagaaaatcatggagctacaggatattttagccaaaacatcagccaagctgtctcgagctgaacagcgaatgaatagattggatcagtgctattgtgaaaggacttgcaccatgaagggaaccacctaccgagaatttgagtcctggatagacggctgtaagaactgcacatgcctgaatggaaccatccagtgtgaaactctaatctgcccaaatcctgactgcccacttaagtcggctcttgcgtatgtggatggcaaatgctgtaaggaatgcaaatcgatatgccaatttcaaggacgaacctactttgaaggagaaagaaatacagtctattcctcttctggagtatgtgttctctatgagtgcaaggaccagaccatgaaacttgttgagagttcaggctgtccagctttggattgtccagagtctcatcagataaccttgtctcacagctgttgcaaagtttgtaaaggttatgacttttgttctgaaaggcataactgcatggagaattccatctgcagaaatctgaatgacagggctgtttgtagctgtcgagatggttttagggctcttcgagaggataatgcctactgtgaagacatcgatgagtgtgctgaagggcgccattactgtcgtgaaaatacaatgtgtgtcaacaccccgggttcttttatgtgcatctgcaaaactggatacatcagaattgatgattattcatgtacagaacatgatgagtgtatcacaaatcagcacaactgtgatgaaaatgctttatgcttcaacactgttggaggacacaactgtgtttgcaagccgggctatacagggaatggaacgacatgcaaagcattttgcaaagatggctgtaggaatggaggagcctgtattgccgctaatgtgtgtgcctgcccacaaggcttcactggacccagctgtgaaacggacattgatgaatgctctgatggttttgttcaatgtgacagtcgtgctaattgcattaacctgcctggatggtaccactgtgagtgcagagatggctaccatgacaatgggatgttttcaccaagtggagaatcgtgtgaagatattgatgagtgtgggaccgggaggcacagctgtgccaatgataccatttgcttcaatttggatggcggatatgattgtcgatgtcctcatggaaagaattgcacaggggactgcatccatgatggaaaagttaagcacaatggtcagatttgggtgttggaaaatgacaggtgctctgtgtgctcatgtcagaatggattcgttatgtgtcgacggatggtctgtgactgtgagaatcccacagttgatcttttttgctgccctgaatgtgacccaaggcttagtagtcagtgcctccatcaaaatggggaaactttgtataacagtggtgacacctgggtccagaattgtcaacagtgccgctgcttgcaaggggaagttgattgttggcccctgccttgcccagatgtggagtgtgaattcagcattctcccagagaatgagtgctgcccgcgctgtgtcacagacccttgccaggctgacaccatccgcaatgacatcaccaagacttgcctggacgaaatgaatgtggttcgcttcaccgggtcctcttggatcaaacatggcactgagtgtactctctgccagtgcaagaatggccacatctgttgctcagtggatccacagtgccttcaggaactgtgaagttaactgtctcatgggagatttctgttaaaagaatgttctttcattaaaagaccaaaaagaagttaaaacttaaattgggtgatttgtgggcagctaaatgcagctttgttaatagctgagtgaactttcaattatgaaatttgtggagcttgacaaaatcacaaaaggaaaattactggggcaaaattagacctcaagtctgcctctactgtgtctcacatcaccatgtagaagaatgggcgtacagtatataccgtgacatcctgaaccctggatagaaagcctgagcccattggatctgtgaaagcctctagcttcactggtgcagaaaattttcctctagatcagaatcttcaagaatcagttaggttcctcactgcaagaaataaaatgtca

SEQ ID NO: 158450 - DNA, 749 bp, Homo sapiens
  Payload ID: 11016
  Gene Symbol: NELL2
  Gene Name: neural EGFL like 2
  ENST ID: ENST00000550139
  CDS Start-End: 1-259
tgacaatgggatgttttcaccaagtggagaatcgtgtgaagatattgatgagtgtgggaccgggaggcacagctgtgccaatgataccatttgcttcaatttggatggcggatatgattgtcgatgtcctcatggaaagaattgcacaggggactgcatccatgatggaaaagttaagcacaatggtcagatttgggtgttggaaaatgacaggtgctctgtgtgctcatgtcaggttggtataaatgaaaaactttaattaattttattcagttgtaatttgcatatgttttaagtgtgtatatggcttgatgagttttgacaatgtgtacatccacttacctaccatcacaattaatataacagaacacttccattatcccaaatgttgcctatgttctttcctagttagtcccacaaccttagatccaggcaaaaactgcatccagtccctattgattaaatttgtattttctagagcctcatataaatggagttttatagtatatactatattgtgtctgacttcattctctcaacattatgtttttgagattcaatcctattgtacctatatctctaatccatttctttttaataccgaataatatttcattgtatggatataccaatgtatttatctatccacatgttgataaaattttattactaaccatgctaattttttcctagtcacagtatcatgtttgaatgactgcataaataaagtcagaatgaacatgctgtga

SEQ ID NO: 158451 - DNA, 736 bp, Homo sapiens
  Payload ID: 11016
  Gene Symbol: NELL2
  Gene Name: neural EGFL like 2
  ENST ID: ENST00000550313
  CDS Start-End: 1-736
cagccaagctgtctcgagctgaacagcgaatgaatagattggatcagtgctattgtgaaaggacttgcaccatgaagggaaccacctaccgagaatttgagtcctggatagacggctgtaagaactgcacatgcctgaatggaaccatccagtgtgaaactctaatctgcccaaatcctgactgcccacttaagtcggctcttgcgtatgtggatggcaaatgctcgatatgccaatttcaaggacgaacctactttgaaggagaaagaaatacagtctattcctcttctggagtatgtgttctctatgagtgcaaggaccagaccatgaaacttgttgagagttcaggctgtccagctttggattgtccagagtctcatcagataaccttgtctcacagctgttgcaaagtttgtaaaggttatgacttttgttctgaaaggcataactgcatggagaattccatctgcagaaatctgaatgacagggctgtttgtagctgtcgagatggttttagggctcttcgagaggataatgcctactgtgaagacatcgatgagtgtgctgaagggcgccattactgtcgtgaaaatacaatgtgtgtcaacaccccgggttcttttatgtgcatctgcaaaactggatacatcagaattgatgattattcatgtacagaacatgatgagtgtatcacaaatcagcacaactgtgatgaaaatgctttatgcttcaacac

SEQ ID NO: 158452 - DNA, 559 bp, Homo sapiens
  Payload ID: 11016
  Gene Symbol: NELL2
  Gene Name: neural EGFL like 2
  ENST ID: ENST00000548826
  CDS Start-End: 148-486
aaccaaagcgtattaatcctactgatcagtaaatccgaggcagcagcaggagagacaaacgttattttcccgcttgattccaagaacctcttcgatttttatttttatttttaaagagggagacgatggactgagctgatccgcaccatggagtctcgggtcttactgagaacattctgtttgatcttcggtctcggagcagtttgggggcttggtgtggacccttccctacagattgacgtcttaacagagttagaacttggggagtccacgaccggagtgcgtcaggtcccggggctgcataatgggacgaaagcctttctctttcaagatactcccagaagcataaaagcatccactgctacagctgaacagttttttcagaagctgagaaataaacatgaatttactattttggtgaccctaaaacagacccacttaaattcaggagttattctctcaattcaccacttggatcacaggtaaatgtggttgctggagtttcctgtgttttcattatatgtggttaaatgaatatattaaagagaagtaaacaaaa

SEQ ID NO: 158453 - DNA, 586 bp, Homo sapiens
  Payload ID: 11016
  Gene Symbol: NELL2
  Gene Name: neural EGFL like 2
  ENST ID: ENST00000548531
  CDS Start-End: 255-586
gagtggccgcagagctggggctggggaaagggatggctcccgcctcggggcagcatgggctggctggggaagcctcgcttttcccggacccaaagtaggtctggagtgggaagcttggagtaagggggcgggtttggatatggattttttttttttctgtgcttgccttggagaccgcgaggcggatcacgcccctagtccagggtcggagggctgagggggaactttgcagagagaagggtttaaaggaggtcatggaaacgggactgggtgctccgctatttaaagcttggctgctgatctcagtttgggggcttggtgtggacccttccctacagattgacgtcttaacagagttagaacttggggagtccacgaccggagtgcgtcaggtcccggggctgcataatgggacgaaagcctttctctttcaagatactcccagaagcataaaagcatccactgctacagctgaacagttttttcagaagctgagaaataaacatgaatttactattttggtgaccctaaaacagacccacttaaattcaggagttattctctcaattcaccacttggatcacag

SEQ ID NO: 158454 - DNA, 3148 bp, Homo sapiens
  Payload ID: 11016
  Gene Symbol: NELL2
  Gene Name: neural EGFL like 2
  ENST ID: ENST00000551601
  CDS Start-End: 190-2496
attgtctctgcctttacaacagagggagacgatggactgagctgatccgcaccatggagtctcgggtcttactgagaacattctgtttgatcttcggtctcggagcagaccgcgaggcggatcacgcccctagtccagggtcggagggctgagggggaactttgcagagagaagggtttaaaggaggtcatggaaacgggactgggtgctccgctatttaaagcttggctgctgatctcagtttgggggcttggtgtggacccttccctacagattgacgtcttaacagagttagaacttggggagtccacgaccggagtgcgtcaggtcccggggctgcataatgggacgaaagcctttctctttcaagatactcccagaagcataaaagcatccactgctacagctgaacagttttttcagaagctgagaaataaacatgaatttactattttggtgaccctaaaacagacccacttaaattcaggagttattctctcaattcaccacttggatcacaggtacctggaactggaaagtagtggccatcggaatgaagtcagactgcattaccgctcaggcagtcaccgccctcacacagaagtgtttccttacattttggctgatgacaagtggcacaagctctccttagccatcagtgcttcccatttgattttacacattgactgcaataaaatttatgaaagggtagtagaaaagccctccacagacttgcctctaggcacaacattttggctaggacagagaaataatgcgcatggatattttaagggtataatgcaagatgtccaattacttgtcatgccccagggatttattgctcagtgcccagatcttaatcgcacctgtccaacttgcaatgacttccatggacttgtgcagaaaatcatggagctacaggatattttagccaaaacatcagccaagctgtctcgagctgaacagcgaatgaatagattggatcagtgctattgtgaaaggacttgcaccatgaagggaaccacctaccgagaatttgagtcctggatagacggctgtaagaactgcacatgcctgaatggaaccatccagtgtgaaactctaatctgcccaaatcctgactgcccacttaagtcggctcttgcgtatgtggatggcaaatgctgtaaggaatgcaaatcgatatgccaatttcaaggacgaacctactttgaaggagaaagaaatacagtctattcctcttctggagtatgtgttctctatgagtgcaaggaccagaccatgaaacttgttgagagttcaggctgtccagctttggattgtccagagtctcatcagataaccttgtctcacagctgttgcaaagtttgtaaaggttatgacttttgttctgaaaggcataactgcatggagaattccatctgcagaaatctgaatgacagggctgtttgtagctgtcgagatggttttagggctcttcgagaggataatgcctactgtgaagacatcgatgagtgtgctgaagggcgccattactgtcgtgaaaatacaatgtgtgtcaacaccccgggttcttttatgtgcatctgcaaaactggatacatcagaattgatgattattcatgtacagaacatgatgagtgtatcacaaatcagcacaactgtgatgaaaatgctttatgcttcaacactgttggaggacacaactgtgtttgcaagccgggctatacagggaatggaacgacatgcaaagcattttgcaaagatggctgtaggaatggaggagcctgtattgccgctaatgtgtgtgcctgcccacaaggcttcactggacccagctgtgaaacggatattgatgagtgtgggaccgggaggcacagctgtgccaatgataccatttgcttcaatttggatggcggatatgattgtcgatgtcctcatggaaagaattgcacaggggactgcatccatgatggaaaagttaagcacaatggtcagatttgggtgttggaaaatgacaggtgctctgtgtgctcatgtcagaatggattcgttatgtgtcgacggatggtctgtgactgtgagaatcccacagttgatcttttttgctgccctgaatgtgacccaaggcttagtagtcagtgcctccatcaaaatggggaaactttgtataacagtggtgacacctgggtccagaattgtcaacagtgccgctgcttgcaaggggaagttgattgttggcccctgccttgcccagatgtggagtgtgaattcagcattctcccagagaatgagtgctgcccgcgctgtgtcacagacccttgccaggctgacaccatccgcaatgacatcaccaagacttgcctggacgaaatgaatgtggttcgcttcaccgggtcctcttggatcaaacatggcactgagtgtactctctgccagtgcaagaatggccacatctgttgctcagtggatccacagtgccttcaggaactgtgaagttaactgtctcatgggagatttctgttaaaagaatgttctttcattaaaagaccaaaaagaagttaaaacttaaattgggtgatttgtgggcagctaaatgcagctttgttaatagctgagtgaactttcaattatgaaatttgtggagcttgacaaaatcacaaaaggaaaattactggggcaaaattagacctcaagtctgcctctactgtgtctcacatcaccatgtagaagaatgggcgtacagtatataccgtgacatcctgaaccctggatagaaagcctgagcccattggatctgtgaaagcctctagcttcactggtgcagaaaattttcctctagatcagaatcttcaagaatcagttaggttcctcactgcaagaaataaaatgtcaggcagtgaatgaattatattttcagaagtaaagcaaagaagctataacatgttatgtacagtacactctgaaaagaaatctgaaacaagttattgtaatgataaaaataatgcacaggcatggttacttaatattttctaacaggaaaagtcatccctatttccttgttttactgcacttaatattatttggttgaatttgttcagtataagctcgttcttgtgcaaaattaaataaatatttctcttacctt

SEQ ID NO: 158455 - DNA, 451 bp, Homo sapiens
  Payload ID: 11016
  Gene Symbol: NELL2
  Gene Name: neural EGFL like 2
  ENST ID: ENST00000550462
  CDS Start-End: 1-369
tgtccaacttgcaatgacttccatggacttgtgcagaaaatcatggagctacaggatattttagccaaaacatcagccaagctgtctcgagctgaacagcgaatgaatagattggatcagtgctattgtgaaaggacttgcaccatgaagggaaccacctaccgagaatttgagtcctggatagacggctgtaagaactgcacatgcctgaatggaaccatccagtgtgaaactctaatctgcccaaatcctgactgcccacttaagtcggctcttgcgtatgtggatggcaaatgctgtaaggaatgcaaatgtgagcataacttttatgatgaatactttctttggaaaaataaagcactgtattaataagtattcacccatcattggtttaatctgggcaagctaaatagctttcagaagtgatggaataaaggaagaatactttctc

SEQ ID NO: 158456 - DNA, 4046 bp, Homo sapiens
  Payload ID: 11017
  Gene Symbol: NEDD1
  Gene Name: neural precursor cell expressed, developmentally down-regulated 1
  Uniprot ID: Q8NHV4
  ENST ID: ENST00000266742
  CDS Start-End: 340-2322
gaagtttaacagtccaggcgggagccggaagcccagcgcggagccggccgcggccccctgttgtgttgctgcggagaggtacttggatgcattttacaggttagcctcacttgagctgttgtcctgcaagtaaagtgtatttttggtgattgaaagttggagaactttcatttcagctgagtggtgtagttgaattggttcctgtagccgctgtccctaaacccaggccgacgttaccgccttgtgtcctgactgctagctttcgacgggaccgtctttgagggactcatgtaaagtctctcccttaatgctcagttcttagaagaccgaggcgcagtcatgcaggaaaacctcagatttgcttcatcaggagatgatattaaaatatgggatgcttcatctatgacattggtggataaattcaacccacacacatcaccacatggaatcagctcaatatgttggagcagcaataataactttttagtaacagcatcttccagtggcgacaaaatagttgtctcaagttgcaaatgtaaacctgttccacttttagagcttgctgaagggcaaaagcagacatgtgtcaatttaaattctacatctatgtatttggtaagcggaggcctaaataacactgttaatatttgggatttaaaatcaaaaagagttcatcgatctcttaaggatcataaagatcaagtaacttgtgtaacatacaattggaatgattgctacattgcttctggatctcttagtggtgaaattattttacacagtgtaaccactaatttatctagtactccttttggccatggtagtaaccagtctgttcggcacttgaagtactccttgtttaagaaatcactactgggcagtgtttcggataatggaatagtaactctctgggatgtaaatagtcagagtccataccataactttgacagtgtacacaaagctccagcgtcaggcatctgtttttctcctgtcaatgaattgctctttgtaaccataggcttggataaaagaatcatcctctatgacacttcaagtaagaagctagtgaaaactttagtggctgacactcctctaactgcggtagatttcatgcctgatggagccactttggctattggatcttcccgggggaaaatatatcaatatgatttaagaatgttgaaatcaccagttaagaccatcagtgctcacaagacatctgtgcagtgtatagcatttcagtactccactgttcttactaagtcaagtttaaataaaggctgttcaaataagcccacaacagtgaacaaacgaagtgttaatgtgaatgctgctagtggaggagttcagaattccggaattgtcagagaagcacctgccacgtccattgccacagttctaccacaacctatgacatcagctatggggaaaggaacagttgctgttcaagaaaaagcaggtttgcctcgaagcataaacacagacactttatctaaggaaacagacagtggaaaaaatcaggatttctccagctttgatgatactgggaaaagtagtttaggtgacatgttctcacctatcagagatgatgctgtagttaacaagggaagtgatgagtccataggcaaaggagatggctttgactttctaccgcagttgaactcagtgtttcctccaagaaaaaatccagtaacttcaagtacttcagtattgcattctagtcctcttaatgtttttatgggatctccagggaaagaggaaaatgaaaaccgtgatctaacagctgagtctaagaaaatatatatgggaaaacaggaatctaaagactccttcaaacagttagcaaagttggtcacatctggtgctgaaagtggaaatctaaatacctctccatcatctaaccaaacaagaaattctgagaaatttgaaaagccagagaatgaaattgaagcccagttgatatgtgaacccccaatcaatggatcctcaactccaaatccaaagatagcatcttctgtcactgctggagttgccagttcactctcagaaaaaatagccgacagcattggaaataaccggcaaaatgcaccattgacttccattcaaattcgttttattcagaacatgatacaggaaacgttggatgactttagagaagcatgccatagggacattgtgaatttgcaagtggagatgattaaacagtttcatatgcaactgaatgaaatgcattctttgctggaaagatactcagtgaatgaaggtttagtggctgaaattgaaagactacgagaagaaaacaaaagattacgggcccacttttgaaatttcagtgaataccttaatgttctgtaatttgggaagtttctggcaacacagaactacatagaatcagtattgttttcatggcctccagggaaaaaatgtttttcaagtaagagtaaaaggatgatgggattttataccaacaactgtttcatcttaaaaatatgtatatttttatattaaaaattgtacagtatgtcatctacccaataggaaagtcaacaggatctttattttttgaaagctttagccatccactaagtgccctttttcataagagaagaaaattgtgcataaaaattggttatgtttgttttttagtcatcttttttaacatatatttttgattgacaaattgcctttcaaatttttggggctagttgagatttaaagagtttgatatgccttctatttttatggagaaagtaattttaaaatggcaattggtgtttctaagccattgactaataaaacatagggttggctagtaattattttgttaacttgatgaagtcaagtatgactattatttattgtacatttgataagacaatttttggaattttgaattgcacaaattacatgatatcttttgcatttatgttactatattgtacttctgacaaatctttattcctgggtggtatttttaagatatctttacctataaaaaatgtttaaggttcataggactcgacaagagctatctggtgattttctcattagtaacatgcaacgttgtactgcaaaatttcaatcaacatgacaacttataatgagtggagatttcatattaggtactaaatattatagtattatttctattttctttttccaaataagaagcttggattattttattttgtggtctttatcattaactttaattctttctgtactgtgtataatatttttatattattggccttaccataaaattatttagaaaggttgtcaaaataagttatacctctttggcaatagatagatgtatacatctacctactatgatctacaattttaggttaagtgaagcttgggggggctactgacttggttaccttcttgtctcttgtcccaaagatttaaactgtgtacctttgtatagctcttctgccccattttgacttctgagatgaaagtatttactaaaattaaaaaaaaaaaaacaaaaaacaaacctttagctcactaactttatgggtttctgaagtgatggaaatttttaaggatatatttaataagcataaacttactaataattacttccaaaaataaaaacaggaatattacttttacccagtgtggtttatagcatacatttgtactgaagcatatagggatgttaatgtgatcttttcctgacagattatgaaagcattatgacttgtaacaagtttccttgtatatcactaacaggtttagaagacataaatattagtgtgttttgcctacatggtgtatttaaatctattaatattttcctgttgcttttttaaaaaaataaatacacataatgtatattaaaagaggtgggatgaaataattttagtaattatgtgtacagatgaaacatttttgtcatggaatttaaaagctaagtaagtataaaaaataaaatgttatatgcaaaaaataggaaacatgaaattgaaatttcattgttggccaaaatgatatgagagatttaccttcccacctgaaattaaaaaagaaaatatgtg

SEQ ID NO: 158457 - DNA, 3366 bp, Homo sapiens
  Payload ID: 11017
  Gene Symbol: NEDD1
  Gene Name: neural precursor cell expressed, developmentally down-regulated 1
  Uniprot ID: Q8NHV4
  ENST ID: ENST00000429527
  CDS Start-End: 86-2068
aagtttaacagtccaggcgggagccggaagcccagcgcggagccggccgcggccccctgttgtgttgctgcggagaggcgcagtcatgcaggaaaacctcagatttgcttcatcaggagatgatattaaaatatgggatgcttcatctatgacattggtggataaattcaacccacacacatcaccacatggaatcagctcaatatgttggagcagcaataataactttttagtaacagcatcttccagtggcgacaaaatagttgtctcaagttgcaaatgtaaacctgttccacttttagagcttgctgaagggcaaaagcagacatgtgtcaatttaaattctacatctatgtatttggtaagcggaggcctaaataacactgttaatatttgggatttaaaatcaaaaagagttcatcgatctcttaaggatcataaagatcaagtaacttgtgtaacatacaattggaatgattgctacattgcttctggatctcttagtggtgaaattattttacacagtgtaaccactaatttatctagtactccttttggccatggtagtaaccagtctgttcggcacttgaagtactccttgtttaagaaatcactactgggcagtgtttcggataatggaatagtaactctctgggatgtaaatagtcagagtccataccataactttgacagtgtacacaaagctccagcgtcaggcatctgtttttctcctgtcaatgaattgctctttgtaaccataggcttggataaaagaatcatcctctatgacacttcaagtaagaagctagtgaaaactttagtggctgacactcctctaactgcggtagatttcatgcctgatggagccactttggctattggatcttcccgggggaaaatatatcaatatgatttaagaatgttgaaatcaccagttaagaccatcagtgctcacaagacatctgtgcagtgtatagcatttcagtactccactgttcttactaagtcaagtttaaataaaggctgttcaaataagcccacaacagtgaacaaacgaagtgttaatgtgaatgctgctagtggaggagttcagaattccggaattgtcagagaagcacctgccacgtccattgccacagttctaccacaacctatgacatcagctatggggaaaggaacagttgctgttcaagaaaaagcaggtttgcctcgaagcataaacacagacactttatctaaggaaacagacagtggaaaaaatcaggatttctccagctttgatgatactgggaaaagtagtttaggtgacatgttctcacctatcagagatgatgctgtagttaacaagggaagtgatgagtccataggcaaaggagatggctttgactttctaccgcagttgaactcagtgtttcctccaagaaaaaatccagtaacttcaagtacttcagtattgcattctagtcctcttaatgtttttatgggatctccagggaaagaggaaaatgaaaaccgtgatctaacagctgagtctaagaaaatatatatgggaaaacaggaatctaaagactccttcaaacagttagcaaagttggtcacatctggtgctgaaagtggaaatctaaatacctctccatcatctaaccaaacaagaaattctgagaaatttgaaaagccagagaatgaaattgaagcccagttgatatgtgaacccccaatcaatggatcctcaactccaaatccaaagatagcatcttctgtcactgctggagttgccagttcactctcagaaaaaatagccgacagcattggaaataaccggcaaaatgcaccattgacttccattcaaattcgttttattcagaacatgatacaggaaacgttggatgactttagagaagcatgccatagggacattgtgaatttgcaagtggagatgattaaacagtttcatatgcaactgaatgaaatgcattctttgctggaaagatactcagtgaatgaaggtttagtggctgaaattgaaagactacgagaagaaaacaaaagattacgggcccacttttgaaatttcagtgaataccttaatgttctgtaatttgggaagtttctggcaacacagaactacatagaatcagtattgttttcatggcctccagggaaaaaatgtttttcaagtaagagtaaaaggatgatgggattttataccaacaactgtttcatcttaaaaatatgtatatttttatattaaaaattgtacagtatgtcatctacccaataggaaagtcaacaggatctttattttttgaaagctttagccatccactaagtgccctttttcataagagaagaaaattgtgcataaaaattggttatgtttgttttttagtcatcttttttaacatatatttttgattgacaaattgcctttcaaatttttggggctagttgagatttaaagagtttgatatgccttctatttttatggagaaagtaattttaaaatggcaattggtgtttctaagccattgactaataaaacatagggttggctagtaattattttgttaacttgatgaagtcaagtatgactattatttattgtacatttgataagacaatttttggaattttgaattgcacaaattacatgatatcttttgcatttatgttactatattgtacttctgacaaatctttattcctgggtggtatttttaagatatctttacctataaaaaatgtttaaggttcataggactcgacaagagctatctggtgattttctcattagtaacatgcaacgttgtactgcaaaatttcaatcaacatgacaacttataatgagtggagatttcatattaggtactaaatattatagtattatttctattttctttttccaaataagaagcttggattattttattttgtggtctttatcattaactttaattctttctgtactgtgtataatatttttatattattggccttaccataaaattatttagaaaggttgtcaaaataagttatacctctttggcaatagatagatgtatacatctacctactatgatctacaattttaggttaagtgaagcttgggggggctactgacttggttaccttcttgtctcttgtcccaaagatttaaactgtgtacctttgtatagctcttctgccccattttgacttctgagatgaaagtatttactaaaattaaaaaaaaaaaaacaaaaaacaaacctttagctcactaactttatgggtttctgaagtgatggaaatttttaaggatatatttaataagcataaacttactaataattacttccaaaaataaaaacaggaatattactttta

SEQ ID NO: 158458 - DNA, 3162 bp, Homo sapiens
  Payload ID: 11017
  Gene Symbol: NEDD1
  Gene Name: neural precursor cell expressed, developmentally down-regulated 1
  Uniprot ID: Q8NHV4
  ENST ID: ENST00000457368
  CDS Start-End: 279-1994
aatgtgagccatttttgaaagctactctgtaagctatactcattgcttgtcttcttagtgtgttagcttttataatcgcaattcttataatagtctagtgctatagatgttcatggattgtttgatgctccataactcctcatttagataactttttagtaacagcatcttccagtggcgacaaaatagttgtctcaagttgcaaatgtaaacctgttccacttttagagcttgctgaagggcaaaagcagacatgtgtcaatttaaattctacatctatgtatttggtaagcggaggcctaaataacactgttaatatttgggatttaaaatcaaaaagagttcatcgatctcttaaggatcataaagatcaagtaacttgtgtaacatacaattggaatgattgctacattgcttctggatctcttagtggtgaaattattttacacagtgtaaccactaatttatctagtactccttttggccatggtagtaaccagtctgttcggcacttgaagtactccttgtttaagaaatcactactgggcagtgtttcggataatggaatagtaactctctgggatgtaaatagtcagagtccataccataactttgacagtgtacacaaagctccagcgtcaggcatctgtttttctcctgtcaatgaattgctctttgtaaccataggcttggataaaagaatcatcctctatgacacttcaagtaagaagctagtgaaaactttagtggctgacactcctctaactgcggtagatttcatgcctgatggagccactttggctattggatcttcccgggggaaaatatatcaatatgatttaagaatgttgaaatcaccagttaagaccatcagtgctcacaagacatctgtgcagtgtatagcatttcagtactccactgttcttactaagtcaagtttaaataaaggctgttcaaataagcccacaacagtgaacaaacgaagtgttaatgtgaatgctgctagtggaggagttcagaattccggaattgtcagagaagcacctgccacgtccattgccacagttctaccacaacctatgacatcagctatggggaaaggaacagttgctgttcaagaaaaagcaggtttgcctcgaagcataaacacagacactttatctaaggaaacagacagtggaaaaaatcaggatttctccagctttgatgatactgggaaaagtagtttaggtgacatgttctcacctatcagagatgatgctgtagttaacaagggaagtgatgagtccataggcaaaggagatggctttgactttctaccgcagttgaactcagtgtttcctccaagaaaaaatccagtaacttcaagtacttcagtattgcattctagtcctcttaatgtttttatgggatctccagggaaagaggaaaatgaaaaccgtgatctaacagctgagtctaagaaaatatatatgggaaaacaggaatctaaagactccttcaaacagttagcaaagttggtcacatctggtgctgaaagtggaaatctaaatacctctccatcatctaaccaaacaagaaattctgagaaatttgaaaagccagagaatgaaattgaagcccagttgatatgtgaacccccaatcaatggatcctcaactccaaatccaaagatagcatcttctgtcactgctggagttgccagttcactctcagaaaaaatagccgacagcattggaaataaccggcaaaatgcaccattgacttccattcaaattcgttttattcagaacatgatacaggaaacgttggatgactttagagaagcatgccatagggacattgtgaatttgcaagtggagatgattaaacagtttcatatgcaactgaatgaaatgcattctttgctggaaagatactcagtgaatgaaggtttagtggctgaaattgaaagactacgagaagaaaacaaaagattacgggcccacttttgaaatttcagtgaataccttaatgttctgtaatttgggaagtttctggcaacacagaactacatagaatcagtattgttttcatggcctccagggaaaaaatgtttttcaagtaagagtaaaaggatgatgggattttataccaacaactgtttcatcttaaaaatatgtatatttttatattaaaaattgtacagtatgtcatctacccaataggaaagtcaacaggatctttattttttgaaagctttagccatccactaagtgccctttttcataagagaagaaaattgtgcataaaaattggttatgtttgttttttagtcatcttttttaacatatatttttgattgacaaattgcctttcaaatttttggggctagttgagatttaaagagtttgatatgccttctatttttatggagaaagtaattttaaaatggcaattggtgtttctaagccattgactaataaaacatagggttggctagtaattattttgttaacttgatgaagtcaagtatgactattatttattgtacatttgataagacaatttttggaattttgaattgcacaaattacatgatatcttttgcatttatgttactatattgtacttctgacaaatctttattcctgggtggtatttttaagatatctttacctataaaaaatgtttaaggttcataggactcgacaagagctatctggtgattttctcattagtaacatgcaacgttgtactgcaaaatttcaatcaacatgacaacttataatgagtggagatttcatattaggtactaaatattatagtattatttctattttctttttccaaataagaagcttggattattttattttgtggtctttatcattaactttaattctttctgtactgtgtataatatttttatattattggccttaccataaaattatttagaaaggttgtcaaaataagttatacctctttggcaatagatagatgtatacatctacctactatgatctacaattttaggttaagtgaagcttgggggggctactgacttggttaccttcttgtctcttgtcccaaagatttaaactgtgtacctttgtatagctcttctgccccattttgacttctgagatgaaagtatttactaaaattaaaaaaaaaaaa

SEQ ID NO: 158459 - DNA, 2490 bp, Homo sapiens
  Payload ID: 11017
  Gene Symbol: NEDD1
  Gene Name: neural precursor cell expressed, developmentally down-regulated 1
  Uniprot ID: Q8NHV4
  ENST ID: ENST00000411739
  CDS Start-End: 353-2068
aggcgggagccggaagcccagcgcggagccggccgcggccccctgttgtgttgctgcggagaggtacttggatgcattttacaggttagcctcacttgagctgttgtcctgcaagtaaagtgtatttttggtgattgaaagttggagaactttcatttcagctgagtggtgtagttgaattggttcctgtagccgctgtccctaaacccaggccgacgttaccgccttgtgtcctgactgctagctttcgacgggaccgtctttgagggactcatgtaaagtctctcccttaatgctcagttcttagaagaccgagcaaaagcagacatgtgtcaatttaaattctacatctatgtatttggtaagcggaggcctaaataacactgttaatatttgggatttaaaatcaaaaagagttcatcgatctcttaaggatcataaagatcaagtaacttgtgtaacatacaattggaatgattgctacattgcttctggatctcttagtggtgaaattattttacacagtgtaaccactaatttatctagtactccttttggccatggtagtaaccagtctgttcggcacttgaagtactccttgtttaagaaatcactactgggcagtgtttcggataatggaatagtaactctctgggatgtaaatagtcagagtccataccataactttgacagtgtacacaaagctccagcgtcaggcatctgtttttctcctgtcaatgaattgctctttgtaaccataggcttggataaaagaatcatcctctatgacacttcaagtaagaagctagtgaaaactttagtggctgacactcctctaactgcggtagatttcatgcctgatggagccactttggctattggatcttcccgggggaaaatatatcaatatgatttaagaatgttgaaatcaccagttaagaccatcagtgctcacaagacatctgtgcagtgtatagcatttcagtactccactgttcttactaagtcaagtttaaataaaggctgttcaaataagcccacaacagtgaacaaacgaagtgttaatgtgaatgctgctagtggaggagttcagaattccggaattgtcagagaagcacctgccacgtccattgccacagttctaccacaacctatgacatcagctatggggaaaggaacagttgctgttcaagaaaaagcaggtttgcctcgaagcataaacacagacactttatctaaggaaacagacagtggaaaaaatcaggatttctccagctttgatgatactgggaaaagtagtttaggtgacatgttctcacctatcagagatgatgctgtagttaacaagggaagtgatgagtccataggcaaaggagatggctttgactttctaccgcagttgaactcagtgtttcctccaagaaaaaatccagtaacttcaagtacttcagtattgcattctagtcctcttaatgtttttatgggatctccagggaaagaggaaaatgaaaaccgtgatctaacagctgagtctaagaaaatatatatgggaaaacaggaatctaaagactccttcaaacagttagcaaagttggtcacatctggtgctgaaagtggaaatctaaatacctctccatcatctaaccaaacaagaaattctgagaaatttgaaaagccagagaatgaaattgaagcccagttgatatgtgaacccccaatcaatggatcctcaactccaaatccaaagatagcatcttctgtcactgctggagttgccagttcactctcagaaaaaatagccgacagcattggaaataaccggcaaaatgcaccattgacttccattcaaattcgttttattcagaacatgatacaggaaacgttggatgactttagagaagcatgccatagggacattgtgaatttgcaagtggagatgattaaacagtttcatatgcaactgaatgaaatgcattctttgctggaaagatactcagtgaatgaaggtttagtggctgaaattgaaagactacgagaagaaaacaaaagattacgggcccacttttgaaatttcagtgaataccttaatgttctgtaatttgggaagtttctggcaacacagaactacatagaatcagtattgttttcatggcctccagggaaaaaatgtttttcaagtaagagtaaaaggatgatgggattttataccaacaactgtttcatcttaaaaatatgtatatttttatattaaaaattgtacagtatgtcatctacccaataggaaagtcaacaggatctttattttttgaaagctttagccatccactaagtgccctttttcataagagaagaaaattgtgcataaaaattggttatgtttgttttttagtcatcttttttaacatatatttttgattgacaaattgcctttcaaatttttggggctagttgagatttaaagagtttgatatgccttctatttttatggag

SEQ ID NO: 158460 - DNA, 554 bp, Homo sapiens
  Payload ID: 11017
  Gene Symbol: NEDD1
  Gene Name: neural precursor cell expressed, developmentally down-regulated 1
  ENST ID: ENST00000557092
  CDS Start-End: 253-554
agtccaggcgggagccggaagcccagcgcggagccggccgcggccccctgttgtgttgctgcggagaggtacttggatgcattttacagctgagtggtgtagttgaattggttcctgtagccgctgtccctaaacccaggccgacgttaccgccttgtgtcctgactgctagctttcgacgggaccgtctttgagggactcatgtaaagtctctcccttaatgctcagttcttagaagaccgaggcgcagtcatgcaggaaaacctcagatttgcttcatcaggagatgatattaaaatatgggatgcttcatctatgacattggtggataaattcaacccacacacatcaccacatggaatcagctcaatatgttggagcagcaataataactttttagtaacagcatcttccagtggcgacaaaatagttgtctcaagttgcaaatgtaaacctgttccacttttagagcttgctgaagggcaaaagcagacatgtgtcaatttaaattctacatctatgtatttggtaagcggaggcctaaataacactgt

SEQ ID NO: 158461 - DNA, 565 bp, Homo sapiens
  Payload ID: 11017
  Gene Symbol: NEDD1
  Gene Name: neural precursor cell expressed, developmentally down-regulated 1
  ENST ID: ENST00000555806
  CDS Start-End: 126-371
agtccaggcgggagccggaagcccagcgcggagccggccgcggccccctgttgtgttgctgcggagaggtacttggatgcattttacagcaaaagcagacatgtgtcaatttaaattctacatctatgtatttggtaagcggaggcctaaataacactgttaatatttgggatttaaaatcaaaaagagttcatcgatctcttaaggatcataaagatcaagtaacttgtgtaacatacaattggaatgattgctacattgcttctggatctcttagtggtgaaattattttacacagtgtaaccactaatttatctagtactccttttggccatggtagtaaccaggctctccaatccagtgttgaatagaagtgatgatagtggacatctttattttgtccccaaattctggaagaagcattcaatttactaccaagcatgatagtcattgtaaggctagtgaaaactttagtggctgacactcctctaactgcggtagatttcatgcctgatggagccactttggctattggatcttcccgggggaaaatatatcaatatga

SEQ ID NO: 158462 - DNA, 582 bp, Homo sapiens
  Payload ID: 11017
  Gene Symbol: NEDD1
  Gene Name: neural precursor cell expressed, developmentally down-regulated 1
  ENST ID: ENST00000554226
  CDS Start-End: 80-582
aacagtccaggcgggagccggaagcccagcgcggagccggccgcggccccctgttgtgttgctgcggagaggtacttggatgcattttacaggcgcagtcatgcaggaaaacctcagatttgcttcatcaggagatgatattaaaatatgggatgcttcatctatgacattggtggataaattcaacccacacacatcaccacatggaatcagctcaatatgttggagcagcaataataactttttagtaacagcatcttccagtggcgacaaaatagttgtctcaagttgcaaatgtaaacctgttccacttttagagcttgctgaagggcaaaagcagacatgtgtcaatttaaattctacatctatgtatttggtaagcggaggcctaaataacactgttaatatttgggatttaaaatcaaaaagagttcatcgatctcttaaggatcataaagatcaagtaacttgtgtaacatacaattggaatgattgctacattgcttctggatctcttagtggtgaaattattttacacagtgtaaccactaatttatctagtactccttttggccatggtag

SEQ ID NO: 158463 - DNA, 2367 bp, Homo sapiens
  Payload ID: 11017
  Gene Symbol: NEDD1
  Gene Name: neural precursor cell expressed, developmentally down-regulated 1
  Uniprot ID: Q8NHV4
  ENST ID: ENST00000557644
  CDS Start-End: 147-2150
gggaagtgtccggggaggcgcgggccggggtcgcgcacctcccggagccttgtggggtgtgctgcctccgaaaagtttgcctcgtctccacaagtctgtctccttttttgtcaacctcaagtacttttcttttggcaggtacttggatgcattttacaggcgcagtcatgcaggaaaacctcagatttgcttcatcaggagatgatattaaaatatgggatgcttcatctatgacattggtggataaattcaacccacacacatcaccacatggaatcagctcaatatgttggagcagcaataataactttttagtaacagcatcttccagtggcgacaaaatagttgtctcaagttgcaaatgtaaacctgttccacttttagagcttgctgaagggcaaaagcagacatgtgtcaatttaaattctacatctatgtatttggtaagcggaggcctaaataacactgttaatatttgggatttaaaatcaaaaagagttcatcgatctcttaaggatcataaagatcaagtaacttgtgtaacatacaattggaatgattgctacattgcttctggatctcttagtggtgaaattattttacacagtgtaaccactaatttatctagtactccttttggccatggtagtaaccagtctgttcggcacttgaagtactccttgtttaagaaatcactactgggcagtgtttcggataatggaatagtaactctctgggatgtaaatagtcagagtccataccataactttgacagtgtacacaaagctccagcgtcaggcatctgtttttctcctgtcaatgaattgctctttgtaaccataggcttggataaaagaatcatcctctatgacacttcaagtaagaagctagtgaaaactttagtggctgacactcctctaactgcggtagatttcatgcctgatggagccactttggctattggatcttcccgggggaaaatatatcaatatgatttaagaatgttgaaatcaccagttaagaccatcagtgctcacaagacatctgtgcagtgtatagcatttcagtactccactgttcttactaagtcaagtttaaataaaggctgttcaaataagcccacaacagtgaacaaacgaagtgttaatgtgaatgctgctagtggaggagttcagaattccggaattgtcagagaagcacctgccacgtccattgccacagttctaccacaacctatgacatcagctatggggaaaggaacagttgctgttcaagaaaaagcaggtttgcctcgaagcataaacacagacactttatctaaggaaacagacagtggaaaaaatcaggatttctccagctttgatgatactgggaaaagtagtttaggtgacatgttctcacctatcagagatgatgctgtagttaacaagggaagtgatgagtccataggcaaaggagatggctttgactttctaccgcagttgaactcagtgtttcctccaagaaaaaatccagtaacttcaagtacttcagtattgcattctagtcctcttaatgtttttatgggatctccagggaaagaggaaaatgaaaaccgtgatctaacagctgagtctaagaaaatatatatgggaaaacaggaatctaaagactccttcaaacagttagcaaagttggtcacatctggtgctgaaagtggaaatctaaatacctctccatcatctaaccaaacaagaaattctgagaaatttgaaaagccagagaatgaaattgaagcccagttgatatgtgaacccccaatcaatggatcctcaactccaaatccaaagatagcatcttctgtcactgctggagttgccagttcactctcagaaaaaatagccgacagcattggaaataaccggcaaaatgcaccattgacttccattcaaattcgttttattcagaacatgatacaggaaacgttggatgactttagagaagcatgccatagggacattgtgaatttgcaagtggagatgattaaacagtttcatatgcaactgaatgaaatgcattctttgctggaaagatactcagtgaatgaaggtttagtggctgaaattgaaagactacgagaagaaaacaaaagattacgggcccacttttgaaatttcagtgaataccttaatgttctgtaatttgggaagtttctggcaacacagaactacatagaatcagtattgttttcatggcctccagggaaaaaatgtttttcaagtaagagtaaaaggatgatgggattttataccaacaactgtttcatcttaaaaatatgtatatttttatattaaaaattgtacagtatgtcatctacccaataggaaa

SEQ ID NO: 158464 - DNA, 581 bp, Homo sapiens
  Payload ID: 11017
  Gene Symbol: NEDD1
  Gene Name: neural precursor cell expressed, developmentally down-regulated 1
  ENST ID: ENST00000553609
  CDS Start-End: 102-581
agcgcggagccggccgcggccccctgttgtgttgctgcggagaggtacttggatgcattttacagcaaaagcagacatgtgtcaatttaaattctacatctatgtatttggtaagcggaggcctaaataacactgttaatatttgggatttaaaatcaaaaagagttcatcgatctcttaaggatcataaagatcaagtaacttgtgtaacatacaattggaatgattgctacattgcttctggatctcttagtggtgaaattattttacacagtgtaaccactaatttatctagtactccttttggccatggtagtaaccagtctgttcggcacttgaagtactccttgtttaagaaatcactactgggcagtgtttcggataatggaatagtaactctctgggatgtaaatagtcagagtccataccataactttgacagtgtacacaaagctccagcgtcaggcatctgtttttctcctgtcaatgaattgctctttgtaaccataggcttggataaaagaatcatcctctatgacacttcaagtaagaagctagtgaaaactttagtggctgacact

SEQ ID NO: 158465 - DNA, 595 bp, Homo sapiens
  Payload ID: 11017
  Gene Symbol: NEDD1
  Gene Name: neural precursor cell expressed, developmentally down-regulated 1
  ENST ID: ENST00000557478
  CDS Start-End: 102-595
aacagtccaggcgggagccggaagcccagcgcggagccggccgcggccccctgttgtgttgctgcggagaggtgaggttccggaggccctgaggcgcagtcatgcaggaaaacctcagatttgcttcatcaggagatgatattaaaatatgggatgcttcatctatgacattggtggataaattcaacccacacacatcaccacatggaatcagctcaatatgttggagcagcaataataactttttagtaacagcatcttccagtggcgacaaaatagttgtctcaagttgcaaatgtaaacctgttccacttttagagcttgctgaagggcaaaagcagacatgtgtcaatttaaattctacatctatgtatttggtaagcggaggcctaaataacactgttaatatttgggatttaaaatcaaaaagagttcatcgatctcttaaggatcataaagatcaagtaacttgtgtaacatacaattggaatgattgctacattgcttctggatctcttagtggtgaaattattttacacagtgtaaccactaatttatctagtactccttttggccatggtagtaaccagtctgt

SEQ ID NO: 158466 - DNA, 7019 bp, Homo sapiens
  Payload ID: 11018
  Gene Symbol: NEDD4
  Gene Name: neural precursor cell expressed, developmentally down-regulated 4, E3 ubiquitin protein ligase
  Uniprot ID: P46934
  ENST ID: ENST00000338963
  CDS Start-End: 301-4044
gctgcagctgagctcagcttaaaggtcgctggaaatcaagtgctttgtaagtgaaggcattttgactacaagcgattcaagacattttggaaacgtcagtctctggaatgggtcgtctttttctttctatgatatctggtatctaatgttttacttaggataaagactactacttaatagctcttttaggcaccacaaatgattttttcttttgatgcagtgcagctgcttctagcctgtctacggacagagatctttgttatgactttcagcccttaacatgtttggaaatgagaacaaatggcacaaagcttacgattgcactttgcagccagaagaagcaatacttaccctttgtcagaaacctccggagatgacttggatagccatgttcacatgtgcttcaaaagaccaacacggatttcaacgtctaacgttgttcaaatgaagctgactcccagacagactgcactagctccgttaataaaggaaaacgttcagtctcaagaaagatcatctgttccctcatctgaaaatgttaataaaaagagcagctgtctacagatttcactacagccaacaaggtacagtggatatcttcagtctagcaatgtcttagctgatagtgatgatgcttcgtttacttgtatcttgaaggatggtatttacagtagtgctgtggtcgataatgaattgaatgctgtgaatgatggtcaccttgtaagcagtccagccatttgtagtggtagccttagtaacttttcaaccagtgataatgggtcttacagcagcaacggtagtgattttgggtcatgtgcaagtatcacaagtggaggttcatatactaacagtgtcatcagtgacagtagtagttatacttttccaccaagtgatgatacttttttgggtggaaacttaccttctgacagcacctccaatagaagtgtgccaaacaggaatactactccttgtgaaattttttcaagaagtacaagtacagatccttttgtccaggatgacttggaacatggattagagattatgaaattgccagtgagcaggaacacaaaaattccactaaaacgttactcctccttagtcatttttcctaggagtccttcaactacccgaccgacttctccaacaagtctgtgtactcttctgagcaaaggatcctatcaaacttcacaccagtttattatttctcctagtgaaattgcacataatgaggatggcactagtgctaaaggatttctttcaacagctgtcaatggacttcggttatctaaaacaatttgtacccccggagaagtaagagacatacggccgcttcacaggaagggctcgttacagaagaaaattgttctttcgaataatactcccagacagactgtctgtgaaaagtcatctgaaggatattcttgtgtttcagtgcatttcacccaacgaaaagcagctacattagactgtgaaacaacaaatggtgattgtaaaccagaaatgtcagaaattaagcttaattctgattcagagtatattaagctcatgcataggacatctgcatgtttgccatcctcccaaaatgtagattgtcaaataaatatcaatggagaattggaaagaccacattcacagatgaacaaaaaccatggtattttacgaagaagtatttcattgggaggagcttatccaaatatttcctgtctatccagccttaagcacaattgttctaaagggggaccatctcagttactcataaagtttgcatctggaaatgaaggtaaagtggataatttatcaagagacagcaacagagattgcacaaatgaactgtctaattcttgcaagcctggctgggttgttttggaccaaccagatgctgcttgccatttgcagcaacaacaagaaccttctcctctacctccagggtgggaagagaggcaggatatccttggaaggacctattatgtaaaccatgaatctagaagaacacagtggaaaagaccaacccctcaggacaacctaacagatgctgagaatggcaacattcaactgcaagcacaacgtgcatttaccaccaggcggcagatatccgaggaaacagaaagtgttgacaaccgagagtcttccgagaactgggaaattataagagaagatgaagccaccatgtatagcaaccaggccttcccatcacctccaccgtcaagtaacttggatgttccaactcatcttgcagaagaattgaatgccagactcaccatttttggaaattcagccgtgagccagccagcatcgagctcaaatcattccagcagaagaggcagcttacaagcctatacttttgaggaacaacctacacttcctgtgcttttgcctacttcatctggattaccaccaggttgggaagaaaaacaagatgaaagaggaagatcatattatgtagatcacaattccagaacgactacttggacaaagcccactgtacaggccacagtggagaccagtcagctgacctcaagccagagttctgcaggccctcaatcacaagcctccaccagtgattcaggccagcaggtgacccagccatctgaaattgagcaaggattccttcctaaaggctgggaagtccggcatgcaccaaatgggaggcctttctttattgaccacaacactaaaaccaccacctgggaagatccaagattgaaaattccagcccatctgagaggaaagacatcacttgatacttccaatgatctagggcctttacctccaggatgggaagagagaactcacacagatggaagaatcttctacataaatcacaatataaaaagaacacaatgggaagatcctcggttggagaatgtagcaataactggaccagcagtgccctactccagggattacaaaagaaagtatgagttcttccgaagaaagttgaagaagcagaatgacattccaaacaaatttgaaatgaaacttcgccgagcaactgttcttgaagactcttaccggagaattatgggtgtcaagagagcagacttcctgaaggctcgactgtggattgagtttgatggtgaaaagggattggattatggaggagttgccagagaatggttcttcctgatctcaaaggaaatgtttaacccttattatgggttgtttgaatattctgctacggacaattataccctacagataaatccaaactctggattgtgtaacgaagatcacctctcttacttcaagtttattggtcgggtagctggaatggcagtttatcatggcaaactgttggatggttttttcatccgcccattttacaagatgatgcttcacaaaccaataacccttcatgatatggaatctgtggatagtgaatattacaattccctaagatggattcttgaaaatgacccaacagaattggacctcaggtttatcatagatgaagaactttttggacagacacatcaacatgagctgaaaaatggtggatcagaaatagttgtcaccaataagaacaaaaaggaatatatttatcttgtaatacaatggcgatttgtaaaccgaatccagaagcaaatggctgcttttaaagagggattctttgaactaataccacaggatctcatcaaaatttttgatgaaaatgaactagagcttcttatgtgtggactgggagatgttgatgtgaatgactggagggaacatacaaagtataaaaatggctacagtgcaaatcatcaggttatacagtggttttggaaggctgttttaatgatggattcagaaaaaagaataagattacttcagtttgtcactggcacatctcgggtgcctatgaatggatttgctgaactatacggttcaaatggaccacagtcatttacagttgaacagtggggtactcctgaaaagctgccaagagctcatacctgttttaatcgcctggacttgccaccttatgaatcatttgaagaattatgggataaacttcagatggcaattgaaaacacccagggctttgatggagttgattagattacaaataacaatctgtagtgtttttactgccatagttttataaccaaaatcttgacttaaaattttccggggaactactaaaatgtggccactgagtcttcccagatcttgaagaaaatcatataaaaagcatttgaagaaatagtacgacaacttatttttaatcacttttaaataatgtgttgcatttacacagttgtttcatgctgtctttagagttaggtgcctgcctaaagccaggcaccaccacacctggctttagagttcacacaataggatataagtcctgtatgacttaaatagtgaattttgtccttaacatttacctcttgtatagtatctgccaggcagttttttcttaaactactgagatgataactgtgaaatatttgtgatacgtgtcatgtgtgaaaagtttgatgcattttgagatggaaaactgaaatttggaaaaagaaatactttactattgagtaaactacaatatatttagtgctactcgcagctatttattattttgtagacctgccttatgcaccttactgcctagatttttgggaaaaaactttggaaagtgtgttacctatatttctagccaactaactcacagaaaaactgtttacttcttcactttcgaagtatttggcttttgttaatatgcagttttactaaacagatggttcataagacatgtgaagcaaattcatatttgcaatgggtaaaaagtattaaagcctttctcttgcctgcatatcctattgaccattggtatagtcatcactttttcatattttagtgtagttagaagaattccttcttcaaacattaaagatccacaaagcagtatttctaaatatgccttgaagaactaaatgaagtgtatagcacttgcctttactagatattctttacacttgtacaattatgtagtaaatgtatgtttacagggtttatcatgtttacagattaagctaatttctgtagtcgcatttttatatttttagtatcactctagtaaaaaaaccaaataatttgtttaaaataaccaaagagttgttataatgcataatttgtattaaatttattactatttcttatgccttttaaaatactgtttactatgaagacaatgtttttaattacaaatccagaattctgtaggcaaaatgctacagttcatatcttcctttaaccaaactgaagtacataaagaccatgtacatgtattcatcaaacgtttattgaatgctgcgtgcctagcgctgtgctatgctctggggtaagagttgtcagcttcagagaagctgagtcctgatcctcaaggaacttgcaaatgtgtctatgaatttgtaaaacaatcaaaagtaggcgtaagcagaataaggcaaaagggaaagtgttctaggttccagcacacctgcaaagataaagtgtgccaagactgtatttatatttcatacttatattgtttcatccttatattggaatgattatatagaaaatgctcttaaaaagattaaacctatttctcagtatggtatcttggtgatttaggaataattgtaaatatatgttacgaatcttcttaaatatatatatatacacaccctgtgagaactgtaaaaagtacctctggttcttggtttaagtttgttggggtataacatgatgagtactcattagcacctgatagaaatctgaaatgtgacagtagcaaaaccactttctactttccaaacaccacagcatcagcatggtttaggggaagcaattcacagattaatgtaccctgcgttttgtcttcaccattgtcaaccagcagtcaaggatgagcaccaggtatagtcctggtttgatatctcaccagccatgtgaactgaagcagcttacttaacctctctggattcatatttcttcatctgtcaaatgagagtaatcatgcccaccctcattgtcatgccagattgtcagaagttccagacagatgagaaagcaaaaagtactttgtaaagtgttatacaatcagaaggtgctttgtgctgaccgtcagattgtgtcaagtcaggtgtgcaaattgaccacactcccaaagaatcatttaaaagtaaagtgacttctaagagacaaggaagtaggaacatttctgatattaaatatataaataatatggatacacatgtgtatatctgtatatggatcttaccatcataattcattttcttcatatcagcaaagtaatagtaatgtgggccaatgcattttggaaatgtcctcattatgtagaatggaatgtgaaaattatttttgttaaaacaggattttgccacaattatttaaatattatgtttgtgaactatctaagcatgagaaaatacaaagctttctttgtatctggctgatactcatttggatgattctgtgactcatagaacatgatgttaaatgagaccagactcaactgccaccagtccccagctgcagaccttcatccccttcatctcccactaggggctcgtggtctggaagaaacatctatcaagcaacacagccccttatcccagatagaaaagtgtctcaaatgcattctactgcgggacagtcagtaggatcattttcataaagcaaggacatcatatgtttctagaaattacaagcatataactttagcctacaatctcttattaaaaatttttaacaaaattgtattacaaatgcatttcatcagaactcaaatttaaatggtgtttgttttgggtttttatttataatgctgaagttattccatataagtatcaagttaaacacaattcattttgattataaactatttgactttttaaaatcttctgacacagtaaatatatatatcaagattgatgtatcaaaatttattgcacactttaaagtgtaaaatcattttttaaaatcttgaatccacaaataaagttctattctgattttaaaaaacaaaa

SEQ ID NO: 158467 - DNA, 5869 bp, Homo sapiens
  Payload ID: 11018
  Gene Symbol: NEDD4
  Gene Name: neural precursor cell expressed, developmentally down-regulated 4, E3 ubiquitin protein ligase
  Uniprot ID: P46934
  ENST ID: ENST00000435532
  CDS Start-End: 192-2894
ggccttttcccgccgcgctgccgggtgccgctagtgcccgctcgccgcgggaggcgctgctgtcgctgagggagcgcctcctcctcttcctccaactcttccccgcctcctcccgcttctcctcctcctcctccacagttgcctgccctgggcgggggcgagcgcgtccggtttgctggaagcgttcggaaatggcaacttgcgcggtggaggtgttcgggctcctggaggacgaggaaaattcacgaattgtgagagtaagagttatagccggaataggccttgccaagaaggatatattgggagctagtgatccttacgtgagagtgacgttatatgacccaatgaatggagttcttacaagtgtgcaaacaaaaaccattaaaaagagtttgaatccaaagtggaatgaagaaatattattcagagttcatcctcagcagcaccggcttctttttgaagtgtttgacgaaaaccgattgacaagagatgatttcctaggtcaagtggatgttccactttatccattaccgacagaaaatccaagattggagagaccatatacatttaaggattttgttcttcatccaagaagtcacaaatcaagagttaaaggttatctgagactaaaaatgacttatttacctaaaaccagtggctcagaagatgataatgcagaacaggctgaggaattagagcctggctgggttgttttggaccaaccagatgctgcttgccatttgcagcaacaacaagaaccttctcctctacctccagggtgggaagagaggcaggatatccttggaaggacctattatgtaaaccatgaatctagaagaacacagtggaaaagaccaacccctcaggacaacctaacagatgctgagaatggcaacattcaactgcaagcacaacgtgcatttaccaccaggcggcagatatccgaggaaacagaaagtgttgacaaccgagagtcttccgagaactgggaaattataagagaagatgaagccaccatgtatagcaaccaggccttcccatcacctccaccgtcaagtaacttggatgttccaactcatcttgcagaagaattgaatgccagactcaccatttttggaaattcagccgtgagccagccagcatcgagctcaaatcattccagcagaagaggcagcttacaagcctatacttttgaggaacaacctacacttcctgtgcttttgcctacttcatctggattaccaccaggttgggaagaaaaacaagatgaaagaggaagatcatattatgtagatcacaattccagaacgactacttggacaaagcccactgtacaggccacagtggagaccagtcagctgacctcaagccagagttctgcaggccctcaatcacaagcctccaccagtgattcaggccagcaggtgacccagccatctgaaattgagcaaggattccttcctaaaggctgggaagtccggcatgcaccaaatgggaggcctttctttattgaccacaacactaaaaccaccacctgggaagatccaagattgaaaattccagcccatctgagaggaaagacatcacttgatacttccaatgatctagggcctttacctccaggatgggaagagagaactcacacagatggaagaatcttctacataaatcacaatataaaaagaacacaatgggaagatcctcggttggagaatgtagcaataactggaccagcagtgccctactccagggattacaaaagaaagtatgagttcttccgaagaaagttgaagaagcagaatgacattccaaacaaatttgaaatgaaacttcgccgagcaactgttcttgaagactcttaccggagaattatgggtgtcaagagagcagacttcctgaaggctcgactgtggattgagtttgatggtgaaaagggattggattatggaggagttgccagagaatggttcttcctgatctcaaaggaaatgtttaacccttattatgggttgtttgaatattctgctacggacaattataccctacagataaatccaaactctggattgtgtaacgaagatcacctctcttacttcaagtttattggtcgggtagctggaatggcagtttatcatggcaaactgttggatggttttttcatccgcccattttacaagatgatgcttcacaaaccaataacccttcatgatatggaatctgtggatagtgaatattacaattccctaagatggattcttgaaaatgacccaacagaattggacctcaggtttatcatagatgaagaactttttggacagacacatcaacatgagctgaaaaatggtggatcagaaatagttgtcaccaataagaacaaaaaggaatatatttatcttgtaatacaatggcgatttgtaaaccgaatccagaagcaaatggctgcttttaaagagggattctttgaactaataccacaggatctcatcaaaatttttgatgaaaatgaactagagcttcttatgtgtggactgggagatgttgatgtgaatgactggagggaacatacaaagtataaaaatggctacagtgcaaatcatcaggttatacagtggttttggaaggctgttttaatgatggattcagaaaaaagaataagattacttcagtttgtcactggcacatctcgggtgcctatgaatggatttgctgaactatacggttcaaatggaccacagtcatttacagttgaacagtggggtactcctgaaaagctgccaagagctcatacctgttttaatcgcctggacttgccaccttatgaatcatttgaagaattatgggataaacttcagatggcaattgaaaacacccagggctttgatggagttgattagattacaaataacaatctgtagtgtttttactgccatagttttataaccaaaatcttgacttaaaattttccggggaactactaaaatgtggccactgagtcttcccagatcttgaagaaaatcatataaaaagcatttgaagaaatagtacgacaacttatttttaatcacttttaaataatgtgttgcatttacacagttgtttcatgctgtctttagagttaggtgcctgcctaaagccaggcaccaccacacctggctttagagttcacacaataggatataagtcctgtatgacttaaatagtgaattttgtccttaacatttacctcttgtatagtatctgccaggcagttttttcttaaactactgagatgataactgtgaaatatttgtgatacgtgtcatgtgtgaaaagtttgatgcattttgagatggaaaactgaaatttggaaaaagaaatactttactattgagtaaactacaatatatttagtgctactcgcagctatttattattttgtagacctgccttatgcaccttactgcctagatttttgggaaaaaactttggaaagtgtgttacctatatttctagccaactaactcacagaaaaactgtttacttcttcactttcgaagtatttggcttttgttaatatgcagttttactaaacagatggttcataagacatgtgaagcaaattcatatttgcaatgggtaaaaagtattaaagcctttctcttgcctgcatatcctattgaccattggtatagtcatcactttttcatattttagtgtagttagaagaattccttcttcaaacattaaagatccacaaagcagtatttctaaatatgccttgaagaactaaatgaagtgtatagcacttgcctttactagatattctttacacttgtacaattatgtagtaaatgtatgtttacagggtttatcatgtttacagattaagctaatttctgtagtcgcatttttatatttttagtatcactctagtaaaaaaaccaaataatttgtttaaaataaccaaagagttgttataatgcataatttgtattaaatttattactatttcttatgccttttaaaatactgtttactatgaagacaatgtttttaattacaaatccagaattctgtaggcaaaatgctacagttcatatcttcctttaaccaaactgaagtacataaagaccatgtacatgtattcatcaaacgtttattgaatgctgcgtgcctagcgctgtgctatgctctggggtaagagttgtcagcttcagagaagctgagtcctgatcctcaaggaacttgcaaatgtgtctatgaatttgtaaaacaatcaaaagtaggcgtaagcagaataaggcaaaagggaaagtgttctaggttccagcacacctgcaaagataaagtgtgccaagactgtatttatatttcatacttatattgtttcatccttatattggaatgattatatagaaaatgctcttaaaaagattaaacctatttctcagtatggtatcttggtgatttaggaataattgtaaatatatgttacgaatcttcttaaatatatatatatacacaccctgtgagaactgtaaaaagtacctctggttcttggtttaagtttgttggggtataacatgatgagtactcattagcacctgatagaaatctgaaatgtgacagtagcaaaaccactttctactttccaaacaccacagcatcagcatggtttaggggaagcaattcacagattaatgtaccctgcgttttgtcttcaccattgtcaaccagcagtcaaggatgagcaccaggtatagtcctggtttgatatctcaccagccatgtgaactgaagcagcttacttaacctctctggattcatatttcttcatctgtcaaatgagagtaatcatgcccaccctcattgtcatgccagattgtcagaagttccagacagatgagaaagcaaaaagtactttgtaaagtgttatacaatcagaaggtgctttgtgctgaccgtcagattgtgtcaagtcaggtgtgcaaattgaccacactcccaaagaatcatttaaaagtaaagtgacttctaagagacaaggaagtaggaacatttctgatattaaatatataaataatatggatacacatgtgtatatctgtatatggatcttaccatcataattcattttcttcatatcagcaaagtaatagtaatgtgggccaatgcattttggaaatgtcctcattatgtagaatggaatgtgaaaattatttttgttaaaacaggattttgccacaattatttaaatattatgtttgtgaactatctaagcatgagaaaatacaaagctttctttgtatctggctgatactcatttggatgattctgtgactcatagaacatgatgttaaatgagaccagactcaactgccaccagtccccagctgcagaccttcatccccttcatctcccactaggggctcgtggtctggaagaaacatctatcaagcaacacagccccttatcccagatagaaaagtgtctcaaatgcattctactgcgggacagtcagtaggatcattttcataaagcaaggacatcatatgtttctagaaattacaagcatataactttagcctacaatctcttattaaaaatttttaacaaaattgtattacaaatgcatttcatcagaactcaaatttaaatggtgtttgttttgggtttttatttataatgctgaagttattccatataagtatcaagttaaacacaattcattttgattataaactatttgactttttaaaatcttctgacacagtaaatatatatatcaagattgatgtatcaaaatttattgcacactttaaagtgtaaaatcattttttaaaatcttgaatccacaaataaagttctattctgattttaaaaaacaaaa

SEQ ID NO: 158468 - DNA, 457 bp, Homo sapiens
  Payload ID: 11018
  Gene Symbol: NEDD4
  Gene Name: neural precursor cell expressed, developmentally down-regulated 4, E3 ubiquitin protein ligase
  ENST ID: ENST00000507063
  CDS Start-End: 1-106
gtggaatgaagaaatattattcagagttcatcctcagcagcaccggcttctttttgaagtgtttgacgaaaaccgattgccatggttagtgacaaatcaggagtgaaggtgattcctttatataagttctgcaactgagtgaattccagacaagagatgatttcctaggtcaagtggatgttccactttatccattaccgacagaaaatccaagattggagagaccatatacatttaaggattttgttcttcatccaagaagtcacaaatcaagagttaaaggttatctgagactaaaaatgacttatttacctaaaaccagtggctcagaagatgataatgcagaacaggctgaggaattagagcctggctgggttgttttggaccaaccagatgctgcttgccatttgcagcaacaacaagaaccttctcctctacctccagggtgggaagagag

SEQ ID NO: 158469 - DNA, 5707 bp, Homo sapiens
  Payload ID: 11018
  Gene Symbol: NEDD4
  Gene Name: neural precursor cell expressed, developmentally down-regulated 4, E3 ubiquitin protein ligase
  ENST ID: ENST00000508871
  CDS Start-End: 1-2732
caaatggtgattgtaaaccagaaatgtcagaaattaagcttaattctgattcagagtatattaagctcatgcataggacatctgcatgtttgccatcctcccaaaatgtagattgtcaaataaatatcaatggagaattggaaagaccacattcacagatgaacaaaaaccatggtattttacgaagaagtatttcattgggaggagcttatccaaatatttcctgtctatccagccttaagcacaattgttctaaagggggaccatctcagttactcataaagtttgcatctggaaatgaaggtaaagtggataatttatcaagagacagcaacagagattgcacaaatgaactgtctaattcttgcaagacagaaaatccaagattggagagaccatatacatttaaggattttgttcttcatccaagaagtcacaaatcaagagttaaaggttatctgagactaaaaatgacttatttacctaaaaccagtggctcagaagatgataatgcagaacaggctgaggaattagagcctggctgggttgttttggaccaaccagatgctgcttgccatttgcagcaacaacaagaaccttctcctctacctccagggtgggaagagaggcaggatatccttggaaggacctattatgtaaaccatgaatctagaagaacacagtggaaaagaccaacccctcaggacaacctaacagatgctgagaatggcaacattcaactgcaagcacaacgtgcatttaccaccaggcggcagatatccgaggaaacagaaagtgttgacaaccgagagtcttccgagaactgggaaattataagagaagatgaagccaccatgtatagcaaccaggccttcccatcacctccaccgtcaagtaacttggatgttccaactcatcttgcagaagaattgaatgccagactcaccatttttggaaattcagccgtgagccagccagcatcgagctcaaatcattccagcagaagaggcagcttacaagcctatacttttgaggaacaacctacacttcctgtgcttttgcctacttcatctggattaccaccaggttgggaagaaaaacaagatgaaagaggaagatcatattatgtagatcacaattccagaacgactacttggacaaagcccactgtacaggccacagtggagaccagtcagctgacctcaagccagagttctgcaggccctcaatcacaagcctccaccagtgattcaggccagcaggtgacccagccatctgaaattgagcaaggattccttcctaaaggctgggaagtccggcatgcaccaaatgggaggcctttctttattgaccacaacactaaaaccaccacctgggaagatccaagattgaaaattccagcccatctgagaggaaagacatcacttgatacttccaatgatctagggcctttacctccaggatgggaagagagaactcacacagatggaagaatcttctacataaatcacaatataaaaagaacacaatgggaagatcctcggttggagaatgtagcaataactggaccagcagtgccctactccagggattacaaaagaaagtatgagttcttccgaagaaagttgaagaagcagaatgacattccaaacaaatttgaaatgaaacttcgccgagcaactgttcttgaagactcttaccggagaattatgggtgtcaagagagcagacttcctgaaggctcgactgtggattgagtttgatggtgaaaagggattggattatggaggagttgccagagaatggttcttcctgatctcaaaggaaatgtttaacccttattatgggttgtttgaatattctgctacggacaattataccctacagataaatccaaactctggattgtgtaacgaagatcacctctcttacttcaagtttattggtcgggtagctggaatggcagtttatcatggcaaactgttggatggttttttcatccgcccattttacaagatgatgcttcacaaaccaataacccttcatgatatggaatctgtggatagtgaatattacaattccctaagatggattcttgaaaatgacccaacagaattggacctcaggtttatcatagatgaagaactttttggacagacacatcaacatgagctgaaaaatggtggatcagaaatagttgtcaccaataagaacaaaaaggaatatatttatcttgtaatacaatggcgatttgtaaaccgaatccagaagcaaatggctgcttttaaagagggattctttgaactaataccacaggatctcatcaaaatttttgatgaaaatgaactagagcttcttatgtgtggactgggagatgttgatgtgaatgactggagggaacatacaaagtataaaaatggctacagtgcaaatcatcaggttatacagtggttttggaaggctgttttaatgatggattcagaaaaaagaataagattacttcagtttgtcactggcacatctcgggtgcctatgaatggatttgctgaactatacggttcaaatggaccacagtcatttacagttgaacagtggggtactcctgaaaagctgccaagagctcatacctgttttaatcgcctggacttgccaccttatgaatcatttgaagaattatgggataaacttcagatggcaattgaaaacacccagggctttgatggagttgattagattacaaataacaatctgtagtgtttttactgccatagttttataaccaaaatcttgacttaaaattttccggggaactactaaaatgtggccactgagtcttcccagatcttgaagaaaatcatataaaaagcatttgaagaaatagtacgacaacttatttttaatcacttttaaataatgtgttgcatttacacagttgtttcatgctgtctttagagttaggtgcctgcctaaagccaggcaccaccacacctggctttagagttcacacaataggatataagtcctgtatgacttaaatagtgaattttgtccttaacatttacctcttgtatagtatctgccaggcagttttttcttaaactactgagatgataactgtgaaatatttgtgatacgtgtcatgtgtgaaaagtttgatgcattttgagatggaaaactgaaatttggaaaaagaaatactttactattgagtaaactacaatatatttagtgctactcgcagctatttattattttgtagacctgccttatgcaccttactgcctagatttttgggaaaaaactttggaaagtgtgttacctatatttctagccaactaactcacagaaaaactgtttacttcttcactttcgaagtatttggcttttgttaatatgcagttttactaaacagatggttcataagacatgtgaagcaaattcatatttgcaatgggtaaaaagtattaaagcctttctcttgcctgcatatcctattgaccattggtatagtcatcactttttcatattttagtgtagttagaagaattccttcttcaaacattaaagatccacaaagcagtatttctaaatatgccttgaagaactaaatgaagtgtatagcacttgcctttactagatattctttacacttgtacaattatgtagtaaatgtatgtttacagggtttatcatgtttacagattaagctaatttctgtagtcgcatttttatatttttagtatcactctagtaaaaaaaccaaataatttgtttaaaataaccaaagagttgttataatgcataatttgtattaaatttattactatttcttatgccttttaaaatactgtttactatgaagacaatgtttttaattacaaatccagaattctgtaggcaaaatgctacagttcatatcttcctttaaccaaactgaagtacataaagaccatgtacatgtattcatcaaacgtttattgaatgctgcgtgcctagcgctgtgctatgctctggggtaagagttgtcagcttcagagaagctgagtcctgatcctcaaggaacttgcaaatgtgtctatgaatttgtaaaacaatcaaaagtaggcgtaagcagaataaggcaaaagggaaagtgttctaggttccagcacacctgcaaagataaagtgtgccaagactgtatttatatttcatacttatattgtttcatccttatattggaatgattatatagaaaatgctcttaaaaagattaaacctatttctcagtatggtatcttggtgatttaggaataattgtaaatatatgttacgaatcttcttaaatatatatatatacacaccctgtgagaactgtaaaaagtacctctggttcttggtttaagtttgttggggtataacatgatgagtactcattagcacctgatagaaatctgaaatgtgacagtagcaaaaccactttctactttccaaacaccacagcatcagcatggtttaggggaagcaattcacagattaatgtaccctgcgttttgtcttcaccattgtcaaccagcagtcaaggatgagcaccaggtatagtcctggtttgatatctcaccagccatgtgaactgaagcagcttacttaacctctctggattcatatttcttcatctgtcaaatgagagtaatcatgcccaccctcattgtcatgccagattgtcagaagttccagacagatgagaaagcaaaaagtactttgtaaagtgttatacaatcagaaggtgctttgtgctgaccgtcagattgtgtcaagtcaggtgtgcaaattgaccacactcccaaagaatcatttaaaagtaaagtgacttctaagagacaaggaagtaggaacatttctgatattaaatatataaataatatggatacacatgtgtatatctgtatatggatcttaccatcataattcattttcttcatatcagcaaagtaatagtaatgtgggccaatgcattttggaaatgtcctcattatgtagaatggaatgtgaaaattatttttgttaaaacaggattttgccacaattatttaaatattatgtttgtgaactatctaagcatgagaaaatacaaagctttctttgtatctggctgatactcatttggatgattctgtgactcatagaacatgatgttaaatgagaccagactcaactgccaccagtccccagctgcagaccttcatccccttcatctcccactaggggctcgtggtctggaagaaacatctatcaagcaacacagccccttatcccagatagaaaagtgtctcaaatgcattctactgcgggacagtcagtaggatcattttcataaagcaaggacatcatatgtttctagaaattacaagcatataactttagcctacaatctcttattaaaaatttttaacaaaattgtattacaaatgcatttcatcagaactcaaatttaaatggtgtttgttttgggtttttatttataatgctgaagttattccatataagtatcaagttaaacacaattcattttgattataaactatttgactttttaaaatcttctgacacagtaaatatatatatcaagattgatgtatcaaaatttattgcacactttaaagtgtaaaatcattttttaaaatcttgaatccacaaataaagttctattctgattttaaaaaacaaaa

SEQ ID NO: 158470 - DNA, 6751 bp, Homo sapiens
  Payload ID: 11018
  Gene Symbol: NEDD4
  Gene Name: neural precursor cell expressed, developmentally down-regulated 4, E3 ubiquitin protein ligase
  Uniprot ID: P46934
  ENST ID: ENST00000506154
  CDS Start-End: 278-4189
ggtcgctggaaatcaagtgctttgtaagtgaaggcattttgactacaagcgattcaagacattttggaaacgtcagtctctggaatgggtcgtctttttctttctatgatatctggtatctaatgttttacttaggataaagactactacttaatagctcttttaggcaccacaaatgattttttcttttgatgcagtgcagctgcttctagcctgtctacggacagagatctttgttatgactttcagcccttaacatgtttggaaatgagaacaaatggcacaaagcttacgattgcactttgcagccagaagaagcaatacttaccctttgtcagaaacctccggagatgacttggatagccatgttcacatgtgcttcaaaagaccaacacggatttcaacgtctaacgttgttcaaatgaagctgactcccagacagactgcactagctccgttaataaaggaaaacgttcagtctcaagaaagatcatctgttccctcatctgaaaatgttaataaaaagagcagctgtctacagatttcactacagccaacaaggtacagtggatatcttcagtctagcaatgtcttagctgatagtgatgatgcttcgtttacttgtatcttgaaggatggtatttacagtagtgctgtggtcgataatgaattgaatgctgtgaatgatggtcaccttgtaagcagtccagccatttgtagtggtagccttagtaacttttcaaccagtgataatgggtcttacagcagcaacggtagtgattttgggtcatgtgcaagtatcacaagtggaggttcatatactaacagtgtcatcagtgacagtagtagttatacttttccaccaagtgatgatacttttttgggtggaaacttaccttctgacagcacctccaatagaagtgtgccaaacaggaatactactccttgtgaaattttttcaagaagtacaagtacagatccttttgtccaggatgacttggaacatggattagagattatgaaattgccagtgagcaggaacacaaaaattccactaaaacgttactcctccttagtcatttttcctaggagtccttcaactacccgaccgacttctccaacaagtctgtgtactcttctgagcaaaggatcctatcaaacttcacaccagtttattatttctcctagtgaaattgcacataatgaggatggcactagtgctaaaggatttctttcaacagctgtcaatggacttcggttatctaaaacaatttgtacccccggagaagtaagagacatacggccgcttcacaggaagggctcgttacagaagaaaattgttctttcgaataatactcccagacagactgtctgtgaaaagtcatctgaaggatattcttgtgtttcagtgcatttcacccaacgaaaagcagctacattagactgtgaaacaacaaatggtgattgtaaaccagaaatgtcagaaattaagcttaattctgattcagagtatattaagctcatgcataggacatctgcatgtttgccatcctcccaaaatgtagattgtcaaataaatatcaatggagaattggaaagaccacattcacagatgaacaaaaaccatggtattttacgaagaagtatttcattgggaggagcttatccaaatatttcctgtctatccagccttaagcacaattgttctaaagggggaccatctcagttactcataaagtttgcatctggaaatgaaggtaaagtggataatttatcaagagacagcaacagagattgcacaaatgaactgtctaattcttgcaagacaagagatgatttcctaggtcaagtggatgttccactttatccattaccgacagaaaatccaagattggagagaccatatacatttaaggattttgttcttcatccaagaagtcacaaatcaagagttaaaggttatctgagactaaaaatgacttatttacctaaaaccagtggctcagaagatgataatgcagaacaggctgaggaattagagcaacaacaagaaccttctcctctacctccagggtgggaagagaggcaggatatccttggaaggacctattatgtaaaccatgaatctagaagaacacagtggaaaagaccaacccctcaggacaacctaacagatgctgagaatggcaacattcaactgcaagcacaacgtgcatttaccaccaggcggcagatatccgaggaaacagaaagtgttgacaaccgagagtcttccgagaactgggaaattataagagaagatgaagccaccatgtatagcaaccaggccttcccatcacctccaccgtcaagtaacttggatgttccaactcatcttgcagaagaattgaatgccagactcaccatttttggaaattcagccgtgagccagccagcatcgagctcaaatcattccagcagaagaggcagcttacaagcctatacttttgaggaacaacctacacttcctgtgcttttgcctacttcatctggattaccaccaggttgggaagaaaaacaagatgaaagaggaagatcatattatgtagatcacaattccagaacgactacttggacaaagcccactgtacaggccacagtggagaccagtcagctgacctcaagccagagttctgcaggccctcaatcacaagcctccaccagtgattcaggccagcaggtgacccagccatctgaaattgagcaaggattccttcctaaaggctgggaagtccggcatgcaccaaatgggaggcctttctttattgaccacaacactaaaaccaccacctgggaagatccaagattgaaaattccagcccatctgagaggaaagacatcacttgatacttccaatgatctagggcctttacctccaggatgggaagagagaactcacacagatggaagaatcttctacataaatcacaatataaaaagaacacaatgggaagatcctcggttggagaatgtagcaataactggaccagcagtgccctactccagggattacaaaagaaagtatgagttcttccgaagaaagttgaagaagcagaatgacattccaaacaaatttgaaatgaaacttcgccgagcaactgttcttgaagactcttaccggagaattatgggtgtcaagagagcagacttcctgaaggctcgactgtggattgagtttgatggtgaaaagggattggattatggaggagttgccagagaatggttcttcctgatctcaaaggaaatgtttaacccttattatgggttgtttgaatattctgctacggacaattataccctacagataaatccaaactctggattgtgtaacgaagatcacctctcttacttcaagtttattggtcgggtagctggaatggcagtttatcatggcaaactgttggatggttttttcatccgcccattttacaagatgatgcttcacaaaccaataacccttcatgatatggaatctgtggatagtgaatattacaattccctaagatggattcttgaaaatgacccaacagaattggacctcaggtttatcatagatgaagaactttttggacagacacatcaacatgagctgaaaaatggtggatcagaaatagttgtcaccaataagaacaaaaaggaatatatttatcttgtaatacaatggcgatttgtaaaccgaatccagaagcaaatggctgcttttaaagagggattctttgaactaataccacaggatctcatcaaaatttttgatgaaaatgaactagagcttcttatgtgtggactgggagatgttgatgtgaatgactggagggaacatacaaagtataaaaatggctacagtgcaaatcatcaggttatacagtggttttggaaggctgttttaatgatggattcagaaaaaagaataagattacttcagtttgtcactggcacatctcgggtgcctatgaatggatttgctgaactatacggttcaaatggaccacagtcatttacagttgaacagtggggtactcctgaaaagctgccaagagctcatacctgttttaatcgcctggacttgccaccttatgaatcatttgaagaattatgggataaacttcagatggcaattgaaaacacccagggctttgatggagttgattagattacaaataacaatctgtagtgtttttactgccatagttttataaccaaaatcttgacttaaaattttccggggaactactaaaatgtggccactgagtcttcccagatcttgaagaaaatcatataaaaagcatttgaagaaatagtacgacaacttatttttaatcacttttaaataatgtgttgcatttacacagttgtttcatgctgtctttagagttaggtgcctgcctaaagccaggcaccaccacacctggctttagagttcacacaataggatataagtcctgtatgacttaaatagtgaattttgtccttaacatttacctcttgtatagtatctgccaggcagttttttcttaaactactgagatgataactgtgaaatatttgtgatacgtgtcatgtgtgaaaagtttgatgcattttgagatggaaaactgaaatttggaaaaagaaatactttactattgagtaaactacaatatatttagtgctactcgcagctatttattattttgtagacctgccttatgcaccttactgcctagatttttgggaaaaaactttggaaagtgtgttacctatatttctagccaactaactcacagaaaaactgtttacttcttcactttcgaagtatttggcttttgttaatatgcagttttactaaacagatggttcataagacatgtgaagcaaattcatatttgcaatgggtaaaaagtattaaagcctttctcttgcctgcatatcctattgaccattggtatagtcatcactttttcatattttagtgtagttagaagaattccttcttcaaacattaaagatccacaaagcagtatttctaaatatgccttgaagaactaaatgaagtgtatagcacttgcctttactagatattctttacacttgtacaattatgtagtaaatgtatgtttacagggtttatcatgtttacagattaagctaatttctgtagtcgcatttttatatttttagtatcactctagtaaaaaaaccaaataatttgtttaaaataaccaaagagttgttataatgcataatttgtattaaatttattactatttcttatgccttttaaaatactgtttactatgaagacaatgtttttaattacaaatccagaattctgtaggcaaaatgctacagttcatatcttcctttaaccaaactgaagtacataaagaccatgtacatgtattcatcaaacgtttattgaatgctgcgtgcctagcgctgtgctatgctctggggtaagagttgtcagcttcagagaagctgagtcctgatcctcaaggaacttgcaaatgtgtctatgaatttgtaaaacaatcaaaagtaggcgtaagcagaataaggcaaaagggaaagtgttctaggttccagcacacctgcaaagataaagtgtgccaagactgtatttatatttcatacttatattgtttcatccttatattggaatgattatatagaaaatgctcttaaaaagattaaacctatttctcagtatggtatcttggtgatttaggaataattgtaaatatatgttacgaatcttcttaaatatatatatatacacaccctgtgagaactgtaaaaagtacctctggttcttggtttaagtttgttggggtataacatgatgagtactcattagcacctgatagaaatctgaaatgtgacagtagcaaaaccactttctactttccaaacaccacagcatcagcatggtttaggggaagcaattcacagattaatgtaccctgcgttttgtcttcaccattgtcaaccagcagtcaaggatgagcaccaggtatagtcctggtttgatatctcaccagccatgtgaactgaagcagcttacttaacctctctggattcatatttcttcatctgtcaaatgagagtaatcatgcccaccctcattgtcatgccagattgtcagaagttccagacagatgagaaagcaaaaagtactttgtaaagtgttatacaatcagaaggtgctttgtgctgaccgtcagattgtgtcaagtcaggtgtgcaaattgaccacactcccaaagaatcatttaaaagtaaagtgacttctaagagacaaggaagtaggaacatttctgatattaaatatataaataatatggatacacatgtgtatatctgtatatggatcttaccatcataattcattttcttcatatcagcaaagtaatagtaatgtgggccaatgcattttggaaatgtcctcattatgtagaatggaatgtgaaaattatttttgttaaaacaggattttgccacaattatttaaatattatgtttgtgaactatctaagcatgagaaaatacaaagctttctttgtatctggctgatactcatttggatgattctgtgactcatagaacatgatgttaaatgagaccagactcaactgccaccagtccccagctgcagaccttcatccccttcatctcccactaggggctcgtggtctggaagaaacatctatcaagcaacacagccccttatccc

SEQ ID NO: 158471 - DNA, 652 bp, Homo sapiens
  Payload ID: 11018
  Gene Symbol: NEDD4
  Gene Name: neural precursor cell expressed, developmentally down-regulated 4, E3 ubiquitin protein ligase
  ENST ID: ENST00000502612
  CDS Start-End: 1-119
cttgcgcggtggaggtgttcgggctcctggaggacgaggaaaattcacgaattgtgagagtaagagttatagccggaataggccttgccaagaaggatatattgggagctagagtttgaatccaaagtggaatgaagaaatattattcagagttcatcctcagcagcaccggcttctttttgaagtgtttgacgaaaaccgattgacaagagatgatttcctaggtcaagtggatgttccactttatccattaccgacagaaaatccaagattggagagaccatatacatttaaggattttgttcttcatccaagaagtcacaaatcaagagttaaaggttatctgagactaaaaatgacttatttacctaaaaccagtggctcagaagatgataatgcagaacaggctgaggaattagagcctggctgggttgttttggaccaaccagatgctgcttgccatttgcagcaacaacaagaaccttctcctctacctccagggtgggaagagaggcaggatatccttggaaggacctattatgtaaaccatgaatctagaagaacacagtggaaaagaccaacccctcaggacaacctaacagatgctgagaatggcaacattcaactgcaagcacaacgtgcatttaccacc

SEQ ID NO: 158472 - DNA, 7235 bp, Homo sapiens
  Payload ID: 11018
  Gene Symbol: NEDD4
  Gene Name: neural precursor cell expressed, developmentally down-regulated 4, E3 ubiquitin protein ligase
  Uniprot ID: P46934
  ENST ID: ENST00000508342
  CDS Start-End: 301-4260
gctgcagctgagctcagcttaaaggtcgctggaaatcaagtgctttgtaagtgaaggcattttgactacaagcgattcaagacattttggaaacgtcagtctctggaatgggtcgtctttttctttctatgatatctggtatctaatgttttacttaggataaagactactacttaatagctcttttaggcaccacaaatgattttttcttttgatgcagtgcagctgcttctagcctgtctacggacagagatctttgttatgactttcagcccttaacatgtttggaaatgagaacaaatggcacaaagcttacgattgcactttgcagccagaagaagcaatacttaccctttgtcagaaacctccggagatgacttggatagccatgttcacatgtgcttcaaaagaccaacacggatttcaacgtctaacgttgttcaaatgaagctgactcccagacagactgcactagctccgttaataaaggaaaacgttcagtctcaagaaagatcatctgttccctcatctgaaaatgttaataaaaagagcagctgtctacagatttcactacagccaacaaggtacagtggatatcttcagtctagcaatgtcttagctgatagtgatgatgcttcgtttacttgtatcttgaaggatggtatttacagtagtgctgtggtcgataatgaattgaatgctgtgaatgatggtcaccttgtaagcagtccagccatttgtagtggtagccttagtaacttttcaaccagtgataatgggtcttacagcagcaacggtagtgattttgggtcatgtgcaagtatcacaagtggaggttcatatactaacagtgtcatcagtgacagtagtagttatacttttccaccaagtgatgatacttttttgggtggaaacttaccttctgacagcacctccaatagaagtgtgccaaacaggaatactactccttgtgaaattttttcaagaagtacaagtacagatccttttgtccaggatgacttggaacatggattagagattatgaaattgccagtgagcaggaacacaaaaattccactaaaacgttactcctccttagtcatttttcctaggagtccttcaactacccgaccgacttctccaacaagtctgtgtactcttctgagcaaaggatcctatcaaacttcacaccagtttattatttctcctagtgaaattgcacataatgaggatggcactagtgctaaaggatttctttcaacagctgtcaatggacttcggttatctaaaacaatttgtacccccggagaagtaagagacatacggccgcttcacaggaagggctcgttacagaagaaaattgttctttcgaataatactcccagacagactgtctgtgaaaagtcatctgaaggatattcttgtgtttcagtgcatttcacccaacgaaaagcagctacattagactgtgaaacaacaaatggtgattgtaaaccagaaatgtcagaaattaagcttaattctgattcagagtatattaagctcatgcataggacatctgcatgtttgccatcctcccaaaatgtagattgtcaaataaatatcaatggagaattggaaagaccacattcacagatgaacaaaaaccatggtattttacgaagaagtatttcattgggaggagcttatccaaatatttcctgtctatccagccttaagcacaattgttctaaagggggaccatctcagttactcataaagtttgcatctggaaatgaaggtaaagtggataatttatcaagagacagcaacagagattgcacaaatgaactgtctaattcttgcaagacaagagatgatttcctaggtcaagtggatgttccactttatccattaccgacagaaaatccaagattggagagaccatatacatttaaggattttgttcttcatccaagaagtcacaaatcaagagttaaaggttatctgagactaaaaatgacttatttacctaaaaccagtggctcagaagatgataatgcagaacaggctgaggaattagagcctggctgggttgttttggaccaaccagatgctgcttgccatttgcagcaacaacaagaaccttctcctctacctccagggtgggaagagaggcaggatatccttggaaggacctattatgtaaaccatgaatctagaagaacacagtggaaaagaccaacccctcaggacaacctaacagatgctgagaatggcaacattcaactgcaagcacaacgtgcatttaccaccaggcggcagatatccgaggaaacagaaagtgttgacaaccgagagtcttccgagaactgggaaattataagagaagatgaagccaccatgtatagcaaccaggccttcccatcacctccaccgtcaagtaacttggatgttccaactcatcttgcagaagaattgaatgccagactcaccatttttggaaattcagccgtgagccagccagcatcgagctcaaatcattccagcagaagaggcagcttacaagcctatacttttgaggaacaacctacacttcctgtgcttttgcctacttcatctggattaccaccaggttgggaagaaaaacaagatgaaagaggaagatcatattatgtagatcacaattccagaacgactacttggacaaagcccactgtacaggccacagtggagaccagtcagctgacctcaagccagagttctgcaggccctcaatcacaagcctccaccagtgattcaggccagcaggtgacccagccatctgaaattgagcaaggattccttcctaaaggctgggaagtccggcatgcaccaaatgggaggcctttctttattgaccacaacactaaaaccaccacctgggaagatccaagattgaaaattccagcccatctgagaggaaagacatcacttgatacttccaatgatctagggcctttacctccaggatgggaagagagaactcacacagatggaagaatcttctacataaatcacaatataaaaagaacacaatgggaagatcctcggttggagaatgtagcaataactggaccagcagtgccctactccagggattacaaaagaaagtatgagttcttccgaagaaagttgaagaagcagaatgacattccaaacaaatttgaaatgaaacttcgccgagcaactgttcttgaagactcttaccggagaattatgggtgtcaagagagcagacttcctgaaggctcgactgtggattgagtttgatggtgaaaagggattggattatggaggagttgccagagaatggttcttcctgatctcaaaggaaatgtttaacccttattatgggttgtttgaatattctgctacggacaattataccctacagataaatccaaactctggattgtgtaacgaagatcacctctcttacttcaagtttattggtcgggtagctggaatggcagtttatcatggcaaactgttggatggttttttcatccgcccattttacaagatgatgcttcacaaaccaataacccttcatgatatggaatctgtggatagtgaatattacaattccctaagatggattcttgaaaatgacccaacagaattggacctcaggtttatcatagatgaagaactttttggacagacacatcaacatgagctgaaaaatggtggatcagaaatagttgtcaccaataagaacaaaaaggaatatatttatcttgtaatacaatggcgatttgtaaaccgaatccagaagcaaatggctgcttttaaagagggattctttgaactaataccacaggatctcatcaaaatttttgatgaaaatgaactagagcttcttatgtgtggactgggagatgttgatgtgaatgactggagggaacatacaaagtataaaaatggctacagtgcaaatcatcaggttatacagtggttttggaaggctgttttaatgatggattcagaaaaaagaataagattacttcagtttgtcactggcacatctcgggtgcctatgaatggatttgctgaactatacggttcaaatggaccacagtcatttacagttgaacagtggggtactcctgaaaagctgccaagagctcatacctgttttaatcgcctggacttgccaccttatgaatcatttgaagaattatgggataaacttcagatggcaattgaaaacacccagggctttgatggagttgattagattacaaataacaatctgtagtgtttttactgccatagttttataaccaaaatcttgacttaaaattttccggggaactactaaaatgtggccactgagtcttcccagatcttgaagaaaatcatataaaaagcatttgaagaaatagtacgacaacttatttttaatcacttttaaataatgtgttgcatttacacagttgtttcatgctgtctttagagttaggtgcctgcctaaagccaggcaccaccacacctggctttagagttcacacaataggatataagtcctgtatgacttaaatagtgaattttgtccttaacatttacctcttgtatagtatctgccaggcagttttttcttaaactactgagatgataactgtgaaatatttgtgatacgtgtcatgtgtgaaaagtttgatgcattttgagatggaaaactgaaatttggaaaaagaaatactttactattgagtaaactacaatatatttagtgctactcgcagctatttattattttgtagacctgccttatgcaccttactgcctagatttttgggaaaaaactttggaaagtgtgttacctatatttctagccaactaactcacagaaaaactgtttacttcttcactttcgaagtatttggcttttgttaatatgcagttttactaaacagatggttcataagacatgtgaagcaaattcatatttgcaatgggtaaaaagtattaaagcctttctcttgcctgcatatcctattgaccattggtatagtcatcactttttcatattttagtgtagttagaagaattccttcttcaaacattaaagatccacaaagcagtatttctaaatatgccttgaagaactaaatgaagtgtatagcacttgcctttactagatattctttacacttgtacaattatgtagtaaatgtatgtttacagggtttatcatgtttacagattaagctaatttctgtagtcgcatttttatatttttagtatcactctagtaaaaaaaccaaataatttgtttaaaataaccaaagagttgttataatgcataatttgtattaaatttattactatttcttatgccttttaaaatactgtttactatgaagacaatgtttttaattacaaatccagaattctgtaggcaaaatgctacagttcatatcttcctttaaccaaactgaagtacataaagaccatgtacatgtattcatcaaacgtttattgaatgctgcgtgcctagcgctgtgctatgctctggggtaagagttgtcagcttcagagaagctgagtcctgatcctcaaggaacttgcaaatgtgtctatgaatttgtaaaacaatcaaaagtaggcgtaagcagaataaggcaaaagggaaagtgttctaggttccagcacacctgcaaagataaagtgtgccaagactgtatttatatttcatacttatattgtttcatccttatattggaatgattatatagaaaatgctcttaaaaagattaaacctatttctcagtatggtatcttggtgatttaggaataattgtaaatatatgttacgaatcttcttaaatatatatatatacacaccctgtgagaactgtaaaaagtacctctggttcttggtttaagtttgttggggtataacatgatgagtactcattagcacctgatagaaatctgaaatgtgacagtagcaaaaccactttctactttccaaacaccacagcatcagcatggtttaggggaagcaattcacagattaatgtaccctgcgttttgtcttcaccattgtcaaccagcagtcaaggatgagcaccaggtatagtcctggtttgatatctcaccagccatgtgaactgaagcagcttacttaacctctctggattcatatttcttcatctgtcaaatgagagtaatcatgcccaccctcattgtcatgccagattgtcagaagttccagacagatgagaaagcaaaaagtactttgtaaagtgttatacaatcagaaggtgctttgtgctgaccgtcagattgtgtcaagtcaggtgtgcaaattgaccacactcccaaagaatcatttaaaagtaaagtgacttctaagagacaaggaagtaggaacatttctgatattaaatatataaataatatggatacacatgtgtatatctgtatatggatcttaccatcataattcattttcttcatatcagcaaagtaatagtaatgtgggccaatgcattttggaaatgtcctcattatgtagaatggaatgtgaaaattatttttgttaaaacaggattttgccacaattatttaaatattatgtttgtgaactatctaagcatgagaaaatacaaagctttctttgtatctggctgatactcatttggatgattctgtgactcatagaacatgatgttaaatgagaccagactcaactgccaccagtccccagctgcagaccttcatccccttcatctcccactaggggctcgtggtctggaagaaacatctatcaagcaacacagccccttatcccagatagaaaagtgtctcaaatgcattctactgcgggacagtcagtaggatcattttcataaagcaaggacatcatatgtttctagaaattacaagcatataactttagcctacaatctcttattaaaaatttttaacaaaattgtattacaaatgcatttcatcagaactcaaatttaaatggtgtttgttttgggtttttatttataatgctgaagttattccatataagtatcaagttaaacacaattcattttgattataaactatttgactttttaaaatcttctgacacagtaaatatatatatcaagattgatgtatcaaaatttattgcacactttaaagtgtaaaatcattttttaaaatcttgaatccacaaataaagttctattctgattttaaaaaacaaaa

SEQ ID NO: 158473 - DNA, 6339 bp, Homo sapiens
  Payload ID: 11018
  Gene Symbol: NEDD4
  Gene Name: neural precursor cell expressed, developmentally down-regulated 4, E3 ubiquitin protein ligase
  ENST ID: ENST00000503468
  CDS Start-End: 1-1204
tatttacagtagtgctgtggtcgataatgaattgaatgctgtgaatgatggtcaccttgtaagcagtccagccatttgtagtggtagccttagtaacttttcaaccagtgataatgggtcttacagcagcaacggtagtgattttgggtcatgtgcaagtatcacaagtggaggttcatatactaacagtgtcatcagtgacagtagtagttatacttttccaccaagtgatgatacttttttgggtggaaacttaccttctgacagcacctccaatagaagtgtgccaaacaggaatactactccttgtgaaattttttcaagaagtacaagtacagatccttttgtccaggatgacttggaacatggattagagattatgaaattgccagtgagcaggaacacaaaaattccactaaaacgttactcctccttagtcatttttcctaggagtccttcaactacccgaccgacttctccaacaagtctgtgtactcttctgagcaaaggatcctatcaaacttcacaccagtttattatttctcctagtgaaattgcacataatgaggatggcactagtgctaaaggatttctttcaacagctgtcaatggacttcggttatctaaaacaatttgtacccccggagaagtaagagacatacggccgcttcacaggaagggctcgttacagaagaaaattgttctttcgaataatactcccagacagactgtctgtgaaaagtcatctgaaggatattcttgtgtttcagtgcatttcacccaacgaaaagcagctacattagactgtgaaacaacaaatggtgattgtaaaccagaaatgtcagaaattaagcttaattctgattcagagtatattaagctcatgcataggacatctgcatgtttgccatcctcccaaaatgtagattgtcaaataaatatcaatggagaattggaaagaccacattcacagatgaacaaaaaccatggtattttacgaagaagtatttcattgggaggagcttatccaaatatttcctgtctatccagccttaagcacaattgttctaaagggggaccatctcagttactcataaagtttgcatctggaaatgaaggtaaagtggataatttatcaagagacagcaacagagattgcacaaatgaactgtctaattcttgcaagtcacaaatcaagagttaaaggttatctgagactaaaaatgacttatttacctaaaaccagtggctcagaagatgataatgcagaacaggctgaggaattagagcctggctgggttgttttggaccaaccagatgctgcttgccatttgcagcaacaacaagaaccttctcctctacctccagggtgggaagagaggcaggatatccttggaaggacctattatgtaaaccatgaatctagaagaacacagtggaaaagaccaacccctcaggacaacctaacagatgctgagaatggcaacattcaactgcaagcacaacgtgcatttaccaccaggcggcagatatccgaggaaacagaaagtgttgacaaccgagagtcttccgagaactgggaaattataagagaagatgaagccaccatgtatagcaaccaggccttcccatcacctccaccgtcaagtaacttggatgttccaactcatcttgcagaagaattgaatgccagactcaccatttttggaaattcagccgtgagccagccagcatcgagctcaaatcattccagcagaagaggcagcttacaagcctatacttttgaggaacaacctacacttcctgtgcttttgcctacttcatctggattaccaccaggttgggaagaaaaacaagatgaaagaggaagatcatattatgtagatcacaattccagaacgactacttggacaaagcccactgtacaggccacagtggagaccagtcagctgacctcaagccagagttctgcaggccctcaatcacaagcctccaccagtgattcaggccagcaggtgacccagccatctgaaattgagcaaggattccttcctaaaggctgggaagtccggcatgcaccaaatgggaggcctttctttattgaccacaacactaaaaccaccacctgggaagatccaagattgaaaattccagcccatctgagaggaaagacatcacttgatacttccaatgatctagggcctttacctccaggatgggaagagagaactcacacagatggaagaatcttctacataaatcacaatataaaaagaacacaatgggaagatcctcggttggagaatgtagcaataactggaccagcagtgccctactccagggattacaaaagaaagtatgagttcttccgaagaaagttgaagaagcagaatgacattccaaacaaatttgaaatgaaacttcgccgagcaactgttcttgaagactcttaccggagaattatgggtgtcaagagagcagacttcctgaaggctcgactgtggattgagtttgatggtgaaaagggattggattatggaggagttgccagagaatggttcttcctgatctcaaaggaaatgtttaacccttattatgggttgtttgaatattctgctacggacaattataccctacagataaatccaaactctggattgtgtaacgaagatcacctctcttacttcaagtttattggtcgggtagctggaatggcagtttatcatggcaaactgttggatggttttttcatccgcccattttacaagatgatgcttcacaaaccaataacccttcatgatatggaatctgtggatagtgaatattacaattccctaagatggattcttgaaaatgacccaacagaattggacctcaggtttatcatagatgaagaactttttggacagacacatcaacatgagctgaaaaatggtggatcagaaatagttgtcaccaataagaacaaaaaggaatatatttacttcttatgtgtggactgggagatgttgatgtgaatgactggagggaacatacaaagtataaaaatggctacagtgcaaatcatcaggttatacagtggttttggaaggctgttttaatgatggattcagaaaaaagaataagattacttcagtttgtcactggcacatctcgggtgcctatgaatggatttgctgaactatacggttcaaatggaccacagtcatttacagttgaacagtggggtactcctgaaaagctgccaagagctcatacctgttttaatcgcctggacttgccaccttatgaatcatttgaagaattatgggataaacttcagatggcaattgaaaacacccagggctttgatggagttgattagattacaaataacaatctgtagtgtttttactgccatagttttataaccaaaatcttgacttaaaattttccggggaactactaaaatgtggccactgagtcttcccagatcttgaagaaaatcatataaaaagcatttgaagaaatagtacgacaacttatttttaatcacttttaaataatgtgttgcatttacacagttgtttcatgctgtctttagagttaggtgcctgcctaaagccaggcaccaccacacctggctttagagttcacacaataggatataagtcctgtatgacttaaatagtgaattttgtccttaacatttacctcttgtatagtatctgccaggcagttttttcttaaactactgagatgataactgtgaaatatttgtgatacgtgtcatgtgtgaaaagtttgatgcattttgagatggaaaactgaaatttggaaaaagaaatactttactattgagtaaactacaatatatttagtgctactcgcagctatttattattttgtagacctgccttatgcaccttactgcctagatttttgggaaaaaactttggaaagtgtgttacctatatttctagccaactaactcacagaaaaactgtttacttcttcactttcgaagtatttggcttttgttaatatgcagttttactaaacagatggttcataagacatgtgaagcaaattcatatttgcaatgggtaaaaagtattaaagcctttctcttgcctgcatatcctattgaccattggtatagtcatcactttttcatattttagtgtagttagaagaattccttcttcaaacattaaagatccacaaagcagtatttctaaatatgccttgaagaactaaatgaagtgtatagcacttgcctttactagatattctttacacttgtacaattatgtagtaaatgtatgtttacagggtttatcatgtttacagattaagctaatttctgtagtcgcatttttatatttttagtatcactctagtaaaaaaaccaaataatttgtttaaaataaccaaagagttgttataatgcataatttgtattaaatttattactatttcttatgccttttaaaatactgtttactatgaagacaatgtttttaattacaaatccagaattctgtaggcaaaatgctacagttcatatcttcctttaaccaaactgaagtacataaagaccatgtacatgtattcatcaaacgtttattgaatgctgcgtgcctagcgctgtgctatgctctggggtaagagttgtcagcttcagagaagctgagtcctgatcctcaaggaacttgcaaatgtgtctatgaatttgtaaaacaatcaaaagtaggcgtaagcagaataaggcaaaagggaaagtgttctaggttccagcacacctgcaaagataaagtgtgccaagactgtatttatatttcatacttatattgtttcatccttatattggaatgattatatagaaaatgctcttaaaaagattaaacctatttctcagtatggtatcttggtgatttaggaataattgtaaatatatgttacgaatcttcttaaatatatatatatacacaccctgtgagaactgtaaaaagtacctctggttcttggtttaagtttgttggggtataacatgatgagtactcattagcacctgatagaaatctgaaatgtgacagtagcaaaaccactttctactttccaaacaccacagcatcagcatggtttaggggaagcaattcacagattaatgtaccctgcgttttgtcttcaccattgtcaaccagcagtcaaggatgagcaccaggtatagtcctggtttgatatctcaccagccatgtgaactgaagcagcttacttaacctctctggattcatatttcttcatctgtcaaatgagagtaatcatgcccaccctcattgtcatgccagattgtcagaagttccagacagatgagaaagcaaaaagtactttgtaaagtgttatacaatcagaaggtgctttgtgctgaccgtcagattgtgtcaagtcaggtgtgcaaattgaccacactcccaaagaatcatttaaaagtaaagtgacttctaagagacaaggaagtaggaacatttctgatattaaatatataaataatatggatacacatgtgtatatctgtatatggatcttaccatcataattcattttcttcatatcagcaaagtaatagtaatgtgggccaatgcattttggaaatgtcctcattatgtagaatggaatgtgaaaattatttttgttaaaacaggattttgccacaattatttaaatattatgtttgtgaactatctaagcatgagaaaatacaaagctttctttgtatctggctgatactcatttggatgattctgtgactcatagaacatgatgttaaatgagaccagactcaactgccaccagtccccagctgcagaccttcatccccttcatctcccactaggggctcgtggtctggaagaaacatctatcaagcaacacagccccttatcccagatagaaaagtgtctcaaatgcattctactgcgggacagtcagtaggatcattttcataaagcaaggacatcatatgtttctagaaattacaagcatataactttagcctacaatctcttattaaaaatttttaacaaaattgtattacaaatgcatttcatcagaactcaaatttaaatggtgtttgttttgggtttttatttataatgctgaagttattccatataagtatcaagttaaacacaattcattttgattataaactatttgactttttaaaatcttctgacacagtaaatatatatatcaagattgatgtatcaaaatttattgcacactttaaagtgtaaaatcattttttaaaatcttgaatccacaaataaagttctattctgattttaaaaaacaaaa

SEQ ID NO: 158474 - DNA, 2920 bp, Homo sapiens
  Payload ID: 11019
  Gene Symbol: NEDD4L
  Gene Name: neural precursor cell expressed, developmentally down-regulated 4-like, E3 ubiquitin protein ligase
  Uniprot ID: Q96PU5
  ENST ID: ENST00000256830
  CDS Start-End: 1-2616
atggcgaccgggctcggggagccggtctatggactttccgaagacgagggagagtcccgtattctcagagtaaaagttgtttctggaattgatctcgccaaaaaggacatctttggagccagtgatccgtatgtgaaactttcattgtacgtagcggatgagaatagagaacttgctttggtccagacaaaaacaattaaaaagacactgaacccaaaatggaatgaagaattttatttcagggtaaacccatctaatcacagactcctatttgaagtatttgacgaaaatagactgacacgagacgacttcctgggccaggtggacgtgccccttagtcaccttccgacagaagatccaaccatggagcgaccctatacatttaaggactttctcctcagaccaagaagtcataagtctcgagttaagggatttttgcgattgaaaatggcctatatgccaaaaaatggaggtcaagatgaagaaaacagtgaccagagggatgacatggagcatggatgggaagttgttgactcaaatgactcggcttctcagcaccaagaggaacttcctcctcctcctctgcctcccgggtgggaagaaaaagtggacaatttaggccgaacttactatgtcaaccacaacaaccggaccactcagtggcacagaccaagcctgatggacgtgtcctcggagtcggacaataacatcagacagatcaaccaggaggcagcacaccggcgcttccgctcccgcaggcacatcagcgaagacttggagcccgagccctcggagggcggggatgtccccgagccttgggagaccatttcagaggaagtgaatatcgctggagactctctcggtctggctctgcccccaccaccggcctccccaggatctcggaccagccctcaggagctgtcagaggaactaagcagaaggcttcagatcactccagactccaatggggaacagttcagctctttgattcaaagagaaccctcctcaaggttgaggtcatgcagtgtcaccgacgcagttgcagaacagggccatctaccaccgggtgccaaggactcacccgtacgtcgggctgtgaaagacaccctttccaacccacagtccccacagccatcaccttacaactcccccaaaccacaacacaaagtcacacagagcttcttgccacccggctgggaaatgaggatagcgccaaacggccggcccttcttcattgatcataacacaaagactacaacctgggaagatccacgtttgaaatttccagtacatatgcggtcaaagacatctttaaaccccaatgaccttggcccccttcctcctggctgggaagaaagaattcacttggatggccgaacgttttatattgatcataatagcaaaattactcagtgggaagacccaagactgcagaacccagctattactggtccggctgtcccttactccagagaatttaagcagaaatatgactacttcaggaagaaattaaagaaacctgctgatatccccaataggtttgaaatgaaacttcacagaaataacatatttgaagagtcctatcggagaattatgtccgtgaaaagaccagatgtcctaaaagctagactgtggattgagtttgaatcagagaaaggtcttgactatgggggtgtggccagagaatggttcttcttactgtccaaagagatgttcaacccctactacggcctctttgagtactctgccacggacaactacacccttcagatcaaccctaattcaggcctctgtaatgaggatcatttgtcctacttcacttttattggaagagttgctggtctggccgtatttcatgggaagctcttagatggtttcttcattagaccattttacaagatgatgttgggaaagcagataaccctgaatgacatggaatctgtggatagtgaatattacaactctttgaaatggatcctggagaatgaccctactgagctggacctcatgttctgcatagacgaagaaaactttggacagacatatcaagtggatttgaagcccaatgggtcagaaataatggtcacaaatgaaaacaaaagggaatatatcgacttagtcatccagtggagatttgtgaacagggtccagaagcagatgaacgccttcttggagggattcacagaactacttcctattgatttgattaaaatttttgatgaaaatgagctggagttgctcatgtgcggcctcggtgatgtggatgtgaatgactggagacagcattctatttacaagaacggctactgcccaaaccaccccgtcattcagtggttctggaaggctgtgctactcatggacgccgaaaagcgtatccggttactgcagtttgtcacagggacatcgcgagtacctatgaatggatttgccgaactttatggttccaatggtcctcagctgtttacaatagagcaatggggcagtcctgagaaactgcccagagctcacacatgctttaatcgccttgacttacctccatatgaaacctttgaagatttacgagagaaacttctcatggccgtggaaaatgctcaaggatttgaaggggtggattaagcaccctgtgcctcgggggtggttgttcttcaagcaagttctgcttgcacttttgcatttgcctaacagacttttgcagaggcgatggcagagagcagctgcaggcatggtccctggagccgagccttcaccacgcactcgtccaagttcggatgcgggaacctggtcccagcttgagttcctgcctttcccaccacaaattatcaactggttgatgtgtacactaattacatttcaggaggacttaatgctatttatgttgtgcctctgcaggcaaagcccttaataaatattttacatcctt

SEQ ID NO: 158475 - DNA, 3335 bp, Homo sapiens
  Payload ID: 11019
  Gene Symbol: NEDD4L
  Gene Name: neural precursor cell expressed, developmentally down-regulated 4-like, E3 ubiquitin protein ligase
  Uniprot ID: Q96PU5
  ENST ID: ENST00000356462
  CDS Start-End: 295-3030
gcgccgccgccgcgcgcagtgagaggcgccggggctgccgcccggtgctcggcgcgctctcgggagccgcccgcccgctggtcccgcagccttccgggaggaagcggtgccggcagcgtccagggcgcgctctcgggcaccctcacctgccggcgcccggccgcttacccggcagggcgtgcgcagggtagggtgcgggaccggggggacctggaggcagaggggagaaccggccgtccgcgccgcagcacagccgctgggagcgcctcagaccccgcgcggggcgccggctccatggcgaccgggctcggggagccggtctatggactttccgaagacgagggagagtcccgtattctcagagtaaaagttgtttctggaattgatctcgccaaaaaggacatctttggagccagtgatccgtatgtgaaactttcattgtacgtagcggatgagaatagagaacttgctttggtccagacaaaaacaattaaaaagacactgaacccaaaatggaatgaagaattttatttcagggtaaacccatctaatcacagactcctatttgaagtatttgacgaaaatagactgacacgagacgacttcctgggccaggtggacgtgccccttagtcaccttccgacagaagatccaaccatggagcgaccctatacatttaaggactttctcctcagaccaagaagtcataagtctcgagttaagggatttttgcgattgaaaatggcctatatgccaaaaaatggaggtcaagatgaagaaaacagtgaccagagggatgacatggagcatggatgggaagttgttgactcaaatgactcggcttctcagcaccaagaggaacttcctcctcctcctctgcctcccgggtgggaagaaaaagtggacaatttaggccgaacttactatgtcaaccacaacaaccggaccactcagtggcacagaccaagcctgatggacgtgtcctcggagtcggacaataacatcagacagatcaaccaggaggcagcacaccggcgcttccgctcccgcaggcacatcagcgaagacttggagcccgagccctcggagggcggggatgtccccgagccttgggagaccatttcagaggaagtgaatatcgctggagactctctcggtctggctctgcccccaccaccggcctccccaggatctcggaccagccctcaggagctgtcagaggaactaagcagaaggcttcagatcactccagactccaatggggaacagttcagctctttgattcaaagagaaccctcctcaaggttgaggtcatgcagtgtcaccgacgcagttgcagaacagggccatctaccaccgcttgcagaagatggtgcgtccggatcagccacaaacagtaacaaccatctaatcgagcctcagatccgccggcctcgtagcctcagctcgccaacagtaactttatctgccccgctggagggtgccaaggactcacccgtacgtcgggctgtgaaagacaccctttccaacccacagtccccacagccatcaccttacaactcccccaaaccacaacacaaagtcacacagagcttcttgccacccggctgggaaatgaggatagcgccaaacggccggcccttcttcattgatcataacacaaagactacaacctgggaagatccacgtttgaaatttccagtacatatgcggtcaaagacatctttaaaccccaatgaccttggcccccttcctcctggctgggaagaaagaattcacttggatggccgaacgttttatattgatcataatagcaaaattactcagtgggaagacccaagactgcagaacccagctattactggtccggctgtcccttactccagagaatttaagcagaaatatgactacttcaggaagaaattaaagaaacctgctgatatccccaataggtttgaaatgaaacttcacagaaataacatatttgaagagtcctatcggagaattatgtccgtgaaaagaccagatgtcctaaaagctagactgtggattgagtttgaatcagagaaaggtcttgactatgggggtgtggccagagaatggttcttcttactgtccaaagagatgttcaacccctactacggcctctttgagtactctgccacggacaactacacccttcagatcaaccctaattcaggcctctgtaatgaggatcatttgtcctacttcacttttattggaagagttgctggtctggccgtatttcatgggaagctcttagatggtttcttcattagaccattttacaagatgatgttgggaaagcagataaccctgaatgacatggaatctgtggatagtgaatattacaactctttgaaatggatcctggagaatgaccctactgagctggacctcatgttctgcatagacgaagaaaactttggacagacatatcaagtggatttgaagcccaatgggtcagaaataatggtcacaaatgaaaacaaaagggaatatatcgacttagtcatccagtggagatttgtgaacagggtccagaagcagatgaacgccttcttggagggattcacagaactacttcctattgatttgattaaaatttttgatgaaaatgagctggagttgctcatgtgcggcctcggtgatgtggatgtgaatgactggagacagcattctatttacaagaacggctactgcccaaaccaccccgtcattcagtggttctggaaggctgtgctactcatggacgccgaaaagcgtatccggttactgcagtttgtcacagggacatcgcgagtacctatgaatggatttgccgaactttatggttccaatggtcctcagctgtttacaatagagcaatggggcagtcctgagaaactgcccagagctcacacatgctttaatcgccttgacttacctccatatgaaacctttgaagatttacgagagaaacttctcatggccgtggaaaatgctcaaggatttgaaggggtggattaagcaccctgtgcctcgggggtggttgttcttcaagcaagttctgcttgcacttttgcatttgcctaacagacttttgcagaggcgatggcagagagcagctgcaggcatggtccctggagccgagccttcaccacgcactcgtccaagttcggatgcgggaacctggtcccagcttgagttcctgcctttcccaccacaaattatcaactggttgatgtgtacactaattacatttcaggaggacttaatgctatttatgttgtgcctctgcaggcaaagcccttaataaatattttacatccttt

SEQ ID NO: 158476 - DNA, 3543 bp, Homo sapiens
  Payload ID: 11019
  Gene Symbol: NEDD4L
  Gene Name: neural precursor cell expressed, developmentally down-regulated 4-like, E3 ubiquitin protein ligase
  Uniprot ID: Q96PU5
  ENST ID: ENST00000357895
  CDS Start-End: 204-3107
gccatttccagagaggaacaaccgtgtagactgctttcctgggagtcaagttaaaacttctctcctgtgaccttgtcacccggcagtggaaagttacccttggctgcagccacgacttccgcatactcttcagaacttgctctgcccttgagttttccagctttcctttaatgcactaaacctttaatattgtattctcctaaatgagacgtctcgcatttgagcagggagagtcccgtattctcagagtaaaagttgtttctggaattgatctcgccaaaaaggacatctttggagccagtgatccgtatgtgaaactttcattgtacgtagcggatgagaatagagaacttgctttggtccagacaaaaacaattaaaaagacactgaacccaaaatggaatgaagaattttatttcagggtaaacccatctaatcacagactcctatttgaagtatttgacgaaaatagactgacacgagacgacttcctgggccaggtggacgtgccccttagtcaccttccgacagaagatccaaccatggagcgaccctatacatttaaggactttctcctcagaccaagaagtcataagtctcgagttaagggatttttgcgattgaaaatggcctatatgccaaaaaatggaggtcaagatgaagaaaacagtgaccagagggatgacatggagcatggatgggaagttgttgactcaaatgactcggcttctcagcaccaagaggaacttcctcctcctcctctgcctcccgggtgggaagaaaaagtggacaatttaggccgaacttactatgtcaaccacaacaaccggaccactcagtggcacagaccaagcctgatggacgtgtcctcggagtcggacaataacatcagacagatcaaccaggaggcagcacaccggcgcttccgctcccgcaggcacatcagcgaagacttggagcccgagccctcggagggcggggatgtccccgagccttgggagaccatttcagaggaagtgaatatcgctggagactctctcggtctggctctgcccccaccaccggcctccccaggatctcggaccagccctcaggagctgtcagaggaactaagcagaaggcttcagatcactccagactccaatggggaacagttcagctctttgattcaaagagaaccctcctcaaggttgaggtcatgcagtgtcaccgacgcagttgcagaacagggccatctaccaccgcccagtgccccagctgggagagcgcgttcatcaactgtcacgggtggtgaggaaccaacgccatcagtggcctatgtacataccacgccgggtctgccttcaggctgggaagaaagaaaagatgctaaggggcgcacatactatgtcaatcataacaatcgaaccacaacttggactcgacctatcatgcagcttgcagaagatggtgcgtccggatcagccacaaacagtaacaaccatctaatcgagcctcagatccgccggcctcgtagcctcagctcgccaacagtaactttatctgccccgctggagggtgccaaggactcacccgtacgtcgggctgtgaaagacaccctttccaacccacagtccccacagccatcaccttacaactcccccaaaccacaacacaaagtcacacagagcttcttgccacccggctgggaaatgaggatagcgccaaacggccggcccttcttcattgatcataacacaaagactacaacctgggaagatccacgtttgaaatttccagtacatatgcggtcaaagacatctttaaaccccaatgaccttggcccccttcctcctggctgggaagaaagaattcacttggatggccgaacgttttatattgatcataatagcaaaattactcagtgggaagacccaagactgcagaacccagctattactggtccggctgtcccttactccagagaatttaagcagaaatatgactacttcaggaagaaattaaagaaacctgctgatatccccaataggtttgaaatgaaacttcacagaaataacatatttgaagagtcctatcggagaattatgtccgtgaaaagaccagatgtcctaaaagctagactgtggattgagtttgaatcagagaaaggtcttgactatgggggtgtggccagagaatggttcttcttactgtccaaagagatgttcaacccctactacggcctctttgagtactctgccacggacaactacacccttcagatcaaccctaattcaggcctctgtaatgaggatcatttgtcctacttcacttttattggaagagttgctggtctggccgtatttcatgggaagctcttagatggtttcttcattagaccattttacaagatgatgttgggaaagcagataaccctgaatgacatggaatctgtggatagtgaatattacaactctttgaaatggatcctggagaatgaccctactgagctggacctcatgttctgcatagacgaagaaaactttggacagacatatcaagtggatttgaagcccaatgggtcagaaataatggtcacaaatgaaaacaaaagggaatatatcgacttagtcatccagtggagatttgtgaacagggtccagaagcagatgaacgccttcttggagggattcacagaactacttcctattgatttgattaaaatttttgatgaaaatgagctggagttgctcatgtgcggcctcggtgatgtggatgtgaatgactggagacagcattctatttacaagaacggctactgcccaaaccaccccgtcattcagtggttctggaaggctgtgctactcatggacgccgaaaagcgtatccggttactgcagtttgtcacagggacatcgcgagtacctatgaatggatttgccgaactttatggttccaatggtcctcagctgtttacaatagagcaatggggcagtcctgagaaactgcccagagctcacacatgctttaatcgccttgacttacctccatatgaaacctttgaagatttacgagagaaacttctcatggccgtggaaaatgctcaaggatttgaaggggtggattaagcaccctgtgcctcgggggtggttgttcttcaagcaagttctgcttgcacttttgcatttgcctaacagacttttgcagaggcgatggcagagagcagctgcaggcatggtccctggagccgagccttcaccacgcactcgtccaagttcggatgcgggaacctggtcccagcttgagttcctgcctttcccaccacaaattatcaactggttgatgtgtacactaattacatttcaggaggacttaatgctatttatgttgtgcctctgcaggcaaagcccttaataaatattttacatcctttctaatgacaatgaatggaattaatcactcaacaggtatagtattacgactcatgtttactttttaaaatgatttagaccgattttcagattttatttcgttatgattaaagatgtctcatgtacttggaaa

SEQ ID NO: 158477 - DNA, 8251 bp, Homo sapiens
  Payload ID: 11019
  Gene Symbol: NEDD4L
  Gene Name: neural precursor cell expressed, developmentally down-regulated 4-like, E3 ubiquitin protein ligase
  Uniprot ID: Q96PU5
  ENST ID: ENST00000382850
  CDS Start-End: 114-2981
cgcagggtagggtgcgggaccggggggacctggaggcagaggggagaaccggccgtccgcgccgcagcacagccgctgggagcgcctcagaccccgcgcggggcgccggctccatggcgaccgggctcggggagccggtctatggactttccgaagacgagggagagtcccgtattctcagagtaaaagttgtttctggaattgatctcgccaaaaaggacatctttggagccagtgatccgtatgtgaaactttcattgtacgtagcggatgagaatagagaacttgctttggtccagacaaaaacaattaaaaagacactgaacccaaaatggaatgaagaattttatttcagggtaaacccatctaatcacagactcctatttgaagtatttgacgaaaatagactgacacgagacgacttcctgggccaggtggacgtgccccttagtcaccttccgacagaagatccaaccatggagcgaccctatacatttaaggactttctcctcagaccaagaagtcataagtctcgagttaagggatttttgcgattgaaaatggcctatatgccaaaaaatggaggtcaagatgaagaaaacagtgaccagagggatgacatggagcatggatgggaagttgttgactcaaatgactcggcttctcagcaccaagaggaacttcctcctcctcctctgcctcccgggtgggaagaaaaagtggacaatttaggccgaacttactatgtcaaccacaacaaccggaccactcagtggcacagaccaagcctgatggacgtgtcctcggagtcggacaataacatcagacagatcaaccaggaggcagcacaccggcgcttccgctcccgcaggcacatcagcgaagacttggagcccgagccctcggagggcggggatgtccccgagccttgggagaccatttcagaggaagtgaatatcgctggagactctctcggtctggctctgcccccaccaccggcctccccaggatctcggaccagccctcaggagctgtcagaggaactaagcagaaggcttcagatcactccagactccaatggggaacagttcagctctttgattcaaagagaaccctcctcaaggttgaggtcatgcagtgtcaccgacgcagttgcagaacagggccatctaccaccgccatcagtggcctatgtacataccacgccgggtctgccttcaggctgggaagaaagaaaagatgctaaggggcgcacatactatgtcaatcataacaatcgaaccacaacttggactcgacctatcatgcagcttgcagaagatggtgcgtccggatcagccacaaacagtaacaaccatctaatcgagcctcagatccgccggcctcgtagcctcagctcgccaacagtaactttatctgccccgctggagggtgccaaggactcacccgtacgtcgggctgtgaaagacaccctttccaacccacagtccccacagccatcaccttacaactcccccaaaccacaacacaaagtcacacagagcttcttgccacccggctgggaaatgaggatagcgccaaacggccggcccttcttcattgatcataacacaaagactacaacctgggaagatccacgtttgaaatttccagtacatatgcggtcaaagacatctttaaaccccaatgaccttggcccccttcctcctggctgggaagaaagaattcacttggatggccgaacgttttatattgatcataatagcaaaattactcagtgggaagacccaagactgcagaacccagctattactggtccggctgtcccttactccagagaatttaagcagaaatatgactacttcaggaagaaattaaagaaacctgctgatatccccaataggtttgaaatgaaacttcacagaaataacatatttgaagagtcctatcggagaattatgtccgtgaaaagaccagatgtcctaaaagctagactgtggattgagtttgaatcagagaaaggtcttgactatgggggtgtggccagagaatggttcttcttactgtccaaagagatgttcaacccctactacggcctctttgagtactctgccacggacaactacacccttcagatcaaccctaattcaggcctctgtaatgaggatcatttgtcctacttcacttttattggaagagttgctggtctggccgtatttcatgggaagctcttagatggtttcttcattagaccattttacaagatgatgttgggaaagcagataaccctgaatgacatggaatctgtggatagtgaatattacaactctttgaaatggatcctggagaatgaccctactgagctggacctcatgttctgcatagacgaagaaaactttggacagacatatcaagtggatttgaagcccaatgggtcagaaataatggtcacaaatgaaaacaaaagggaatatatcgacttagtcatccagtggagatttgtgaacagggtccagaagcagatgaacgccttcttggagggattcacagaactacttcctattgatttgattaaaatttttgatgaaaatgagctggagttgctcatgtgcggcctcggtgatgtggatgtgaatgactggagacagcattctatttacaagaacggctactgcccaaaccaccccgtcattcagtggttctggaaggctgtgctactcatggacgccgaaaagcgtatccggttactgcagtttgtcacagggacatcgcgagtacctatgaatggatttgccgaactttatggttccaatggtcctcagctgtttacaatagagcaatggggcagtcctgagaaactgcccagagctcacacatgctttaatcgccttgacttacctccatatgaaacctttgaagatttacgagagaaacttctcatggccgtggaaaatgctcaaggatttgaaggggtggattaagcaccctgtgcctcgggggtggttgttcttcaagcaagttctgcttgcacttttgcatttgcctaacagacttttgcagaggcgatggcagagagcagctgcaggcatggtccctggagccgagccttcaccacgcactcgtccaagttcggatgcgggaacctggtcccagcttgagttcctgcctttcccaccacaaattatcaactggttgatgtgtacactaattacatttcaggaggacttaatgctatttatgttgtgcctctgcaggcaaagcccttaataaatattttacatcctttctaatgacaatgaatggaattaatcactcaacaggtatagtattacgactcatgtttactttttaaaatgatttagaccgattttcagattttatttcgttatgattaaagatgtctcatgtacttggaaaagtgagcattttttttttttttgtatttcactttcataccaggcttaatgtcaatgacatttttatttttgaagtactctgacacctccaccctctactttattagaattggaaggcaaatttttgtccaaaaacctacagacaagtactttgagagaatttccaatataatattagacataatgataattttttccatactcagaatgaaaaactggatattacgtttttgttttggggtttttttgtacaaatttagctaatagctacaggctgagagaattgtaacatagcatgacaaattttgtgttgacttgaaaggaatcacaccattattccttagaagtaattacatgtgttctaacacatttgagacagggttggactcccatttctcatccgagaaattacttaacccttcctggcgctgtacagtcatcttttattctatttcctctttgctgtttgtagtagagacattttgaatgaaacttggcactgcttgattcaaaactgtggaaaccagatctgtttagtctcctgtttgtatgcgtttgctaatggtagctaaataaccagtttttgttgtaaatgcaccaattctgaaggcactttatgtactacatggaggtcatatctggttttgtttttatttttttatcatgaacattaaatgtgatgatgatttcttttccctgcacacatctttccggtgcaatatctatcaattgtgaatctggctgctggtgtataaaaacctggatgtaaagctgagcctacagacctgtcctcaccaactgttttgtgatttctactcaactacaaagatttatttaatgtactcttaatctaactgagttttgttaccaatgacctgttgcatgcttcaataccgtgtactgcctgagttgtgcctcttgtgtgctagattaaaagtgagacagagacttgacttgatcctctgagctcaagctattgagctggtagtggcagaggactgagggtacctgcacagtttgattcttttccacgtgtaagtctccattgcagaattgtcgtgctttgagaaaacacctgaggcagtgtgggagttgaacgaccctgctgtcctttttaacctgtgttgtcctagaccctgtcggggcagtcaggggacactagagatttgatctcatgcgagtcatcaataggacaaaaaagttgtggtttggggaggtctgtttgttacataaaaaggacctttcggtgtaagaaattgccgtttttaccctgccctggctggcatgtgagaagccatggaaggttgtggttgtaaatgagttgtctaaaggggtgcagaggcctgaggtttctaaaagaaggtagatttctacagagctgagtgttggttcctttttcttattggttgaaaattacctggtagtgatcagaaaacttagatgctatgtaactaaaaaaaaaaaaaaaaaaaaaaaaaaaaaaaaaaaaattcccgctcatgagttttgactattggtgagatgttttccgctacagttaacatgacaaatgtctcagtggcaaaaatcccctttttgtaagcccccatagtctagaggcagttttctttttaagaatcatgccagagcctgagtcgagcagtatgctttcttggtttttgagagtaattgtgtaattgtagagggagaaatccaattctaacctaagaactgggattcttctgtcatcttgtaaaccgtatattgaaaaaaacagaatgtcactaaatgcatattaagtcaagtattggaaagtataaaagaaaaatcattctgacaatttctaagccagaagcaaacaagaattactgaaatctaccccatgaatacttggaaggcagtaattgtgagtgacacctcagttcatcaaccccttaataatatcagcttaattttaatgacaactaaatatgctgaagtgaggatttagtattttttaaaaaagcaaaacaaggttcagtagtcctcagcaattctccaagtttctctctttgcctaaaatggtcatagatcttgatttctctgaatcgtgatgaccacacccagtcatcttcacagcataattgcaggtggcagtaaagagagtgtgctgggtaaggagcagttgctgggtcattccttgggccccgacctgcccggggagtagccctgggggagagagggcagtgttgcctatcccagaggtcccagcagtcacactgctctgcaggccgggctctctttatagccagagaaatcaccttaatgcagtctctttagttgtctgctgaagctgtagttattatgggccacttacatgaggctgagaagtacgtgccggagctcacacactgcctgttgcggttctcttaacatcagttatcacagctgcctgtgggtcccgggtatttccattcctgccccttgttggcccgaggaaggatgtggaaagagcacctggtgggatgaaggtccaacagcctgtgcctctccactgctggccctggagccggcagcagtgaggcattcattgtctgtgttgcggtgtattcccagcttcagtgctcttttcctttttgcctgaaatgtttatgcttctctgcagccagtcctctaacaaatctcaagaacaaaggtaagacacttggtttttgtttccaggacccttcagaaggtgacatcagatattccctaaattcagacaatgagggatacagagcgacttggcatgtattatttctcccatgtaaggacaaagggacagattattattgttatttctgagacagagtcttgctctgtagctcaggctggagtgcagtggctcaatctcagctcaccacaacctctgcctcctggcttcaagcgattcttctgcctcagcctccccgaatagttgggattacaggcacccaccaccacgcctggctaatttttgtatttttagtagagatggtttcaccatgctggccaggctggtcttgaactcctgacctcaggtgatcctcccgcctcagccttccaaagtgctgggattacaagcatgagccaccgcacccggcctcacagtgacagattctgagaaacagcatgcaaaacatttgaaccattttctacatctcccattgttgcatagagagtgtgcaccgctgctatcttgccagatccacactggtcctcccgaaagccaggttcatacacagcaactttttaattattctaacagttacccattaacagtcgactcctgtatttctgagagtcttgtactcacctctgaaatttaaaaacgtataaagagagcctgggttaatcagttctgcagcccctacgtgacactgtgctagttctccttcttctgtctcctccttaccctggccctgcacccctgtacttaagagggagaggtgggaggtgctgtctggtatcatttgctgcctcgccagtagagggtgccgctgtgcagggtaactgcccgcctgctcccttcctgacctcccctgaccccgaagatcactacctctgtcattcaggcattggggtacatcctgataagtcgtgtcagaactgccaatttcaggactgagatgtgtttttaaaaaacaaatccttataaactccactttgtactttagattttaaaactggggaaaaatgtgatattctttggaccacttttttaatttatataagccttaatgaacagtgtctatacatttgcatacacacacccccaccccagagtgttctcagtatgtcagagaaagtgccacagcattaggacgggagcttggagaacgttttctagaaaagggttagcttcctgttggcatgaaattttccaagcaaacctcattaaacatctgttgtttgttaaagatgttccactgaaagcaacgcatgtttcaaaggcacgtctttccgttcgttggttttctgtgtgtaaggagtagcattgctgttggcgcctaacctcgcgtgcactgcattctcaaccccgtaccagtgcatcatcagaagccttcctcgtgaccataactctgtgtctgcagatatgtgttcccgtgtaagccagttttccccttttactcagactgatttcacctagattgtcacggtttccttcatgttaactttgcgtgactttgttcttcctttactactctgtatgtaatatatatacatatatacgtacatatgctgtccaaatatatttgtatatatttgtatagcatttttacacctttattgagtaatctggtttcgaaaggaggtgagagtttagtcccttctgcagttttctccaagctgtgtcctgtgaatttcaacccttggagcctaagaaaaccctaggaagatgatgttaatttgctgtcatttcctaattcaggatctatcatcaaatgaaacatgaaaaaaacagtgacttttaaggtgaaaagagtttcaagcattccaaataaattatcaatgtttcataactttttattataaacccacctcctaataggaagccaagtactatttgatacagtggtaaaaaccaaactaccttgaatttttttaaggcaacttatgaataatgctcattttcacagtcagaatagctttaaaatatggttgaatttgatacacacaggaagttttcttgaagaacaatcctttcgcttttcttttttcttgagagatctaaagagaaactgtagattgttttcctgacagcaaaagactaatgtgacaaaatgaagtcattgtaaagaagcgatgcaacttgtcaaatatttaataaagaattatggaagctggaacattttcta

SEQ ID NO: 158478 - DNA, 3647 bp, Homo sapiens
  Payload ID: 11019
  Gene Symbol: NEDD4L
  Gene Name: neural precursor cell expressed, developmentally down-regulated 4-like, E3 ubiquitin protein ligase
  Uniprot ID: Q96PU5
  ENST ID: ENST00000400345
  CDS Start-End: 284-3211
gcgcgcagtgagaggcgccggggctgccgcccggtgctcggcgcgctctcgggagccgcccgcccgctggtcccgcagccttccgggaggaagcggtgccggcagcgtccagggcgcgctctcgggcaccctcacctgccggcgcccggccgcttacccggcagggcgtgcgcagggtagggtgcgggaccggggggacctggaggcagaggggagaaccggccgtccgcgccgcagcacagccgctgggagcgcctcagaccccgcgcggggcgccggctccatggcgaccgggctcggggagccggtctatggactttccgaagacgagggagagtcccgtattctcagagtaaaagttgtttctggaattgatctcgccaaaaaggacatctttggagccagtgatccgtatgtgaaactttcattgtacgtagcggatgagaatagagaacttgctttggtccagacaaaaacaattaaaaagacactgaacccaaaatggaatgaagaattttatttcagggtaaacccatctaatcacagactcctatttgaagtatttgacgaaaatagactgacacgagacgacttcctgggccaggtggacgtgccccttagtcaccttccgacagaagatccaaccatggagcgaccctatacatttaaggactttctcctcagaccaagaagtcataagtctcgagttaagggatttttgcgattgaaaatggcctatatgccaaaaaatggaggtcaagatgaagaaaacagtgaccagagggatgacatggagcatggatgggaagttgttgactcaaatgactcggcttctcagcaccaagaggaacttcctcctcctcctctgcctcccgggtgggaagaaaaagtggacaatttaggccgaacttactatgtcaaccacaacaaccggaccactcagtggcacagaccaagcctgatggacgtgtcctcggagtcggacaataacatcagacagatcaaccaggaggcagcacaccggcgcttccgctcccgcaggcacatcagcgaagacttggagcccgagccctcggagggcggggatgtccccgagccttgggagaccatttcagaggaagtgaatatcgctggagactctctcggtctggctctgcccccaccaccggcctccccaggatctcggaccagccctcaggagctgtcagaggaactaagcagaaggcttcagatcactccagactccaatggggaacagttcagctctttgattcaaagagaaccctcctcaaggttgaggtcatgcagtgtcaccgacgcagttgcagaacagggccatctaccaccgcccagtgccccagctgggagagcgcgttcatcaactgtcacgggtggtgaggaaccaacgccatcagtggcctatgtacataccacgccgggtctgccttcaggctgggaagaaagaaaagatgctaaggggcgcacatactatgtcaatcataacaatcgaaccacaacttggactcgacctatcatgcagcttgcagaagatggtgcgtccggatcagccacaaacagtaacaaccatctaatcgagcctcagatccgccggcctcgtagcctcagctcgccaacagtaactttatctgccccgctggagggtgccaaggactcacccgtacgtcgggctgtgaaagacaccctttccaacccacagtccccacagccatcaccttacaactcccccaaaccacaacacaaagtcacacagagcttcttgccacccggctgggaaatgaggatagcgccaaacggccggcccttcttcattgatcataacacaaagactacaacctgggaagatccacgtttgaaatttccagtacatatgcggtcaaagacatctttaaaccccaatgaccttggcccccttcctcctggctgggaagaaagaattcacttggatggccgaacgttttatattgatcataatagcaaaattactcagtgggaagacccaagactgcagaacccagctattactggtccggctgtcccttactccagagaatttaagcagaaatatgactacttcaggaagaaattaaagaaacctgctgatatccccaataggtttgaaatgaaacttcacagaaataacatatttgaagagtcctatcggagaattatgtccgtgaaaagaccagatgtcctaaaagctagactgtggattgagtttgaatcagagaaaggtcttgactatgggggtgtggccagagaatggttcttcttactgtccaaagagatgttcaacccctactacggcctctttgagtactctgccacggacaactacacccttcagatcaaccctaattcaggcctctgtaatgaggatcatttgtcctacttcacttttattggaagagttgctggtctggccgtatttcatgggaagctcttagatggtttcttcattagaccattttacaagatgatgttgggaaagcagataaccctgaatgacatggaatctgtggatagtgaatattacaactctttgaaatggatcctggagaatgaccctactgagctggacctcatgttctgcatagacgaagaaaactttggacagacatatcaagtggatttgaagcccaatgggtcagaaataatggtcacaaatgaaaacaaaagggaatatatcgacttagtcatccagtggagatttgtgaacagggtccagaagcagatgaacgccttcttggagggattcacagaactacttcctattgatttgattaaaatttttgatgaaaatgagctggagttgctcatgtgcggcctcggtgatgtggatgtgaatgactggagacagcattctatttacaagaacggctactgcccaaaccaccccgtcattcagtggttctggaaggctgtgctactcatggacgccgaaaagcgtatccggttactgcagtttgtcacagggacatcgcgagtacctatgaatggatttgccgaactttatggttccaatggtcctcagctgtttacaatagagcaatggggcagtcctgagaaactgcccagagctcacacatgctttaatcgccttgacttacctccatatgaaacctttgaagatttacgagagaaacttctcatggccgtggaaaatgctcaaggatttgaaggggtggattaagcaccctgtgcctcgggggtggttgttcttcaagcaagttctgcttgcacttttgcatttgcctaacagacttttgcagaggcgatggcagagagcagctgcaggcatggtccctggagccgagccttcaccacgcactcgtccaagttcggatgcgggaacctggtcccagcttgagttcctgcctttcccaccacaaattatcaactggttgatgtgtacactaattacatttcaggaggacttaatgctatttatgttgtgcctctgcaggcaaagcccttaataaatattttacatcctttctaatgacaatgaatggaattaatcactcaacaggtatagtattacgactcatgtttactttttaaaatgatttagaccgattttcagattttatttcgttatgattaaagatgtctcatgtacttggaaa

SEQ ID NO: 158479 - DNA, 3338 bp, Homo sapiens
  Payload ID: 11019
  Gene Symbol: NEDD4L
  Gene Name: neural precursor cell expressed, developmentally down-regulated 4-like, E3 ubiquitin protein ligase
  Uniprot ID: Q96PU5
  ENST ID: ENST00000431212
  CDS Start-End: 465-3029
atcagtataagtagcgagctgggcgcattccttctcagttgtgttaaaacttgctggtattcccccggtatcagcagaggtgtgtacgggcactgctttaaaactgggaaggaggaagacgaggccagggagccggagggtcaccaaggtagatttccagcagcgctagtccagctgaacactttccagccttgtttttcagcagctttgaggaaaagtatagtgatccgtatgtgaaactttcattgtacgtagcggatgagaatagagaacttgctttggtccagacaaaaacaattaaaaagacactgaacccaaaatggaatgaagaattttatttcagggtaaacccatctaatcacagactcctatttgaagtatttgacgaaaatagactgacacgagacgacttcctgggccaggtggacgtgccccttagtcaccttccgacagaagatccaaccatggagcgaccctatacatttaaggactttctcctcagaccaagaagtcataagtctcgagttaagggatttttgcgattgaaaatggcctatatgccaaaaaatggaggtcaagatgaagaaaacagtgaccagagggatgacatggagcatggatgggaagttgttgactcaaatgactcggcttctcagcaccaagaggaacttcctcctcctcctctgcctcccgggtgggaagaaaaagtggacaatttaggccgaacttactatgtcaaccacaacaaccggaccactcagtggcacagaccaagcctgatggacgtgtcctcggagtcggacaataacatcagacagatcaaccaggaggcagcacaccggcgcttccgctcccgcaggcacatcagcgaagacttggagcccgagccctcggagggcggggatgtccccgagccttgggagaccatttcagaggaagtgaatatcgctggagactctctcggtctggctctgcccccaccaccggcctccccaggatctcggaccagccctcaggagctgtcagaggaactaagcagaaggcttcagatcactccagactccaatggggaacagttcagctctttgattcaaagagaaccctcctcaaggttgaggtcatgcagtgtcaccgacgcagttgcagaacagggccatctaccaccgcccagtgccccagctgggagagcgcgttcatcaactgtcacgggtggtgaggaaccaacgccatcagtggcctatgtacataccacgccgggtctgccttcaggctgggaagaaagaaaagatgctaaggggcgcacatactatgtcaatcataacaatcgaaccacaacttggactcgacctatcatgcagcttgcagaagatggtgcgtccggatcagccacaaacagtaacaaccatctaatcgagcctcagatccgccggcctcgtagcctcagctcgccaacagtaactttatctgccccgctggagggtgccaaggactcacccgtacgtcgggctgtgaaagacaccctttccaacccacagtccccacagccatcaccttacaactcccccaaaccacaacacaaagtcacacagagcttcttgccacccggctgggaaatgaggatagcgccaaacggccggcccttcttcattgatcataacacaaagactacaacctgggaagatccacgtttgaaatttccagtacatatgcggtcaaagacatctttaaaccccaatgaccttggcccccttcctcctggctgggaagaaagaattcacttggatggccgaacgttttatattgatcataatagcaaaattactcagtgggaagacccaagactgcagaacccagctattactggtccggctgtcccttactccagagaatttaagcagaaatatgactacttcaggaagaaattaaagaaacctgctgatatccccaataggtttgaaatgaaacttcacagaaataacatatttgaagagtcctatcggagaattatgtccgtgaaaagaccagatgtcctaaaagctagactgtggattgagtttgaatcagagaaaggtcttgactatgggggtgtggccagagaatggttcttcttactgtccaaagagatgttcaacccctactacggcctctttgagtactctgccacggacaactacacccttcagatcaaccctaattcaggcctctgtaatgaggatcatttgtcctacttcacttttattggaagagttgctggtctggccgtatttcatgggaagctcttagatggtttcttcattagaccattttacaagatgatgttgggaaagcagataaccctgaatgacatggaatctgtggatagtgaatattacaactctttgaaatggatcctggagaatgaccctactgagctggacctcatgttctgcatagacgaagaaaactttggacagacatatcaagtggatttgaagcccaatgggtcagaaataatggtcacaaatgaaaacaaaagggaatatatcgacttagtcatccagtggagatttgtgaacagggtccagaagcagatgaacgccttcttggagggattcacagaactacttcctattgatttgattaaaatttttgatgaaaatgagctggagttgctcatgtgcggcctcggtgatgtggatgtgaatgactggagacagcattctatttacaagaacggctactgcccaaaccaccccgtcattcagtggttctggaaggctgtgctactcatggacgccgaaaagcgtatccggttactgcagtttgtcacagggacatcgcgagtacctatgaatggatttgccgaactttatggttccaatggtcctcagctgtttacaatagagcaatggggcagtcctgagaaactgcccagagctcacacatgctttaatcgccttgacttacctccatatgaaacctttgaagatttacgagagaaacttctcatggccgtggaaaatgctcaaggatttgaaggggtggattaagcaccctgtgcctcgggggtggttgttcttcaagcaagttctgcttgcacttttgcatttgcctaacagacttttgcagaggcgatggcagagagcagctgcaggcatggtccctggagccgagccttcaccacgcactcgtccaagttcggatgcgggaacctggtcccagcttgagttcctgcctttcccaccacaaattatcaactggttgatgtgtacactaattacatttcaggaggacttaatgctatttatgttgtgcctctgcaggcaaagcccttaataaatattttacatcctttctaa

SEQ ID NO: 158480 - DNA, 3417 bp, Homo sapiens
  Payload ID: 11019
  Gene Symbol: NEDD4L
  Gene Name: neural precursor cell expressed, developmentally down-regulated 4-like, E3 ubiquitin protein ligase
  Uniprot ID: Q96PU5
  ENST ID: ENST00000435432
  CDS Start-End: 631-3135
gccatttccagagaggaacaaccgtgtagactgctttcctgggagtcaagttaaaacttctctcctgtgaccttgtcacccggcagtggaaagttacccttggctgcagccacgacttccgcatactcttcagaacttgctctgcccttgagttttccagctttcctttaatgcactaaacctttaatattgtattctcctaaatgagacgtctcgcatttgagcaggtaacactcgggagagtcccgtattctcagagtaaaagttgtttctggaattgatctcgccaaaaaggacatctttggagccagcttctgctccattgctgttgaacttttttttggtcgtgacatcagaaaaataaccaagtgtgagtctgataatagcaatgatccgtatgtgaaactttcattgtacgtagcggatgagaatagagaacttgctttggtccagacaaaaacaattaaaaagacactgaacccaaaatggaatgaagaattttatttcagggtaaacccatctaatcacagactcctatttgaagtatttgacgaaaatagactgacacgagacgacttcctgggccaggtggacgtgccccttagtcaccttccgacagaagatccaaccatggagcgaccctatacatttaaggactttctcctcagaccaagaagtcataagtctcgagttaagggatttttgcgattgaaaatggcctatatgccaaaaaatggaggtcaagatgaagaaaacagtgaccagagggatgacatggagcatggatgggaagttgttgactcaaatgactcggcttctcagcaccaagaggaacttcctcctcctcctctgcctcccgggtgggaagaaaaagtggacaatttaggccgaacttactatgtcaaccacaacaaccggaccactcagtggcacagaccaagcctgatggacgtgtcctcggagtcggacaataacatcagacagatcaaccaggaggcagcacaccggcgcttccgctcccgcaggcacatcagcgaagacttggagcccgagccctcggagggcggggatgtccccgagccttgggagaccatttcagaggaagtgaatatcgctggagactctctcggtctggctctgcccccaccaccggcctccccaggatctcggaccagccctcaggagctgtcagaggaactaagcagaaggcttcagatcactccagactccaatggggaacagttcagctctttgattcaaagagaaccctcctcaaggttgaggtcatgcagtgtcaccgacgcagttgcagaacagggccatctaccaccgccatcagtggcctatgtacataccacgccgggtctgccttcaggctgggaagaaagaaaagatgctaaggggcgcacatactatgtcaatcataacaatcgaaccacaacttggactcgacctatcatgcagcttgcagaagatggtgcgtccggatcagccacaaacagtaacaaccatctaatcgagcctcagatccgccggcctcgtagcctcagctcgccaacagtaactttatctgccccgctggagggtgccaaggactcacccgtacgtcgggctgtgaaagacaccctttccaacccacagtccccacagccatcaccttacaactcccccaaaccacaacacaaagtcacacagagcttcttgccacccggctgggaaatgaggatagcgccaaacggccggcccttcttcattgatcataacacaaagactacaacctgggaagatccacgtttgaaatttccagtacatatgcggtcaaagacatctttaaaccccaatgaccttggcccccttcctcctggctgggaagaaagaattcacttggatggccgaacgttttatattgatcataatagcaaaattactcagtgggaagacccaagactgcagaacccagctattactggtccggctgtcccttactccagagaatttaagcagaaatatgactacttcaggaagaaattaaagaaacctgctgatatccccaataggtttgaaatgaaacttcacagaaataacatatttgaagagtcctatcggagaattatgtccgtgaaaagaccagatgtcctaaaagctagactgtggattgagtttgaatcagagaaaggtcttgactatgggggtgtggccagagaatggttcttcttactgtccaaagagatgttcaacccctactacggcctctttgagtactctgccacggacaactacacccttcagatcaaccctaattcaggcctctgtaatgaggatcatttgtcctacttcacttttattggaagagttgctggtctggccgtatttcatgggaagctcttagatggtttcttcattagaccattttacaagatgatgttgggaaagcagataaccctgaatgacatggaatctgtggatagtgaatattacaactctttgaaatggatcctggagaatgaccctactgagctggacctcatgttctgcatagacgaagaaaactttggacagacatatcaagtggatttgaagcccaatgggtcagaaataatggtcacaaatgaaaacaaaagggaatatatcgacttagtcatccagtggagatttgtgaacagggtccagaagcagatgaacgccttcttggagggattcacagaactacttcctattgatttgattaaaatttttgatgaaaatgagctggagttgctcatgtgcggcctcggtgatgtggatgtgaatgactggagacagcattctatttacaagaacggctactgcccaaaccaccccgtcattcagtggttctggaaggctgtgctactcatggacgccgaaaagcgtatccggttactgcagtttgtcacagggacatcgcgagtacctatgaatggatttgccgaactttatggttccaatggtcctcagctgtttacaatagagcaatggggcagtcctgagaaactgcccagagctcacacatgctttaatcgccttgacttacctccatatgaaacctttgaagatttacgagagaaacttctcatggccgtggaaaatgctcaaggatttgaaggggtggattaagcaccctgtgcctcgggggtggttgttcttcaagcaagttctgcttgcacttttgcatttgcctaacagacttttgcagaggcgatggcagagagcagctgcaggcatggtccctggagccgagccttcaccacgcactcgtccaagttcggatgcgggaacctggtcccagcttgagttcctgcctttcccaccacaaattatcaactggttgatgtgtacactaattacatttcaggaggacttaatgctatttatgttgtgcctctgcaggcaaagccc

SEQ ID NO: 158481 - DNA, 4978 bp, Homo sapiens
  Payload ID: 11019
  Gene Symbol: NEDD4L
  Gene Name: neural precursor cell expressed, developmentally down-regulated 4-like, E3 ubiquitin protein ligase
  Uniprot ID: Q96PU5
  ENST ID: ENST00000456173
  CDS Start-End: 586-3090
acttccgtgttccccacatttgaatttgctcccgattcgagagaggcaggcatccgcggcagcagcttccaacccagacaggcttaagccgcgcgagggtgcccgggtgggtggctgcgcagggccctacctgggcgggagcggctgcagagccctgtccacgcggtgcctccccagcacggcacctcccactccaggctgttggttacctggccgggagctggcggagaccaggatttctcctcgccgccgttgctgttgttaggggaaacagaccatctgcatctagacctgcctctctctccgctccccacttcagacgagctcttcctgcctggaatctgtgatccgtatgtgaaactttcattgtacgtagcggatgagaatagagaacttgctttggtccagacaaaaacaattaaaaagacactgaacccaaaatggaatgaagaattttatttcagggtaaacccatctaatcacagactcctatttgaagtatttgacgaaaatagactgacacgagacgacttcctgggccaggtggacgtgccccttagtcaccttccgacagaagatccaaccatggagcgaccctatacatttaaggactttctcctcagaccaagaagtcataagtctcgagttaagggatttttgcgattgaaaatggcctatatgccaaaaaatggaggtcaagatgaagaaaacagtgaccagagggatgacatggagcatggatgggaagttgttgactcaaatgactcggcttctcagcaccaagaggaacttcctcctcctcctctgcctcccgggtgggaagaaaaagtggacaatttaggccgaacttactatgtcaaccacaacaaccggaccactcagtggcacagaccaagcctgatggacgtgtcctcggagtcggacaataacatcagacagatcaaccaggaggcagcacaccggcgcttccgctcccgcaggcacatcagcgaagacttggagcccgagccctcggagggcggggatgtccccgagccttgggagaccatttcagaggaagtgaatatcgctggagactctctcggtctggctctgcccccaccaccggcctccccaggatctcggaccagccctcaggagctgtcagaggaactaagcagaaggcttcagatcactccagactccaatggggaacagttcagctctttgattcaaagagaaccctcctcaaggttgaggtcatgcagtgtcaccgacgcagttgcagaacagggccatctaccaccgccatcagtggcctatgtacataccacgccgggtctgccttcaggctgggaagaaagaaaagatgctaaggggcgcacatactatgtcaatcataacaatcgaaccacaacttggactcgacctatcatgcagcttgcagaagatggtgcgtccggatcagccacaaacagtaacaaccatctaatcgagcctcagatccgccggcctcgtagcctcagctcgccaacagtaactttatctgccccgctggagggtgccaaggactcacccgtacgtcgggctgtgaaagacaccctttccaacccacagtccccacagccatcaccttacaactcccccaaaccacaacacaaagtcacacagagcttcttgccacccggctgggaaatgaggatagcgccaaacggccggcccttcttcattgatcataacacaaagactacaacctgggaagatccacgtttgaaatttccagtacatatgcggtcaaagacatctttaaaccccaatgaccttggcccccttcctcctggctgggaagaaagaattcacttggatggccgaacgttttatattgatcataatagcaaaattactcagtgggaagacccaagactgcagaacccagctattactggtccggctgtcccttactccagagaatttaagcagaaatatgactacttcaggaagaaattaaagaaacctgctgatatccccaataggtttgaaatgaaacttcacagaaataacatatttgaagagtcctatcggagaattatgtccgtgaaaagaccagatgtcctaaaagctagactgtggattgagtttgaatcagagaaaggtcttgactatgggggtgtggccagagaatggttcttcttactgtccaaagagatgttcaacccctactacggcctctttgagtactctgccacggacaactacacccttcagatcaaccctaattcaggcctctgtaatgaggatcatttgtcctacttcacttttattggaagagttgctggtctggccgtatttcatgggaagctcttagatggtttcttcattagaccattttacaagatgatgttgggaaagcagataaccctgaatgacatggaatctgtggatagtgaatattacaactctttgaaatggatcctggagaatgaccctactgagctggacctcatgttctgcatagacgaagaaaactttggacagacatatcaagtggatttgaagcccaatgggtcagaaataatggtcacaaatgaaaacaaaagggaatatatcgacttagtcatccagtggagatttgtgaacagggtccagaagcagatgaacgccttcttggagggattcacagaactacttcctattgatttgattaaaatttttgatgaaaatgagctggagttgctcatgtgcggcctcggtgatgtggatgtgaatgactggagacagcattctatttacaagaacggctactgcccaaaccaccccgtcattcagtggttctggaaggctgtgctactcatggacgccgaaaagcgtatccggttactgcagtttgtcacagggacatcgcgagtacctatgaatggatttgccgaactttatggttccaatggtcctcagctgtttacaatagagcaatggggcagtcctgagaaactgcccagagctcacacatgctttaatcgccttgacttacctccatatgaaacctttgaagatttacgagagaaacttctcatggccgtggaaaatgctcaaggatttgaaggggtggattaagcaccctgtgcctcgggggtggttgttcttcaagcaagttctgcttgcacttttgcatttgcctaacagacttttgcagaggcgatggcagagagcagctgcaggcatggtccctggagccgagccttcaccacgcactcgtccaagttcggatgcgggaacctggtcccagcttgagttcctgcctttcccaccacaaattatcaactggttgatgtgtacactaattacatttcaggaggacttaatgctatttatgttgtgcctctgcaggcaaagcccttaataaatattttacatcctttctaatgacaatgaatggaattaatcactcaacaggtatagtattacgactcatgtttactttttaaaatgatttagaccgattttcagattttatttcgttatgattaaagatgtctcatgtacttggaaaagtgagcattttttttttttttgtatttcactttcataccaggcttaatgtcaatgacatttttatttttgaagtactctgacacctccaccctctactttattagaattggaaggcaaatttttgtccaaaaacctacagacaagtactttgagagaatttccaatataatattagacataatgataattttttccatactcagaatgaaaaactggatattacgtttttgttttggggtttttttgtacaaatttagctaatagctacaggctgagagaattgtaacatagcatgacaaattttgtgttgacttgaaaggaatcacaccattattccttagaagtaattacatgtgttctaacacatttgagacagggttggactcccatttctcatccgagaaattacttaacccttcctggcgctgtacagtcatcttttattctatttcctctttgctgtttgtagtagagacattttgaatgaaacttggcactgcttgattcaaaactgtggaaaccagatctgtttagtctcctgtttgtatgcgtttgctaatggtagctaaataaccagtttttgttgtaaatgcaccaattctgaaggcactttatgtactacatggaggtcatatctggttttgtttttatttttttatcatgaacattaaatgtgatgatgatttcttttccctgcacacatctttccggtgcaatatctatcaattgtgaatctggctgctggtgtataaaaacctggatgtaaagctgagcctacagacctgtcctcaccaactgttttgtgatttctactcaactacaaagatttatttaatgtactcttaatctaactgagttttgttaccaatgacctgttgcatgcttcaataccgtgtactgcctgagttgtgcctcttgtgtgctagattaaaagtgagacagagacttgacttgatcctctgagctcaagctattgagctggtagtggcagaggactgagggtacctgcacagtttgattcttttccacgtgtaagtctccattgcagaattgtcgtgctttgagaaaacacctgaggcagtgtgggagttgaacgaccctgctgtcctttttaacctgtgttgtcctagaccctgtcggggcagtcaggggacactagagatttgatctcatgcgagtcatcaataggacaaaaaagttgtggtttggggaggtctgtttgttacataaaaaggacctttcggtgtaagaaattgccgtttttaccctgccctggctggcatgtgagaagccatggaaggttgtggttgtaaatgagttgtctaaaggggtgcagaggcctgaggtttctaaaagaaggtagatttctacagagctgagtgttggttcctttttcttattggttgaaaattacctggtagtgatcagaaaacttagatgctatgtaact

SEQ ID NO: 158482 - DNA, 8436 bp, Homo sapiens
  Payload ID: 11019
  Gene Symbol: NEDD4L
  Gene Name: neural precursor cell expressed, developmentally down-regulated 4-like, E3 ubiquitin protein ligase
  Uniprot ID: Q96PU5
  ENST ID: ENST00000456986
  CDS Start-End: 601-3165
attttgaccgctatttagaagagtgacctcataaatcttttagcaaagtagacacacatacctaccacatttcttaaaagtagattcgtattttgatttgagattgttgaaaagcatggtatgtttggagtgcacttagttatgtcccatctcataaagactgttgagctctctgcactgctgatgatgaagcattgcatgaacccagaaaacggggatgccaaagcacagggcttaggtgctgttccttgcgtcatcagcagaggtctgtccactttgtagaagggagagtcccgtattctcagagtaaaagttgtttctggaattgatctcgccaaaaaggacatctttggagccagtgatccgtatgtgaaactttcattgtacgtagcggatgagaatagagaacttgctttggtccagacaaaaacaattaaaaagacactgaacccaaaatggaatgaagaattttatttcagggtaaacccatctaatcacagactcctatttgaagtatttgacgaaaatagactgacacgagacgacttcctgggccaggtggacgtgccccttagtcaccttccgacagaagatccaaccatggagcgaccctatacatttaaggactttctcctcagaccaagaagtcataagtctcgagttaagggatttttgcgattgaaaatggcctatatgccaaaaaatggaggtcaagatgaagaaaacagtgaccagagggatgacatggagcatggatgggaagttgttgactcaaatgactcggcttctcagcaccaagaggaacttcctcctcctcctctgcctcccgggtgggaagaaaaagtggacaatttaggccgaacttactatgtcaaccacaacaaccggaccactcagtggcacagaccaagcctgatggacgtgtcctcggagtcggacaataacatcagacagatcaaccaggaggcagcacaccggcgcttccgctcccgcaggcacatcagcgaagacttggagcccgagccctcggagggcggggatgtccccgagccttgggagaccatttcagaggaagtgaatatcgctggagactctctcggtctggctctgcccccaccaccggcctccccaggatctcggaccagccctcaggagctgtcagaggaactaagcagaaggcttcagatcactccagactccaatggggaacagttcagctctttgattcaaagagaaccctcctcaaggttgaggtcatgcagtgtcaccgacgcagttgcagaacagggccatctaccaccgcccagtgccccagctgggagagcgcgttcatcaactgtcacgggtggtgaggaaccaacgccatcagtggcctatgtacataccacgccgggtctgccttcaggctgggaagaaagaaaagatgctaaggggcgcacatactatgtcaatcataacaatcgaaccacaacttggactcgacctatcatgcagcttgcagaagatggtgcgtccggatcagccacaaacagtaacaaccatctaatcgagcctcagatccgccggcctcgtagcctcagctcgccaacagtaactttatctgccccgctggagggtgccaaggactcacccgtacgtcgggctgtgaaagacaccctttccaacccacagtccccacagccatcaccttacaactcccccaaaccacaacacaaagtcacacagagcttcttgccacccggctgggaaatgaggatagcgccaaacggccggcccttcttcattgatcataacacaaagactacaacctgggaagatccacgtttgaaatttccagtacatatgcggtcaaagacatctttaaaccccaatgaccttggcccccttcctcctggctgggaagaaagaattcacttggatggccgaacgttttatattgatcataatagcaaaattactcagtgggaagacccaagactgcagaacccagctattactggtccggctgtcccttactccagagaatttaagcagaaatatgactacttcaggaagaaattaaagaaacctgctgatatccccaataggtttgaaatgaaacttcacagaaataacatatttgaagagtcctatcggagaattatgtccgtgaaaagaccagatgtcctaaaagctagactgtggattgagtttgaatcagagaaaggtcttgactatgggggtgtggccagagaatggttcttcttactgtccaaagagatgttcaacccctactacggcctctttgagtactctgccacggacaactacacccttcagatcaaccctaattcaggcctctgtaatgaggatcatttgtcctacttcacttttattggaagagttgctggtctggccgtatttcatgggaagctcttagatggtttcttcattagaccattttacaagatgatgttgggaaagcagataaccctgaatgacatggaatctgtggatagtgaatattacaactctttgaaatggatcctggagaatgaccctactgagctggacctcatgttctgcatagacgaagaaaactttggacagacatatcaagtggatttgaagcccaatgggtcagaaataatggtcacaaatgaaaacaaaagggaatatatcgacttagtcatccagtggagatttgtgaacagggtccagaagcagatgaacgccttcttggagggattcacagaactacttcctattgatttgattaaaatttttgatgaaaatgagctggagttgctcatgtgcggcctcggtgatgtggatgtgaatgactggagacagcattctatttacaagaacggctactgcccaaaccaccccgtcattcagtggttctggaaggctgtgctactcatggacgccgaaaagcgtatccggttactgcagtttgtcacagggacatcgcgagtacctatgaatggatttgccgaactttatggttccaatggtcctcagctgtttacaatagagcaatggggcagtcctgagaaactgcccagagctcacacatgctttaatcgccttgacttacctccatatgaaacctttgaagatttacgagagaaacttctcatggccgtggaaaatgctcaaggatttgaaggggtggattaagcaccctgtgcctcgggggtggttgttcttcaagcaagttctgcttgcacttttgcatttgcctaacagacttttgcagaggcgatggcagagagcagctgcaggcatggtccctggagccgagccttcaccacgcactcgtccaagttcggatgcgggaacctggtcccagcttgagttcctgcctttcccaccacaaattatcaactggttgatgtgtacactaattacatttcaggaggacttaatgctatttatgttgtgcctctgcaggcaaagcccttaataaatattttacatcctttctaatgacaatgaatggaattaatcactcaacaggtatagtattacgactcatgtttactttttaaaatgatttagaccgattttcagattttatttcgttatgattaaagatgtctcatgtacttggaaaagtgagcattttttttttttttgtatttcactttcataccaggcttaatgtcaatgacatttttatttttgaagtactctgacacctccaccctctactttattagaattggaaggcaaatttttgtccaaaaacctacagacaagtactttgagagaatttccaatataatattagacataatgataattttttccatactcagaatgaaaaactggatattacgtttttgttttggggtttttttgtacaaatttagctaatagctacaggctgagagaattgtaacatagcatgacaaattttgtgttgacttgaaaggaatcacaccattattccttagaagtaattacatgtgttctaacacatttgagacagggttggactcccatttctcatccgagaaattacttaacccttcctggcgctgtacagtcatcttttattctatttcctctttgctgtttgtagtagagacattttgaatgaaacttggcactgcttgattcaaaactgtggaaaccagatctgtttagtctcctgtttgtatgcgtttgctaatggtagctaaataaccagtttttgttgtaaatgcaccaattctgaaggcactttatgtactacatggaggtcatatctggttttgtttttatttttttatcatgaacattaaatgtgatgatgatttcttttccctgcacacatctttccggtgcaatatctatcaattgtgaatctggctgctggtgtataaaaacctggatgtaaagctgagcctacagacctgtcctcaccaactgttttgtgatttctactcaactacaaagatttatttaatgtactcttaatctaactgagttttgttaccaatgacctgttgcatgcttcaataccgtgtactgcctgagttgtgcctcttgtgtgctagattaaaagtgagacagagacttgacttgatcctctgagctcaagctattgagctggtagtggcagaggactgagggtacctgcacagtttgattcttttccacgtgtaagtctccattgcagaattgtcgtgctttgagaaaacacctgaggcagtgtgggagttgaacgaccctgctgtcctttttaacctgtgttgtcctagaccctgtcggggcagtcaggggacactagagatttgatctcatgcgagtcatcaataggacaaaaaagttgtggtttggggaggtctgtttgttacataaaaaggacctttcggtgtaagaaattgccgtttttaccctgccctggctggcatgtgagaagccatggaaggttgtggttgtaaatgagttgtctaaaggggtgcagaggcctgaggtttctaaaagaaggtagatttctacagagctgagtgttggttcctttttcttattggttgaaaattacctggtagtgatcagaaaacttagatgctatgtaactaaaaaaaaaaaaaaaaaaaaaaaaaaaaaaaaaaaaattcccgctcatgagttttgactattggtgagatgttttccgctacagttaacatgacaaatgtctcagtggcaaaaatcccctttttgtaagcccccatagtctagaggcagttttctttttaagaatcatgccagagcctgagtcgagcagtatgctttcttggtttttgagagtaattgtgtaattgtagagggagaaatccaattctaacctaagaactgggattcttctgtcatcttgtaaaccgtatattgaaaaaaacagaatgtcactaaatgcatattaagtcaagtattggaaagtataaaagaaaaatcattctgacaatttctaagccagaagcaaacaagaattactgaaatctaccccatgaatacttggaaggcagtaattgtgagtgacacctcagttcatcaaccccttaataatatcagcttaattttaatgacaactaaatatgctgaagtgaggatttagtattttttaaaaaagcaaaacaaggttcagtagtcctcagcaattctccaagtttctctctttgcctaaaatggtcatagatcttgatttctctgaatcgtgatgaccacacccagtcatcttcacagcataattgcaggtggcagtaaagagagtgtgctgggtaaggagcagttgctgggtcattccttgggccccgacctgcccggggagtagccctgggggagagagggcagtgttgcctatcccagaggtcccagcagtcacactgctctgcaggccgggctctctttatagccagagaaatcaccttaatgcagtctctttagttgtctgctgaagctgtagttattatgggccacttacatgaggctgagaagtacgtgccggagctcacacactgcctgttgcggttctcttaacatcagttatcacagctgcctgtgggtcccgggtatttccattcctgccccttgttggcccgaggaaggatgtggaaagagcacctggtgggatgaaggtccaacagcctgtgcctctccactgctggccctggagccggcagcagtgaggcattcattgtctgtgttgcggtgtattcccagcttcagtgctcttttcctttttgcctgaaatgtttatgcttctctgcagccagtcctctaacaaatctcaagaacaaaggtaagacacttggtttttgtttccaggacccttcagaaggtgacatcagatattccctaaattcagacaatgagggatacagagcgacttggcatgtattatttctcccatgtaaggacaaagggacagattattattgttatttctgagacagagtcttgctctgtagctcaggctggagtgcagtggctcaatctcagctcaccacaacctctgcctcctggcttcaagcgattcttctgcctcagcctccccgaatagttgggattacaggcacccaccaccacgcctggctaatttttgtatttttagtagagatggtttcaccatgctggccaggctggtcttgaactcctgacctcaggtgatcctcccgcctcagccttccaaagtgctgggattacaagcatgagccaccgcacccggcctcacagtgacagattctgagaaacagcatgcaaaacatttgaaccattttctacatctcccattgttgcatagagagtgtgcaccgctgctatcttgccagatccacactggtcctcccgaaagccaggttcatacacagcaactttttaattattctaacagttacccattaacagtcgactcctgtatttctgagagtcttgtactcacctctgaaatttaaaaacgtataaagagagcctgggttaatcagttctgcagcccctacgtgacactgtgctagttctccttcttctgtctcctccttaccctggccctgcacccctgtacttaagagggagaggtgggaggtgctgtctggtatcatttgctgcctcgccagtagagggtgccgctgtgcagggtaactgcccgcctgctcccttcctgacctcccctgaccccgaagatcactacctctgtcattcaggcattggggtacatcctgataagtcgtgtcagaactgccaatttcaggactgagatgtgtttttaaaaaacaaatccttataaactccactttgtactttagattttaaaactggggaaaaatgtgatattctttggaccacttttttaatttatataagccttaatgaacagtgtctatacatttgcatacacacacccccaccccagagtgttctcagtatgtcagagaaagtgccacagcattaggacgggagcttggagaacgttttctagaaaagggttagcttcctgttggcatgaaattttccaagcaaacctcattaaacatctgttgtttgttaaagatgttccactgaaagcaacgcatgtttcaaaggcacgtctttccgttcgttggttttctgtgtgtaaggagtagcattgctgttggcgcctaacctcgcgtgcactgcattctcaaccccgtaccagtgcatcatcagaagccttcctcgtgaccataactctgtgtctgcagatatgtgttcccgtgtaagccagttttccccttttactcagactgatttcacctagattgtcacggtttccttcatgttaactttgcgtgactttgttcttcctttactactctgtatgtaatatatatacatatatacgtacatatgctgtccaaatatatttgtatatatttgtatagcatttttacacctttattgagtaatctggtttcgaaaggaggtgagagtttagtcccttctgcagttttctccaagctgtgtcctgtgaatttcaacccttggagcctaagaaaaccctaggaagatgatgttaatttgctgtcatttcctaattcaggatctatcatcaaatgaaacatgaaaaaaacagtgacttttaaggtgaaaagagtttcaagcattccaaataaattatcaatgtttcataactttttattataaacccacctcctaataggaagccaagtactatttgatacagtggtaaaaaccaaactaccttgaatttttttaaggcaacttatgaataatgctcattttcacagtcagaatagctttaaaatatggttgaatttgatacacacaggaagttttcttgaagaacaatcctttcgcttttcttttttcttgagagatctaaagagaaactgtagattgttttcctgacagcaaaagactaatgtgacaaaatgaagtcattgtaaagaagcgatgcaacttgtcaaatatttaataaagaattatggaagctggaacattttctac

SEQ ID NO: 158483 - DNA, 1033 bp, Homo sapiens
  Payload ID: 11019
  Gene Symbol: NEDD4L
  Gene Name: neural precursor cell expressed, developmentally down-regulated 4-like, E3 ubiquitin protein ligase
  ENST ID: ENST00000589054
  CDS Start-End: 278-598
agtgagaggcgccggggctgccgcccggtgctcggcgcgctctcgggagccgcccgcccgctggtcccgcagccttccgggaggaagcggtgccggcagcgtccagggcgcgctctcgggcaccctcacctgccggcgcccggccgcttacccggcagggcgtgcgcagggtagggtgcgggaccggggggacctggaggcagaggggagaaccggccgtccgcgccgcagcacagccgctgggagcgcctcagaccccgcgcggggcgccggctccatggcgaccgggctcggggagccggtctatggactttccgaagacgaggctgtgctactcatggacgccgaaaagcgtatccggttactgcagtttgtcacagggacatcgcgagtacctatgaatggatttgccgaactttatggttccaatggtcctcagctgtttacaatagagcaatggggcagtcctgagaaactgcccagagctcacacatgctttaatcgccttgacttacctccatatgaaacctttgaagatttacgagagaaacttctcatggccgtggaaaatgctcaaggatttgaaggggtggattaagcaccctgtgcctcgggggtggttgttcttcaagcaagttctgcttgcacttttgcatttgcctaacagacttttgcagaggcgatggcagagagcagctgcaggcatggtccctggagccgagccttcaccacgcactcgtccaagttcggatgcgggaacctggtcccagcttgagttcctgcctttcccaccacaaattatcaactggttgatgtgtacactaattacatttcaggaggacttaatgctatttatgttgtgcctctgcaggcaaagcccttaataaatattttacatcctttctaatgacaatgaatggaattaatcactcaacaggtatagtattacgactcatgtttactttttaaaatgatttagaccgattttcagattttatttcgttatgattaaagatgtctcatgtacttggaa

SEQ ID NO: 158484 - DNA, 484 bp, Homo sapiens
  Payload ID: 11019
  Gene Symbol: NEDD4L
  Gene Name: neural precursor cell expressed, developmentally down-regulated 4-like, E3 ubiquitin protein ligase
  ENST ID: ENST00000592846
  CDS Start-End: 453-484
atctggcggggtgcgcgctcaggtctggctcccctttcgagaggtgaattttacaacccaagaagcattactcagcagggagagtcccgtattctcagagtaaaagttgtttctggaattgatctcgccaaaaaggacatctttggagccagcttctgctccattgctgttgaacttttttttggtcgtgacatcagaaaaataaccaagttgatccgtatgtgaaactttcattgtacgtagcggatgagaatagagaacttgctttggtccagacaaaaacaattaaaaagacactgaacccaaaatggaatgaagaattttatttcagggtaaacccatctaatcacagactcctatttgaagtatttgacgaaaatagactgacacgagacgacttcctgggccaggtggacgtgccccttagtcaccttccgacagaagatccaaccatggagcgaccctatacatttaaggactttct

SEQ ID NO: 158485 - DNA, 505 bp, Homo sapiens
  Payload ID: 11019
  Gene Symbol: NEDD4L
  Gene Name: neural precursor cell expressed, developmentally down-regulated 4-like, E3 ubiquitin protein ligase
  ENST ID: ENST00000588494
  CDS Start-End: 401-505
aggggaaacagaccatctgcatctagacctgcctctctctccgctccccacttcagacgagctcttcctgcctggaatctgcttctgctccattgctgttgaacttttttttggtcgtgacatcagaaaaataaccaagtgtgagtctgataatagcaatgatccgtatgtgaaactttcattgtacgtagcggatgagaatagagaacttgctttggtccagacaaaaacaattaaaaagacactgaacccaaaatggaatgaagaattttatttcagggtaaacccatctaatcacagactcctatttgaagtatttgacgaaaatagactgacacgagacgacttcctgggccaggtggacgtgccccttagtcaccttccgacagaagatccaaccatggagcgaccctatacatttaaggactttctcctcagaccaagaagtcataagtctcgagttaagggatttttgcgattgaaaatggcctatatgccaaaaaat

SEQ ID NO: 158486 - DNA, 830 bp, Homo sapiens
  Payload ID: 11019
  Gene Symbol: NEDD4L
  Gene Name: neural precursor cell expressed, developmentally down-regulated 4-like, E3 ubiquitin protein ligase
  ENST ID: ENST00000586268
  CDS Start-End: 381-830
ctcagttgtgttaaaacttgctggtattcccccggtatcagcagaggtgtgtacgggcactgctttaaaactgggaaggaggaagacgaggccagggagccggagggtcaccaaggtagatttccagcagcgctagtccagctgaacactttccagccttgtttttcagcagctttgaggaaaagtatagtgatccgtatgtgaaactttcattgtacgtagcggatgagaatagagaacttgctttggtccagacaaaaacaattaaaaagacactgaacccaaaatggaatgaagaattttatttcagggtaaacccatctaatcacagactcctatttgaagtatttgacgaaaatagactgacagaagatccaaccatggagcgaccctatacatttaaggactttctcctcagaccaagaagtcataagtctcgagttaagggatttttgcgattgaaaatggcctatatgccaaaaaatggaggtcaagatgaagaaaacagtgaccagagggatgacatggagcatggatgggaagttgttgactcaaatgactcggcttctcagcaccaagaggaacttcctcctcctcctctgcctcccgggtgggaagaaaaagtggacaatttaggccgaacttactatgtcaaccacaacaaccggaccactcagtggcacagaccaagcctgatggacgtgtcctcggagtcggacaataacatcagacagatcaaccaggaggcagcacaccggcgcttccgctcccgcaggcacatcagcgaagacttggagcccgagccctcggagggcggggatgtccccgag

SEQ ID NO: 158487 - DNA, 553 bp, Homo sapiens
  Payload ID: 11019
  Gene Symbol: NEDD4L
  Gene Name: neural precursor cell expressed, developmentally down-regulated 4-like, E3 ubiquitin protein ligase
  ENST ID: ENST00000587190
  CDS Start-End: 507-553
agttgtgttaaaacttgctggtattcccccggtatcagcagaggtgtgtacgggcactgctttaaaactgggaaggaggaagacgaggccagggagccggagggtcaccaaggtagatttccagcagcgctagtccagctgaacactttccagccttgtttttcagcagctttgaggaaaagtatagcttctgctccattgctgttgaacttttttttggtcgtgacatcagaaaaataaccaagtgtgagtctgataatagcaatgatccgtatgtgaaactttcattgtacgtagcggatgagaatagagaacttgctttggtccagacaaaaacaattaaaaagacactgaacccaaaatggaatgaagaattttatttcagggtaaacccatctaatcacagactcctatttgaagtatttgacgaaaatagactgacacgagacgacttcctgggccaggtggacgtgccccttagtcaccttccgacagaagatccaaccatggagcgaccctatacatttaaggactttctcctcagaccaagaag

SEQ ID NO: 158488 - DNA, 1984 bp, Homo sapiens
  Payload ID: 11019
  Gene Symbol: NEDD4L
  Gene Name: neural precursor cell expressed, developmentally down-regulated 4-like, E3 ubiquitin protein ligase
  ENST ID: ENST00000587881
  CDS Start-End: 1-1920
agggatgacatggagcatggatgggaagttgttgactcaaatgactcggcttctcagcaccaagaggaacttcctcctcctcctctgcctcccgggtgggaagaaaaagtggacaatttaggccgaacttactatgtcaaccacaacaaccggaccactcagtggcacagaccaagcctgatggacgtgtcctcggagtcggacaataacatcagacagatcaaccaggaggcagcacaccggcgcttccgctcccgcaggcacatcagcgaagacttggagcccgagccctcggagggcggggatgtccccgagccttgggagaccatttcagaggaagtgaatatcgctggagactctctcggtctggctctgcccccaccaccggcctccccaggatctcggaccagccctcaggagctgtcagaggaactaagcagaaggcttcagatcactccagactccaatggggaacagttcagctctttgattcaaagagaaccctcctcaaggttgaggtcatgcagtgtcaccgacgcagttgcagaacagggccatctaccaccggaagatccacgtttgaaatttccagtacatatgcggtcaaagacatctttaaaccccaatgaccttggcccccttcctcctggctgggaagaaagaattcacttggatggccgaacgttttatattgatcataatagcaaaattactcagtgggaagacccaagactgcagaacccagctattactggtccggctgtcccttactccagagaatttaagcagaaatatgactacttcaggaagaaattaaagaaacctgctgatatccccaataggtttgaaatgaaacttcacagaaataacatatttgaagagtcctatcggagaattatgtccgtgaaaagaccagatgtcctaaaagctagactgtggattgagtttgaatcagagaaaggtcttgactatgggggtgtggccagagaatggttcttcttactgtccaaagagatgttcaacccctactacggcctctttgagtactctgccacggacaactacacccttcagatcaaccctaattcaggcctctgtaatgaggatcatttgtcctacttcacttttattggaagagttgctggtctggccgtatttcatgggaagctcttagatggtttcttcattagaccattttacaagatgatgttgggaaagcagataaccctgaatgacatggaatctgtggatagtgaatattacaactctttgaaatggatcctggagaatgaccctactgagctggacctcatgttctgcatagacgaagaaaactttggacagacatatcaagtggatttgaagcccaatgggtcagaaataatggtcacaaatgaaaacaaaagggaatatatcgacttagtcatccagtggagatttgtgaacagggtccagaagcagatgaacgccttcttggagggattcacagaactacttcctattgatttgattaaaatttttgatgaaaatgagctggagttgctcatgtgcggcctcggtgatgtggatgtgaatgactggagacagcattctatttacaagaacggctactgcccaaaccaccccgtcattcagtggttctggaaggctgtgctactcatggacgccgaaaagcgtatccggttactgcagtttgtcacagggacatcgcgagtacctatgaatggatttgccgaactttatggttccaatggtcctcagctgtttacaatagagcaatggggcagtcctgagaaactgcccagagctcacacatgctttaatcgccttgacttacctccatatgaaacctttgaagatttacgagagaaacttctcatggccgtggaaaatgctcaaggatttgaaggggtggattaagcaccctgtgcctcgggggtggttgttcttcaagcaagttctgcttgcacttttgcatttgcct

SEQ ID NO: 158489 - DNA, 3347 bp, Homo sapiens
  Payload ID: 11019
  Gene Symbol: NEDD4L
  Gene Name: neural precursor cell expressed, developmentally down-regulated 4-like, E3 ubiquitin protein ligase
  Uniprot ID: Q96PU5
  ENST ID: ENST00000586263
  CDS Start-End: 200-3043
tttccagagaggaacaaccgtgtagactgctttcctgggagtcaagttaaaacttctctcctgtgaccttgtcacccggcagtggaaagttacccttggctgcagccacgacttccgcatactcttcagaacttgctctgcccttgagttttccagctttcctttaatgcactaaacctttaatattgtattctcctaaatgagacgtctcgcatttgagcagggagagtcccgtattctcagagtaaaagttgtttctggaattgatctcgccaaaaaggacatctttggagccagtgatccgtatgtgaaactttcattgtacgtagcggatgagaatagagaacttgctttggtccagacaaaaacaattaaaaagacactgaacccaaaatggaatgaagaattttatttcagggtaaacccatctaatcacagactcctatttgaagtatttgacgaaaatagactgacacgagacgacttcctgggccaggtggacgtgccccttagtcaccttccgacagaagatccaaccatggagcgaccctatacatttaaggactttctcctcagaccaagaagtcataagtctcgagttaagggatttttgcgattgaaaatggcctatatgccaaaaaatggaggtcaagatgaagaaaacagtgaccagagggatgacatggagcatggatgggaagttgttgactcaaatgactcggcttctcagcaccaagaggaacttcctcctcctcctctgcctcccgggtgggaagaaaaagtggacaatttaggccgaacttactatgtcaaccacaacaaccggaccactcagtggcacagaccaagcctgatggacgtgtcctcggagtcggacaataacatcagacagatcaaccaggaggcagcacaccggcgcttccgctcccgcaggcacatcagcgaagacttggagcccgagccctcggagggcggggatgtccccgagccttgggagaccatttcagaggaagtgaatatcgctggagactctctcggtctggctctgcccccaccaccggcctccccaggatctcggaccagccctcaggagctgtcagaggaactaagcagaaggcttcagatcactccagactccaatggggaacagttcagctctttgattcaaagagaaccctcctcaaggttgaggtcatgcagtgtcaccgacgcagttgcagaacagggccatctaccaccgccatcagtggcctatgtacataccacgccgggtctgccttcaggctgggaagaaagaaaagatgctaaggggcgcacatactatgtcaatcataacaatcgaaccacaacttggactcgacctatcatgcagcttgcagaagatggtgcgtccggatcagccacaaacagtaacaaccatctaatcgagcctcagatccgccggcctcgtagcctcagctcgccaacagtaactttatctgccccgctggagggtgccaaggactcacccgtacgtcgggctgtgaaagacaccctttccaacccacagtccccacagccatcaccttacaactcccccaaaccacaacacaaagtcacacagagcttcttgccacccggctgggaaatgaggatagcgccaaacggccggcccttcttcattgatcataacacaaagactacaacctgggaagatccacgtttgaaatttccagtacatatgcggtcaaagacatctttaaaccccaatgaccttggcccccttcctcctggctgggaagaaagaattcacttggatggccgaacgttttatattgatcataatagcaaaattactcagtgggaagacccaagactgcagaacccagctattactggtccggctgtcccttactccagagaatttaagcagaaatatgactacttcaggaagaaattaaagaaacctgctgatatccccaataggtttgaaatgaaacttcacagaaataacatatttgaagagtcctatcggagaattatgtccgtgaaaagaccagatgtcctaaaagctagactgtggattgagtttgaatcagagaaaggtcttgactatgggggtgtggccagagaatggttcttcttactgtccaaagagatgttcaacccctactacggcctctttgagtactctgccacggacaactacacccttcagatcaaccctaattcaggcctctgtaatgaggatcatttgtcctacttcacttttattggaagagttgctggtctggccgtatttcatgggaagctcttagatggtttcttcattagaccattttacaagatgatgttgggaaagcagataaccctgaatgacatggaatctgtggatagtgaatattacaactctttgaaatggatcctggagaatgaccctactgagctggacctcatgttctgcatagacgaagaaaactttggacagacatatcaagtggatttgaagcccaatgggtcagaaataatggtcacaaatgaaaacaaaagggaatatatcgacttagtcatccagtggagatttgtgaacagggtccagaagcagatgaacgccttcttggagggattcacagaactacttcctattgatttgattaaaatttttgatgaaaatgagctggagttgctcatgtgcggcctcggtgatgtggatgtgaatgactggagacagcattctatttacaagaacggctactgcccaaaccaccccgtcattcagtggttctggaaggctgtgctactcatggacgccgaaaagcgtatccggttactgcagtttgtcacagggacatcgcgagtacctatgaatggatttgccgaactttatggttccaatggtcctcagctgtttacaatagagcaatggggcagtcctgagaaactgcccagagctcacacatgctttaatcgccttgacttacctccatatgaaacctttgaagatttacgagagaaacttctcatggccgtggaaaatgctcaaggatttgaaggggtggattaagcaccctgtgcctcgggggtggttgttcttcaagcaagttctgcttgcacttttgcatttgcctaacagacttttgcagaggcgatggcagagagcagctgcaggcatggtccctggagccgagccttcaccacgcactcgtccaagttcggatgcgggaacctggtcccagcttgagttcctgcctttcccaccacaaattatcaactggttgatgtgtacactaattacatttcaggaggacttaatgctatttatgttgtgcctctgcaggcaaagcccttaataaatattttacatcctt

SEQ ID NO: 158490 - DNA, 728 bp, Homo sapiens
  Payload ID: 11019
  Gene Symbol: NEDD4L
  Gene Name: neural precursor cell expressed, developmentally down-regulated 4-like, E3 ubiquitin protein ligase
  ENST ID: ENST00000617539
  CDS Start-End: 275-337
gagaggcgccggggctgccgcccggtgctcggcgcgctctcgggagccgcccgcccgctggtcccgcagccttccgggaggaagcggtgccggcagcgtccagggcgcgctctcgggcaccctcacctgccggcgcccggccgcttacccggcagggcgtgcgcagggtagggtgcgggaccggggggacctggaggcagaggggagaaccggccgtccgcgccgcagcacagccgctgggagcgcctcagaccccgcgcggggcgccggctccatggcgaccgggctcggggagccggtctatggactttccgaagacgagcccgggagtccatgatgcatgtcacgtctgggtcgcgcggctggagacccgggactgcggagaagccggatcgtttccccctggaactttctctctcatgattgtgtggatcagcaggcgctcagaagcctgtgcgtgcttatcccggcgggaatgggggacacgctgcgtgtgtccctcccctcgttttgcaaagtctacggccaggattgtggatttcggagcctcggtgggggaggtgttcaaggctggtggcaggtgctcctggaaacttggggaggaagcttgcagccctgccattttttcctcccgaggattcaaagcccggcacctccagggtgggtggggagaggaaagcttaattgatctcttttattaataaagcgactgaataagccacgcctcc

SEQ ID NO: 158491 - DNA, 708 bp, Homo sapiens
  Payload ID: 11020
  Gene Symbol: NEDD8
  Gene Name: neural precursor cell expressed, developmentally down-regulated 8
  Uniprot ID: Q15843
  ENST ID: ENST00000250495
  CDS Start-End: 188-433
tgaaccgaaacgcgggagcaaccctgagcctttccggaacccagtgggggggggggggggggtggagccagacagtgacccggaagtagaagtggcccttgcaggcaagagtgctggagggcggcagcggcgaccggagcggtaggagcagcaatttatccgtgtgcagccccaaactggaaagaagatgctaattaaagtgaagacgctgaccggaaaggagattgagattgacattgaacctacagacaaggtggagcgaatcaaggagcgtgtggaggagaaagagggaatccccccacaacagcagaggctcatctacagtggcaagcagatgaatgatgagaagacagcagctgattacaagattttaggtggttcagtccttcacctggtgttggctctgagaggaggaggtggtcttaggcagtgatggaccctccattttacctctttaccctgtcgctcataatgaggcatcatatatcctctcactctctgggacaccatagccactgccccctcccctggatgcccagtaatgtatgtctactggtgggagactgtgaggatcccaggattcagtattcctggcccagagggcccttgctggctactgggtgttagtttgcagtcctgtgtgcttccctctcttatgactgtgtccctggttgtcaataaaatatttcctggcctcctggaatcttt

SEQ ID NO: 158492 - DNA, 626 bp, Homo sapiens
  Payload ID: 11020
  Gene Symbol: NEDD8
  Gene Name: neural precursor cell expressed, developmentally down-regulated 8
  ENST ID: ENST00000396828
  CDS Start-End: 37-189
caatttatccgtgtgcagccccaaactggaaagaagatgctaattaaagtgaagacgctgaccggaaaggagattgagattgacattgaacctacagacaaggtggagcgaatcaaggagcgtgtggaggagaaagagggaatccccccacaacagcagaggctcatctacagtggcaagcagatgtgagtttggagtgagaatgacagcatggcgatcttatgtgaagatgagaagaggagagggggcacgtactgaggaatgatgagaagacagcagctgattacaagattttaggtggttcagtccttcacctggtgttggctctgagaggaggaggtggtcttaggcagtgatggaccctccattttacctctttaccctgtcgctcataatgaggcatcatatatcctctcactctctgggacaccatagccactgccccctcccctggatgcccagtaatgtatgtctactggtgggagactgtgaggatcccaggattcagtattcctggcccagagggcccttgctggctactgggtgttagtttgcagtcctgtgtgcttccctctcttatgactgtgtccctggttgtcaataaaatatttcctggcctcctggaa

SEQ ID NO: 158493 - DNA, 653 bp, Homo sapiens
  Payload ID: 11020
  Gene Symbol: NEDD8
  Gene Name: neural precursor cell expressed, developmentally down-regulated 8
  ENST ID: ENST00000524927
  CDS Start-End: 88-240
gcaggcaagagtgctggagggcggcagcggcgaccggagcggtaggagcagcaatttatccgtgtgcagccccaaactggaaagaagatgctaattaaagtgaagacgctgaccggaaaggagattgagattgacattgaacctacagacaaggtggagcgaatcaaggagcgtgtggaggagaaagagggaatccccccacaacagcagaggctcatctacagtggcaagcagatgtgagtttggagtgagaatgacagcatggcgatcttatgtgaagatgagaagaggagagggggcacgtactgaggtggatcaggggtgcctcttgtttttggtgcctaagactctttggcaatctggtgaagcctctaagccccttctcagaataagattttttcaggcataaaacaaaatatatagaattaaaggaaaactaattatattgaaatagttattaaaatactaaaacaaatttgtgatatagtaatatatgtacttttttattaatgcataagatctaatggtaggtctaatatgaccataattttgaaatattttcaagatacctataaatgatcatgatagaaaatagttaattgctattgttaacaagttacctatattgctaatactactgtggtttttgggct

SEQ ID NO: 158494 - DNA, 3341 bp, Homo sapiens
  Payload ID: 11021
  Gene Symbol: NEDD9
  Gene Name: neural precursor cell expressed, developmentally down-regulated 9
  Uniprot ID: Q14511
  ENST ID: ENST00000379433
  CDS Start-End: 144-668
gggaggcgctgcgactgacaagcggctctgcccgggaccttctcgctttcatctagcgctgcactcaatggaggggcgggcaccgcagtgcttaatgctgtcttaactagtgtaggaaaacggctcaacccaccgctgccgaaatgaagtataagaatcttatggcaagggccttatatgacaatgtcccagagtgtgccgaggaactggcctttcgcaagggagacatcctgaccgtcatagagcagaacacagggggactggaaggatggtggctgtgctcattacacggtcggcaaggcattgtcccaggcaaccgggtgaagcttctgattggtcccatgcaggagactgcctccagtcacgagcagcctgcctctggactgatgcagcagacctttggccaacagaagctctatcaagtgccaaacccacaggctgctccccgagacaccatctaccaagtgccaccttcctaccaaaatcagggaatttaccaagtccccactggccacggcacccaagaacaagaggtatatcaggtgccaccatcagtgcagagaagcattgggggaaccagtgggccccacgtgggtaaaaaggtgttccagagagatgggcaagtgtcctatttcttagtgagagcctctaaacaaaccagcttgtgaacctccactgaaaagatctcatctgatgagcattttaataaagtgtcctgagtttggaggcttgccgtctttctcttggataaatatcttcatctcctagacttggaaaaacacattttctcctggggtttcccattggcgtgtcttgagctgctctggtgataaccgtaataatgccaatactgatacgaacagcagaaaacagtaaccccaagaactctacagatgatcatcaaggaccactgtctcttaccatttgctgctttggtttgaaattctcactgcctcgtagatctcattttgagcactatacattcctaaagattgatttctttctatctgacttaaatttaggaatgattaaatcttcatttctcccatgatttgatcctaaaacattttgaaaggaaacagccttgagatctgtgattactaagacatacataacattcttatcacattagaaagcaagaattgactgttgcttgtcttgttcctgttgtcttgtcccctgaattcctgtttatctttgattgtatgtgggacattgtattttcagtacatttgtagaaataatgtgaagcctataaagatgttctctgcctccagagagaattttgtttccttctgccagcctcataggcaagcatacatctgattccatgctttgagctgttctggcaaccctgatgtcttcagcctgtgcaagggtgggtttacttccagttaatccttattttggatacagtccttagggttccaacccaaagtcgggggtggtttggggtccctgccttggtgagccctatagtccaatgttcccccttacccaaagaagctgtagaaaacccagcacagcctcccaggcaccagtttcagatcagcaaaaaatagcaaatgcccccaggcttgaaaagcaatctcacctctattaactcttctcccaaagtttgacctagtaattctttattatccttgaactcttgacactattaagaagatcttttcggctgggcgcagtggctcacgcctgtaatcccagcactttcggaggccgaggcgggcggatcacgaggtcaggagatcgagatcgtcctggctaacacggtaaaaccccgtctctactaaaaatacaaaaaattagctgggcacggtggcgggcgcagtgggcgggtgcctgtagtcccagctactcggaaggctgaggcaggagaatggcgtgaactcaggaggcggagcttgcggtgagccgagatctcaccactgcactccagcctgggcgacagagtaagactctgtctcaaaaaaaaaaaaaaaaaaaaaaaaaaaaaaaaaaaaaaaaagatctttcctagcttttcttcatttttttaagttgtcttcagcaagatggttaatctcaattacctagtccatgatttctggaagtcaaagtcaaaaggtaaaatctatatagcctaggtgacaattacaataacaataacaatagctaaggcttattatggctttatgccaggtactttatgcacttgatctcatttaatactcatatagcctatgagggaagtataatttccattttacctatgagaaaacaggcttagaatggaacctttgttctcatagcttgtgagtggtagaaccgggatttagatccagctctgcctgagtccagcttctgtttgtcaattacttccctcttcagacctaattcttccaataagcaacagaaaaagacccagtggggccatggcctctggcacacagcttctcataaacgagcctatcacacatccccagaactaaagcaatcgtatgttccttctgatgttgaggtaaaaagcagggtttgttttggtttcccttttccaaaacactcccccacatgtttctggcttgtggttaagaagaacccaggtgttcatgtcacatacgagctcaactggggaaaaggaaaccatccagcagccctccttgcctgccaatagtggcttcacccaacttggggtgcattcttctacagtttctgatttctcaacttcacctaacattcccttgccttcttggatccctctcttgcccaacactaccatgcatggctgatagggcactgttctgccccatatcccatgggttctacttaacccagagctggcttacctggaaaccaagcttattctgtagtggcagacctcacgccatcttgcttaatagccttcagttttcctttagttgattaatgtatcactcaatagattatgcaagacctactctgctaggcactgtactaggccctgtggtttatatttaaatgaagagggaatgatctctgactttaaaatgctggaagaagagatgagatgcatcaagaccgtcaaaccacaagtgataagtgctgtcagagatgtgtggatcactggctcagggagttccaaggatagagacatattatctgtttgggaagggcttggtgggggaaaggcattcagccgggccttgaaaatcaattaaagtttgaatatgaggaaagaaagaagagcatctcagacaaggacatggcatggatgaaggcacagaggtatgggcgtgcagggcatctgtggaaatggacagctcagttctcgccgagggagggagttggtgcagagcctgggggccctgccttcagaagat

SEQ ID NO: 158495 - DNA, 4536 bp, Homo sapiens
  Payload ID: 11021
  Gene Symbol: NEDD9
  Gene Name: neural precursor cell expressed, developmentally down-regulated 9
  Uniprot ID: Q14511
  ENST ID: ENST00000379446
  CDS Start-End: 168-2672
acaacagtgagctcagagacttgagggaggcgctgcgactgacaagcggctctgcccgggaccttctcgctttcatctagcgctgcactcaatggaggggcgggcaccgcagtgcttaatgctgtcttaactagtgtaggaaaacggctcaacccaccgctgccgaaatgaagtataagaatcttatggcaagggccttatatgacaatgtcccagagtgtgccgaggaactggcctttcgcaagggagacatcctgaccgtcatagagcagaacacagggggactggaaggatggtggctgtgctcattacacggtcggcaaggcattgtcccaggcaaccgggtgaagcttctgattggtcccatgcaggagactgcctccagtcacgagcagcctgcctctggactgatgcagcagacctttggccaacagaagctctatcaagtgccaaacccacaggctgctccccgagacaccatctaccaagtgccaccttcctaccaaaatcagggaatttaccaagtccccactggccacggcacccaagaacaagaggtatatcaggtgccaccatcagtgcagagaagcattgggggaaccagtgggccccacgtgggtaaaaaggtgataacccccgtgaggacaggccatggctacgtatacgagtacccatccagataccaaaaggacgtctatgatatccctccttctcataccactcaaggggtatacgacatccctccctcatcagcaaaaggccctgtgttttcagttccagtgggagagataaaacctcaaggggtgtatgacatcccgcctacaaaaggggtatatgccattccgccctctgcttgccgggatgaagcagggcttagggaaaaagactatgacttcccccctcccatgagacaagctggaaggccggacctcagaccggagggggtttatgacattcctccaacctgcaccaagccagcagggaaggaccttcatgtaaaatacaactgtgacattccaggagctgcagaaccggtggctcgaaggcaccagagcctgtccccgaatcacccacccccgcaactcggacagtcagtgggctctcagaacgacgcatatgatgtcccccgaggcgttcagtttcttgagccaccagcagaaaccagtgagaaagcaaacccccaggaaagggatggtgtttatgatgtccctctgcataacccgccagatgctaaaggctctcgggacttggtggatgggatcaaccgattgtctttctccagtacaggcagcacccggagtaacatgtccacgtcttccacctcctccaaggagtcctcactgtcagcctccccagctcaggacaaaaggctcttcctggatccagacacagctattgagagacttcagcggctccagcaggcccttgagatgggtgtctccagcctaatggcactggtcactaccgactggcggtgttacggatatatggaaagacacatcaatgaaatacgcacagcagtggacaaggtggagctgttcctgaaggagtacctccactttgtcaagggagctgttgcaaatgctgcctgcctcccggaactcatcctccacaacaagatgaagcgggagctgcaacgagttgaagactcccaccagatcctgagtcaaaccagccatgacttaaatgagtgcagctggtccctgaatatcttggccatcaacaagccccagaacaagtgtgacgatctggaccggtttgtgatggtggcaaagacggtgcccgatgacgccaagcagctcaccacaaccatcaacaccaacgcagaggccctcttcagacccggccctggcagcttgcatctgaagaatgggccggagagcatcatgaactcaacggagtacccacacggtggctcccagggacagctgctgcatcctggtgaccacaaggcccaggcccacaacaaggcactgcccccaggcctgagcaaggagcaggcccctgactgtagcagcagtgatggttctgagaggagctggatggatgactacgattacgtccacctacagggtaaggaggagtttgagaggcaacagaaagagctattggaaaaagagaatatcatgaaacagaacaagatgcagctggaacatcatcagctgagccagttccagctgttggaacaagagattacaaagcccgtggagaatgacatctcgaagtggaagccctctcagagcctacccaccacaaacagtggcgtgagtgctcaggatcggcagttgctgtgcttctactatgaccaatgtgagacccatttcatttcccttctcaacgccattgacgcactcttcagttgtgtcagctcagcccagcccccgcgaatcttcgtggcacacagcaagtttgtcatcctcagtgcacacaaactggtgttcattggagacacgctgacacggcaggtgactgcccaggacattcgcaacaaagtcatgaactccagcaaccagctctgcgagcagctcaagaccatagtcatggcaaccaagatggccgccctccattaccccagcaccacggccctgcaggaaatggtgcaccaagtgacagacctttctagaaatgcccagctgttcaagcgctctttgctggagatggcaacgttctgagaagaaaaaaaagaggaaggggactgcgttaacggttactaaggaaaactggaaatactgtctggtttttgtaaatgttatctatttttgtagatattttatataaaaatgaaatattttaacattttatgggtcagtcaactttcagaaattcagggagctggagagggaaatctttttttttccccctgagtggttcttatgtatacatagaagtatctgagacataaactgtacagaaaacttgtccacgtgcttttgtatgcccatgtattcatgtttgtttgtagatgtttgtctgatgcatttcattaaaaaaaaaaccatgaattacgaagcaccttagtaagcaccttctaatgctgcattttttttgttgttgttaaaaacataccagctggttataatattgttctccacgtccttgtgatgattctgagcctggcactcccaaatctgggaagcatagtttatttgcaagtgttcaccttccaaatcatgaggcatagcatgacttattcttgtttggaaaactcttttcaaaactgaccatcttaaacacatgatggccaagtgcccaaaagccctcttgcggagcaaatttcagaatatatatgtggatccaagctctgatagttcaggtgctggagggaagagagacctgtgtgtttagaggccaggaccacagttaggattgggttgtttcaatactgagagacagctacaataaaaggagagcaattgcctccctggggctgttcaatcttctgcatttgtgagtggttcagtcatgaggttttccaaaagatgtttttagagttgtaaaaaccatatttgcagcaaagatttacaaaggcgtatcagactatgattgttcaccaaaataggggaatggtttgatccgccagttgcaagtagaggcctttctgactcttaatattcactttggtgctactacccccattacctgagggaaactggccaggtccttgatcatggaactatagagctaccaggacatatcctgctctctaagggaatttattgctatcttgcaccttctttaaaactcacatatgcagacctgacactcaagagtggctagctacacagagtccatctaatttttgcaacttcctgtggccagtgtgtataaccccttccactatctcacagatagtcacagcgtccattccatagtctgtctcctcacatctgttagtattgacacagcacagacaccacaagccatcaggttcttcatggggcaggtgaaatacttctaccccatgggtaaatgtattcacatattaccaagagaagaagcacattatctatgatcttttggcccagttcttatttagcatttttattccagcctacttggaaacatgtttttatttgcaatatatgcctgactgaattaagcttgcttgttttaaacaaccaaatcattggaacagaaaaggatttaaaaaacaagaatgcatgatctcagagtgattaaaaaaaaatcagtggaaataaatgatcatagaaggtgcttttcaaaacaactgctattataattctcaaagtcctactctgccaaaagaagattaaaagtcatacattacattacaaggaaatgttcatgtgggaagagggttgctgaaaatcaacaacgcttgaagttaaaaagtgtgtctttgtagatttcattgtataatgtgtatttcttaggagatggctgacttgattgatctacgctaagtggagacatttcacatttttaaaaccaaatgttcaatctgtattactctttgccgtcttgtatgtagaggctatttttaaatcattaaatttttagatctctgttttcata

SEQ ID NO: 158496 - DNA, 470 bp, Homo sapiens
  Payload ID: 11021
  Gene Symbol: NEDD9
  Gene Name: neural precursor cell expressed, developmentally down-regulated 9
  ENST ID: ENST00000397378
  CDS Start-End: 375-470
aaatgcttacagctgcctctagaagcaagtccgctcgctgcatggagagggaaacatgagcatgcagcaggactagctgtcacctcccgcccgcctgcccagagagggccagagcgtcggggaggcaagatgatccaccagcggttccatcctacacttggagagaatgaataatggggaaagaaactgaagagaaagtaacaggcaaggagatatttgcagattcagtaagctgtgaggtccgtaatgtcagacactggcaaacatcatatgttcttcaagtagagttatgaaaacgaagaaactggtcagaagagtaaaacgccggaattgtcctttccaacatccagagctgcatcattccttggggcaaaatgtggacaaggaatcttatggcaagggccttatatgacaatgtcccagagtgtgccgaggaactggcctttcgcaagggagacatcctgaccgtc

SEQ ID NO: 158497 - DNA, 4934 bp, Homo sapiens
  Payload ID: 11021
  Gene Symbol: NEDD9
  Gene Name: neural precursor cell expressed, developmentally down-regulated 9
  ENST ID: ENST00000448183
  CDS Start-End: 329-460
ggttgctcagtagggaaatgcttacagctgcctctagaagcaagtccgctcgctgcatggagagggaaacatgagcatgcagcaggactagctgtcacctcccgcccgcctgcccagagagggccagagcgtcggggaggcaagatgatccaccagcggttccatcctacacttggattcagtaagctgtgaggtccgtaatgtcagacactggcaaacatcatatgttcttcaagtagagttatgaaaacgaagaaactggtcagaagagtaaaacgccggaattgtcctttccaacatccagagctgcatcattccttggggcaaaatgtggacaaggagaatcaaccatcaactgcacacaaataaaaaagctctgggcaccgtatcaagccaagaacagcccaatctcctttctgggcaaacgttccaagaatcttatggcaagggccttatatgacaatgtcccagagtgtgccgaggaactggcctttcgcaagggagacatcctgaccgtcatagagcagaacacagggggactggaaggatggtggctgtgctcattacacggtcggcaaggcattgtcccaggcaaccgggtgaagcttctgattggtcccatgcaggagactgcctccagtcacgagcagcctgcctctggactgatgcagcagacctttggccaacagaagctctatcaagtgccaaacccacaggctgctccccgagacaccatctaccaagtgccaccttcctaccaaaatcagggaatttaccaagtccccactggccacggcacccaagaacaagaggtatatcaggtgccaccatcagtgcagagaagcattgggggaaccagtgggccccacgtgggtaaaaagtacatttgtagaaataatgtgaagcctataaagatgttctctgcctccagagagaattttgtttccttctgccagcctcataggcaagcatacatctgattccatgctttgagctgttctggcaaccctgatgtcttcagcctgtgcaagggtgataacccccgtgaggacaggccatggctacgtatacgagtacccatccagataccaaaaggacgtctatgatatccctccttctcataccactcaaggggtatacgacatccctccctcatcagcaaaaggccctgtgttttcagttccagtgggagagataaaacctcaaggggtgtatgacatcccgcctacaaaaggggtatatgccattccgccctctgcttgccgggatgaagcagggcttagggaaaaagactatgacttcccccctcccatgagacaagctggaaggccggacctcagaccggagggggtttatgacattcctccaacctgcaccaagccagcagggaaggaccttcatgtaaaatacaactgtgacattccaggagctgcagaaccggtggctcgaaggcaccagagcctgtccccgaatcacccacccccgcaactcggacagtcagtgggctctcagaacgacgcatatgatgtcccccgaggcgttcagtttcttgagccaccagcagaaaccagtgagaaagcaaacccccaggaaagggatggtgtttatgatgtccctctgcataacccgccagatgctaaaggctctcgggacttggtggatgggatcaaccgattgtctttctccagtacaggcagcacccggagtaacatgtccacgtcttccacctcctccaaggagtcctcactgtcagcctccccagctcaggacaaaaggctcttcctggatccagacacagctattgagagacttcagcggctccagcaggcccttgagatgggtgtctccagcctaatggcactggtcactaccgactggcggtgttacggatatatggaaagacacatcaatgaaatacgcacagcagtggacaaggtggagctgttcctgaaggagtacctccactttgtcaagggagctgttgcaaatgctgcctgcctcccggaactcatcctccacaacaagatgaagcgggagctgcaacgagttgaagactcccaccagatcctgagtcaaaccagccatgacttaaatgagtgcagctggtccctgaatatcttggccatcaacaagccccagaacaagtgtgacgatctggaccggtttgtgatggtggcaaagacggtgcccgatgacgccaagcagctcaccacaaccatcaacaccaacgcagaggccctcttcagacccggccctggcagcttgcatctgaagaatgggccggagagcatcatgaactcaacggagtacccacacggtggctcccagggacagctgctgcatcctggtgaccacaaggcccaggcccacaacaaggcactgcccccaggcctgagcaaggagcaggcccctgactgtagcagcagtgatggttctgagaggagctggatggatgactacgattacgtccacctacagggtaaggaggagtttgagaggcaacagaaagagctattggaaaaagagaatatcatgaaacagaacaagatgcagctggaacatcatcagctgagccagttccagctgttggaacaagagattacaaagcccgtggagaatgacatctcgaagtggaagccctctcagagcctacccaccacaaacagtggcgtgagtgctcaggatcggcagttgctgtgcttctactatgaccaatgtgagacccatttcatttcccttctcaacgccattgacgcactcttcagttgtgtcagctcagcccagcccccgcgaatcttcgtggcacacagcaagtttgtcatcctcagtgcacacaaactggtgttcattggagacacgctgacacggcaggtgactgcccaggacattcgcaacaaagtcatgaactccagcaaccagctctgcgagcagctcaagaccatagtcatggcaaccaagatggccgccctccattaccccagcaccacggccctgcaggaaatggtgcaccaagtgacagacctttctagaaatgcccagctgttcaagcgctctttgctggagatggcaacgttctgagaagaaaaaaaagaggaaggggactgcgttaacggttactaaggaaaactggaaatactgtctggtttttgtaaatgttatctatttttgtagatattttatataaaaatgaaatattttaacattttatgggtcagtcaactttcagaaattcagggagctggagagggaaatctttttttttccccctgagtggttcttatgtatacatagaagtatctgagacataaactgtacagaaaacttgtccacgtgcttttgtatgcccatgtattcatgtttgtttgtagatgtttgtctgatgcatttcattaaaaaaaaaaccatgaattacgaagcaccttagtaagcaccttctaatgctgcattttttttgttgttgttaaaaacataccagctggttataatattgttctccacgtccttgtgatgattctgagcctggcactcccaaatctgggaagcatagtttatttgcaagtgttcaccttccaaatcatgaggcatagcatgacttattcttgtttggaaaactcttttcaaaactgaccatcttaaacacatgatggccaagtgcccaaaagccctcttgcggagcaaatttcagaatatatatgtggatccaagctctgatagttcaggtgctggagggaagagagacctgtgtgtttagaggccaggaccacagttaggattgggttgtttcaatactgagagacagctacaataaaaggagagcaattgcctccctggggctgttcaatcttctgcatttgtgagtggttcagtcatgaggttttccaaaagatgtttttagagttgtaaaaaccatatttgcagcaaagatttacaaaggcgtatcagactatgattgttcaccaaaataggggaatggtttgatccgccagttgcaagtagaggcctttctgactcttaatattcactttggtgctactacccccattacctgagggaaactggccaggtccttgatcatggaactatagagctaccaggacatatcctgctctctaagggaatttattgctatcttgcaccttctttaaaactcacatatgcagacctgacactcaagagtggctagctacacagagtccatctaatttttgcaacttcctgtggccagtgtgtataaccccttccactatctcacagatagtcacagcgtccattccatagtctgtctcctcacatctgttagtattgacacagcacagacaccacaagccatcaggttcttcatggggcaggtgaaatacttctaccccatgggtaaatgtattcacatattaccaagagaagaagcacattatctatgatcttttggcccagttcttatttagcatttttattccagcctacttggaaacatgtttttatttgcaatatatgcctgactgaattaagcttgcttgttttaaacaaccaaatcattggaacagaaaaggatttaaaaaacaagaatgcatgatctcagagtgattaaaaaaaaatcagtggaaataaatgatcatagaaggtgcttttcaaaacaactgctattataattctcaaagtcctactctgccaaaagaagattaaaagtcatacattacattacaaggaaatgttcatgtgggaagagggttgctgaaaatcaacaacgcttgaagttaaaaagtgtgtctttgtagatttcattgtataatgtgtatttcttaggagatggctgacttgattgatctacgctaagtggagacatttcacatttttaaaaccaaatgttcaatctgtattactctttgccgtcttgtatgtagaggctatttttaaatcattaaatttttagatctctg

SEQ ID NO: 158498 - DNA, 587 bp, Homo sapiens
  Payload ID: 11021
  Gene Symbol: NEDD9
  Gene Name: neural precursor cell expressed, developmentally down-regulated 9
  ENST ID: ENST00000513989
  CDS Start-End: 499-587
agggaaatgcttacagctgcctctagaagcaagtccgctcgctgcatggagagggaaacatgagcatgcagcaggactagctgtcacctcccgcccgcctgcccagagagggccagagcgtcggggaggcaagatgatccaccagcggttccatcctacacttggattcagtaagctgtgaggtccgtaatgtcagacactggcaaacatcatatgttcttcaagtagagttatgaaaacgaagaaactggtcagaagagtaaaacgccggaattgtcctttccaacatccagagctgcatcattccttggggcaaaatgtggacaaggctctgattctaaatccctgaagtggttgaacactgtgtctgaggccagaagctttcgtgggtcactagaaaagagcctagtgagggggaggaactggactggaacgtggaaagctggaatcgggtctgacctgccctgccgccttggcaaatcactcctacagaatcttatggcaagggccttatatgacaatgtcccagagtgtgccgaggaactggcctttcgcaagggagacatcctgaccgtcatagagcagaa

SEQ ID NO: 158499 - DNA, 3211 bp, Homo sapiens
  Payload ID: 11021
  Gene Symbol: NEDD9
  Gene Name: neural precursor cell expressed, developmentally down-regulated 9
  Uniprot ID: Q14511
  ENST ID: ENST00000504387
  CDS Start-End: 363-2867
acacatacatatgccactcacatccgacgtgtgtggttgctcagtagggaaatgcttacagctgcctctagaagcaagtccgctcgctgcatggagagggaaacatgagcatgcagcaggactagctgtcacctcccgcccgcctgcccagagagggccagagcgtcggggaggcaagatgatccaccagcggttccatcctacacttggattcagtaagctgtgaggtccgtaatgtcagacactggcaaacatcatatgttcttcaagtagagttatgaaaacgaagaaactggtcagaagagtaaaacgccggaattgtcctttccaacatccagagctgcatcattccttggggcaaaatgtggacaaggaatcttatggcaagggccttatatgacaatgtcccagagtgtgccgaggaactggcctttcgcaagggagacatcctgaccgtcatagagcagaacacagggggactggaaggatggtggctgtgctcattacacggtcggcaaggcattgtcccaggcaaccgggtgaagcttctgattggtcccatgcaggagactgcctccagtcacgagcagcctgcctctggactgatgcagcagacctttggccaacagaagctctatcaagtgccaaacccacaggctgctccccgagacaccatctaccaagtgccaccttcctaccaaaatcagggaatttaccaagtccccactggccacggcacccaagaacaagaggtatatcaggtgccaccatcagtgcagagaagcattgggggaaccagtgggccccacgtgggtaaaaaggtgataacccccgtgaggacaggccatggctacgtatacgagtacccatccagataccaaaaggacgtctatgatatccctccttctcataccactcaaggggtatacgacatccctccctcatcagcaaaaggccctgtgttttcagttccagtgggagagataaaacctcaaggggtgtatgacatcccgcctacaaaaggggtatatgccattccgccctctgcttgccgggatgaagcagggcttagggaaaaagactatgacttcccccctcccatgagacaagctggaaggccggacctcagaccggagggggtttatgacattcctccaacctgcaccaagccagcagggaaggaccttcatgtaaaatacaactgtgacattccaggagctgcagaaccggtggctcgaaggcaccagagcctgtccccgaatcacccacccccgcaactcggacagtcagtgggctctcagaacgacgcatatgatgtcccccgaggcgttcagtttcttgagccaccagcagaaaccagtgagaaagcaaacccccaggaaagggatggtgtttatgatgtccctctgcataacccgccagatgctaaaggctctcgggacttggtggatgggatcaaccgattgtctttctccagtacaggcagcacccggagtaacatgtccacgtcttccacctcctccaaggagtcctcactgtcagcctccccagctcaggacaaaaggctcttcctggatccagacacagctattgagagacttcagcggctccagcaggcccttgagatgggtgtctccagcctaatggcactggtcactaccgactggcggtgttacggatatatggaaagacacatcaatgaaatacgcacagcagtggacaaggtggagctgttcctgaaggagtacctccactttgtcaagggagctgttgcaaatgctgcctgcctcccggaactcatcctccacaacaagatgaagcgggagctgcaacgagttgaagactcccaccagatcctgagtcaaaccagccatgacttaaatgagtgcagctggtccctgaatatcttggccatcaacaagccccagaacaagtgtgacgatctggaccggtttgtgatggtggcaaagacggtgcccgatgacgccaagcagctcaccacaaccatcaacaccaacgcagaggccctcttcagacccggccctggcagcttgcatctgaagaatgggccggagagcatcatgaactcaacggagtacccacacggtggctcccagggacagctgctgcatcctggtgaccacaaggcccaggcccacaacaaggcactgcccccaggcctgagcaaggagcaggcccctgactgtagcagcagtgatggttctgagaggagctggatggatgactacgattacgtccacctacagggtaaggaggagtttgagaggcaacagaaagagctattggaaaaagagaatatcatgaaacagaacaagatgcagctggaacatcatcagctgagccagttccagctgttggaacaagagattacaaagcccgtggagaatgacatctcgaagtggaagccctctcagagcctacccaccacaaacagtggcgtgagtgctcaggatcggcagttgctgtgcttctactatgaccaatgtgagacccatttcatttcccttctcaacgccattgacgcactcttcagttgtgtcagctcagcccagcccccgcgaatcttcgtggcacacagcaagtttgtcatcctcagtgcacacaaactggtgttcattggagacacgctgacacggcaggtgactgcccaggacattcgcaacaaagtcatgaactccagcaaccagctctgcgagcagctcaagaccatagtcatggcaaccaagatggccgccctccattaccccagcaccacggccctgcaggaaatggtgcaccaagtgacagacctttctagaaatgcccagctgttcaagcgctctttgctggagatggcaacgttctgagaagaaaaaaaagaggaaggggactgcgttaacggttactaaggaaaactggaaatactgtctggtttttgtaaatgttatctatttttgtagatattttatataaaaatgaaatattttaacattttatgggtcagtcaactttcagaaattcagggagctggagagggaaatctttttttttccccctgagtggttcttatgtatacatagaagtatctgagacataaactgtacagaaaacttgtccacgtgcttttgtatgcccatgtattcatgtttgtttgtagatgtttgtctgatgcatttcattaaaaaaaaaaccatgaattacgaagcacctt

SEQ ID NO: 158500 - DNA, 581 bp, Homo sapiens
  Payload ID: 11021
  Gene Symbol: NEDD9
  Gene Name: neural precursor cell expressed, developmentally down-regulated 9
  ENST ID: ENST00000508546
  CDS Start-End: 516-581
gctcagtagggaaatgcttacagctgcctctagaagcaagtccgctcgctgcatggagagggaaacatgagcatgcagcaggactagctgtcacctcccgcccgcctgcccagagagggccagagcgtcggggaggcaagatgatccaccagcggttccatcctacacttggattcagtaagctgtgaggtccgtaatgtcagacactggcaaacatcatatgttcttcaagtagagttatgaaaacgaagaaactggtcagaagagtaaaacgccggaattgtcctttccaacatccagagctgcatcattccttggggcaaaatgtggacaaggctctgattctaaatccctgaagtggttgaacactgtgtctgaggccagaagctttcgtgggtcactagaaaagagcctagtgagggggaggaactggactggaacgtggaaagctggaatcgggtctgacctgccctgccgccttggcaaatcactcctacaggccttcaactgattggatgaggcccaccaacattatgaagggcaatctgctttactcaaagtccattggtttaaataatctt

SEQ ID NO: 158501 - DNA, 4086 bp, Homo sapiens
  Payload ID: 11021
  Gene Symbol: NEDD9
  Gene Name: neural precursor cell expressed, developmentally down-regulated 9
  ENST ID: ENST00000620854
  CDS Start-End: 168-2225
acaacagtgagctcagagacttgagggaggcgctgcgactgacaagcggctctgcccgggaccttctcgctttcatctagcgctgcactcaatggaggggcgggcaccgcagtgcttaatgctgtcttaactagtgtaggaaaacggctcaacccaccgctgccgaaatgaagtataaggtgataacccccgtgaggacaggccatggctacgtatacgagtacccatccagataccaaaaggacgtctatgatatccctccttctcataccactcaaggggtatacgacatccctccctcatcagcaaaaggccctgtgttttcagttccagtgggagagataaaacctcaaggggtgtatgacatcccgcctacaaaaggggtatatgccattccgccctctgcttgccgggatgaagcagggcttagggaaaaagactatgacttcccccctcccatgagacaagctggaaggccggacctcagaccggagggggtttatgacattcctccaacctgcaccaagccagcagggaaggaccttcatgtaaaatacaactgtgacattccaggagctgcagaaccggtggctcgaaggcaccagagcctgtccccgaatcacccacccccgcaactcggacagtcagtgggctctcagaacgacgcatatgatgtcccccgaggcgttcagtttcttgagccaccagcagaaaccagtgagaaagcaaacccccaggaaagggatggtgtttatgatgtccctctgcataacccgccagatgctaaaggctctcgggacttggtggatgggatcaaccgattgtctttctccagtacaggcagcacccggagtaacatgtccacgtcttccacctcctccaaggagtcctcactgtcagcctccccagctcaggacaaaaggctcttcctggatccagacacagctattgagagacttcagcggctccagcaggcccttgagatgggtgtctccagcctaatggcactggtcactaccgactggcggtgttacggatatatggaaagacacatcaatgaaatacgcacagcagtggacaaggtggagctgttcctgaaggagtacctccactttgtcaagggagctgttgcaaatgctgcctgcctcccggaactcatcctccacaacaagatgaagcgggagctgcaacgagttgaagactcccaccagatcctgagtcaaaccagccatgacttaaatgagtgcagctggtccctgaatatcttggccatcaacaagccccagaacaagtgtgacgatctggaccggtttgtgatggtggcaaagacggtgcccgatgacgccaagcagctcaccacaaccatcaacaccaacgcagaggccctcttcagacccggccctggcagcttgcatctgaagaatgggccggagagcatcatgaactcaacggagtacccacacggtggctcccagggacagctgctgcatcctggtgaccacaaggcccaggcccacaacaaggcactgcccccaggcctgagcaaggagcaggcccctgactgtagcagcagtgatggttctgagaggagctggatggatgactacgattacgtccacctacagggtaaggaggagtttgagaggcaacagaaagagctattggaaaaagagaatatcatgaaacagaacaagatgcagctggaacatcatcagctgagccagttccagctgttggaacaagagattacaaagcccgtggagaatgacatctcgaagtggaagccctctcagagcctacccaccacaaacagtggcgtgagtgctcaggatcggcagttgctgtgcttctactatgaccaatgtgagacccatttcatttcccttctcaacgccattgacgcactcttcagttgtgtcagctcagcccagcccccgcgaatcttcgtggcacacagcaagtttgtcatcctcagtgcacacaaactggtgttcattggagacacgctgacacggcaggtgactgcccaggacattcgcaacaaagtcatgaactccagcaaccagctctgcgagcagctcaagaccatagtcatggcaaccaagatggccgccctccattaccccagcaccacggccctgcaggaaatggtgcaccaagtgacagacctttctagaaatgcccagctgttcaagcgctctttgctggagatggcaacgttctgagaagaaaaaaaagaggaaggggactgcgttaacggttactaaggaaaactggaaatactgtctggtttttgtaaatgttatctatttttgtagatattttatataaaaatgaaatattttaacattttatgggtcagtcaactttcagaaattcagggagctggagagggaaatctttttttttccccctgagtggttcttatgtatacatagaagtatctgagacataaactgtacagaaaacttgtccacgtgcttttgtatgcccatgtattcatgtttgtttgtagatgtttgtctgatgcatttcattaaaaaaaaaaccatgaattacgaagcaccttagtaagcaccttctaatgctgcattttttttgttgttgttaaaaacataccagctggttataatattgttctccacgtccttgtgatgattctgagcctggcactcccaaatctgggaagcatagtttatttgcaagtgttcaccttccaaatcatgaggcatagcatgacttattcttgtttggaaaactcttttcaaaactgaccatcttaaacacatgatggccaagtgcccaaaagccctcttgcggagcaaatttcagaatatatatgtggatccaagctctgatagttcaggtgctggagggaagagagacctgtgtgtttagaggccaggaccacagttaggattgggttgtttcaatactgagagacagctacaataaaaggagagcaattgcctccctggggctgttcaatcttctgcatttgtgagtggttcagtcatgaggttttccaaaagatgtttttagagttgtaaaaaccatatttgcagcaaagatttacaaaggcgtatcagactatgattgttcaccaaaataggggaatggtttgatccgccagttgcaagtagaggcctttctgactcttaatattcactttggtgctactacccccattacctgagggaaactggccaggtccttgatcatggaactatagagctaccaggacatatcctgctctctaagggaatttattgctatcttgcaccttctttaaaactcacatatgcagacctgacactcaagagtggctagctacacagagtccatctaatttttgcaacttcctgtggccagtgtgtataaccccttccactatctcacagatagtcacagcgtccattccatagtctgtctcctcacatctgttagtattgacacagcacagacaccacaagccatcaggttcttcatggggcaggtgaaatacttctaccccatgggtaaatgtattcacatattaccaagagaagaagcacattatctatgatcttttggcccagttcttatttagcatttttattccagcctacttggaaacatgtttttatttgcaatatatgcctgactgaattaagcttgcttgttttaaacaaccaaatcattggaacagaaaaggatttaaaaaacaagaatgcatgatctcagagtgattaaaaaaaaatcagtggaaataaatgatcatagaaggtgcttttcaaaacaactgctattataattctcaaagtcctactctgccaaaagaagattaaaagtcatacattacattacaaggaaatgttcatgtgggaagagggttgctgaaaatcaacaacgcttgaagttaaaaagtgtgtctttgtagatttcattgtataatgtgtatttcttaggagatggctgacttgattgatctacgctaagtggagacatttcacatttttaaaaccaaatgttcaatctgtattactctttgccgtcttgtatgtagaggctatttttaaatcattaaatttttagatctctgttttc

SEQ ID NO: 158502 - DNA, 2187 bp, Homo sapiens
  Payload ID: 11022
  Gene Symbol: NPDC1
  Gene Name: neural proliferation, differentiation and control, 1
  ENST ID: ENST00000371600
  CDS Start-End: 674-1885
gtgtgcagtgtggggctgggcagagaggaagagtcctggttagccagaggtgccaccgcagactccccaggcagggttgatggccctgctggggttcccctggctccactggcttgctgtgactggggacattccttagctttgaggcaactcagctatatcccagaggggaaactgaggcagagggccattgccccctcgccccgttctccagcaccaggataagactgattagccacatgtgtcagctggcaccgtggcctgggcccctcatcagcgagatgaaagtgtggttaggaactagggaactagggcctggcctgccatccccagcactgccaacctcggcctcctgaggccctcgggtgccacctggcccctgactgcagcccctggtgtggtggctttgggagtgacctgcctgggttctgtgtctgaggccagtgaggtcagcagactccatcttaggtgtcctcggtgcctgggggacaagccagaggctggaggagcagcatcccttccaggctgcacacttgtcagtgccgggttctggggagagccgcacgggaaggagaggtcgctggcggcatcgtttgctgctccccagagacagacctgggcccttccctctgggactcccaatctggacggggttcctggcttgctgtggggcatgttgaggccggaggctgggcttgtggggctgcacggccctgcccaggagaactcagcactgcctggacggcgagactcagcttctgagctgagggctctatcaggcctggaagtggaccctggggaggggtggggcagggtagttctgataagtcctaggactgttcgcttccgggttctgagccctggcgtcagggaggaagggcatgtccagaacaatggccagaaccaggcccggccagctcggggggtgacgggggcgggtggctggggcagcgctgccgtgtgcaggggccgagccctgcggggccgtgagccggccctgccttctgcttccttcccagatgtagccgcctgtcccgggagcctggactgtgccctgaagaggcgggcaaggtgtcctcctggtgcacatgcctgtgggccctgccttcagcccttccaggaggaccagcaagggctctgtgtgcccaggatgcgccggcctccaggcgggggccggccccagcccagactggaagatgagattgacttcctggcccaggagcttgcccggaaggagtctggacactcaactccgcccctacccaaggaccgacagcggctcccggagcctgccaccctgggcttctcggcacgggggcaggggctggagctgggcctcccctccactccaggaacccccacgcccacgccccacacctccctgggctcccctgtgtcatccgacccggtgcacatgtcgcccctggagccccggggagggcaaggcgacggcctcgcccttgtgctgatcctggcgttctgtgtggccggtgcagccgccctctccgtagcctccctctgctggtgcaggctgcagcgtgagatccgcctgactcagaaggccgactacgccactgcgaaggcccctggctcacctgcagctccccggatctcgcctggggaccagcggctggcacagagcgcggagatgtaccactaccagcaccaacggcaacagatgctgtgcctggagcggcataaagagccacccaaggagctggacacggcctcctcggatgaggagaatgaggacggagacttcacggtgtacgagtgcccgggcctggccccgaccggggaaatggaggtgcgcaaccctctgttcgaccacgccgcactgtccgcgcccctgccggcccccagctcaccgcctgcactgccatgacctggaggcagacagacgcccacctgctccccgacctcgaggcccccggggaggggcagggcctggagcttcccactaaaaacatgttttgatgctgtgtgcttttggctgggcctcgggctccaggccctgggaccccttgccagggagacccccgaacctttgtgccaggacacctcctggtcccctgcacctctcctgttcggtttagacccccaaactggagggggcatggagaaccgtagagcgcaggaacgggtgggtaattctagagacaaaagccaattaaagtccatttcaga

SEQ ID NO: 158503 - DNA, 1494 bp, Homo sapiens
  Payload ID: 11022
  Gene Symbol: NPDC1
  Gene Name: neural proliferation, differentiation and control, 1
  Uniprot ID: Q9NQX5
  ENST ID: ENST00000371601
  CDS Start-End: 215-1192
gcgcgcctcgccggcgcctccatcccggatccttgctgcagcgtcagcgccgccgcccgtgcctttcctcttcctcctcctcctccttggcatccgcctcttcttcctcctgcgtcctcccccgctgcctccgctgctcccgacgcggagcccggagcccgcgccgagcccctggcctcgcggtgccatgctgccccggcggcggcgctgaaggatggcgacgccgctgcctccgccctccccgcggcacctgcggctgctgcggctgctgctctccggcctcgtcctcggcgccgccctgcgtggagccgccgccggccacccggatgtagccgcctgtcccgggagcctggactgtgccctgaagaggcgggcaaggtgtcctcctggtgcacatgcctgtgggccctgccttcagcccttccaggaggaccagcaagggctctgtgtgcccaggatgcgccggcctccaggcgggggccggccccagcccagactggaagatgagattgacttcctggcccaggagcttgcccggaaggagtctggacactcaactccgcccctacccaaggaccgacagcggctcccggagcctgccaccctgggcttctcggcacgggggcaggggctggagctgggcctcccctccactccaggaacccccacgcccacgccccacacctccctgggctcccctgtgtcatccgacccggtgcacatgtcgcccctggagccccggggagggcaaggcgacggcctcgcccttgtgctgatcctggcgttctgtgtggccggtgcagccgccctctccgtagcctccctctgctggtgcaggctgcagcgtgagatccgcctgactcagaaggccgactacgccactgcgaaggcccctggctcacctgcagctccccggatctcgcctggggaccagcggctggcacagagcgcggagatgtaccactaccagcaccaacggcaacagatgctgtgcctggagcggcataaagagccacccaaggagctggacacggcctcctcggatgaggagaatgaggacggagacttcacggtgtacgagtgcccgggcctggccccgaccggggaaatggaggtgcgcaaccctctgttcgaccacgccgcactgtccgcgcccctgccggcccccagctcaccgcctgcactgccatgacctggaggcagacagacgcccacctgctccccgacctcgaggcccccggggaggggcagggcctggagcttcccactaaaaacatgttttgatgctgtgtgcttttggctgggcctcgggctccaggccctgggaccccttgccagggagacccccgaacctttgtgccaggacacctcctggtcccctgcacctctcctgttcggtttagacccccaaactggagggggcatggagaaccgtagagcgcaggaacgggtgggtaattctagagacaaaagccaattaaagtccatttcaga

SEQ ID NO: 158504 - DNA, 358 bp, Homo sapiens
  Payload ID: 11022
  Gene Symbol: NPDC1
  Gene Name: neural proliferation, differentiation and control, 1
  ENST ID: ENST00000472668
  CDS Start-End: 1-86
aacagatgctgtgcctggagcgactgggccactggcacctcgagggcatggggaggacccagcgatccccccccacccaggcataaagagccacccaaggagctggacacggcctcctcggatgaggagaatgaggacggagacttcacggtgtacgagtgcccgggcctggccccgaccggggaaatggaggtgcgcaaccctctgttcgaccacgccgcactgtccgcgcccctgccggcccccagctcaccgcctgcactgccatgacctggaggcagacagacgcccacctgctccccgacctcgaggcccccggggaggggcagggcctggagcttcccactaaaaacatgtt

SEQ ID NO: 158505 - DNA, 810 bp, Homo sapiens
  Payload ID: 11023
  Gene Symbol: NRL
  Gene Name: neural retina leucine zipper
  Uniprot ID: P54845
  ENST ID: ENST00000396995
  CDS Start-End: 286-582
ggagggttgggggctgtctgggtgcgggtccactggacacacccgggcctggagctggatgccggggatcccagagacgagcccggggtttaggtgcgcgacgggctcgcctgaccgtggccggccctgcaccgtggggcgcccgcctgactggagcaacggtcagctggggggcccggggagcgtcggggcctggggcgggctctggaccgaaacagactgcgtggaagggcgagccttccggtgaagctggcagagcggttttccgacgcggcgctggtctcgatgtctgtgcgggagctaaaccggcagctgcggggctgcgggcgcgacgaggcgctgcggctgaagcagaggcgccgcacgctgaagaaccgcggctacgcgcaggcctgtcgctccaagcggctgcagcagcggcgcgggctggaggccgagcgcgcccgcctggccgcccagctggacgcgctgcgggccgaggtggcccgcctggcccgggagcgcgatctctacaaggctcgctgtgaccggctaacctcgagcggccccgggtccggggacccctcccacctcttcctctgagccgttcagagcaccttgtggtgtagtgggggctgggtggggtggctccgcccaggaggcggctgcacggttctctgcatcgttaccagagcgccttctggtcctagccacgccctgtatgaccgcgcaaatatccccaaagcttttgggtcctcaagtcatgcccgaatttagatgctggtcattttctggagaggggtcccctccccttacgaacacagaaaccca

SEQ ID NO: 158506 - DNA, 1517 bp, Homo sapiens
  Payload ID: 11023
  Gene Symbol: NRL
  Gene Name: neural retina leucine zipper
  Uniprot ID: P54845
  ENST ID: ENST00000396997
  CDS Start-End: 445-1158
gcctcagagaataaataggagactaagaggacaggcagacaaacaggacgagcctgggggctccaggcctggacggaggaagaagccagctatacggggtttctccatgctggccaagctggtctccaactcctgacctcgtgatccgcctgccttggcctcccaaagtgctggaatttacaggcgtgagccaccacgcccggcctggtcattctttctctccacaatccaatgaggaaactcatctgcccacccaactaccatcataaagtcctcaggtgatttctcaagctatacctccattgggacatctctctccaacctgagaccactggatatcacccacaatgctatatagcacctcaaactcagcatatctatgatgggtgtctgctcagcatccactcgccttttctggtgcactcctcccagcccagctccagaatggccctgccccccagccccctggccatggaatatgtcaatgactttgacttgatgaagtttgaggtaaagcgggaaccctctgagggccgacctggcccccctacagcctcactgggctccacaccttacagctcagtgcctccttcacccaccttcagtgaaccaggcatggtgggggcaaccgagggcacccggccaggcctggaggagctgtactggctggctaccctgcagcagcagctgggggctggggaggcattggggctgagtcctgaagaggccatggagctgctgcagggtcagggcccagtccctgttgatgggccccatggctactacccagggagcccagaggagacaggagcccagcacgtccagctggcagagcggttttccgacgcggcgctggtctcgatgtctgtgcgggagctaaaccggcagctgcggggctgcgggcgcgacgaggcgctgcggctgaagcagaggcgccgcacgctgaagaaccgcggctacgcgcaggcctgtcgctccaagcggctgcagcagcggcgcgggctggaggccgagcgcgcccgcctggccgcccagctggacgcgctgcgggccgaggtggcccgcctggcccgggagcgcgatctctacaaggctcgctgtgaccggctaacctcgagcggccccgggtccggggacccctcccacctcttcctctgagccgttcagagcaccttgtggtgtagtgggggctgggtggggtggctccgcccaggaggcggctgcacggttctctgcatcgttaccagagcgccttctggtcctagccacgccctgtatgaccgcgcaaatatccccaaagcttttgggtcctcaagtcatgcccgaatttagatgctggtcattttctggagaggggtcccctccccttacgaacacagaaacccagcccacatgactagcacgctgagctctgcagggaccagtgccaggcactggggggtggaagtgtggtgacacagtgaatgggaggtggaggagggttgcagctcccacctcagtttagtttttaattcagg

SEQ ID NO: 158507 - DNA, 1976 bp, Homo sapiens
  Payload ID: 11023
  Gene Symbol: NRL
  Gene Name: neural retina leucine zipper
  Uniprot ID: P54845
  ENST ID: ENST00000397002
  CDS Start-End: 134-847
gagctgagcagaggcaccaggccctgctccatggagccttcagtctcctgggaagctgtgcctgtctggctctggcactgaccacatcctctcggccatttctgaagtgcactcctcccagcccagctccagaatggccctgccccccagccccctggccatggaatatgtcaatgactttgacttgatgaagtttgaggtaaagcgggaaccctctgagggccgacctggcccccctacagcctcactgggctccacaccttacagctcagtgcctccttcacccaccttcagtgaaccaggcatggtgggggcaaccgagggcacccggccaggcctggaggagctgtactggctggctaccctgcagcagcagctgggggctggggaggcattggggctgagtcctgaagaggccatggagctgctgcagggtcagggcccagtccctgttgatgggccccatggctactacccagggagcccagaggagacaggagcccagcacgtccagctggcagagcggttttccgacgcggcgctggtctcgatgtctgtgcgggagctaaaccggcagctgcggggctgcgggcgcgacgaggcgctgcggctgaagcagaggcgccgcacgctgaagaaccgcggctacgcgcaggcctgtcgctccaagcggctgcagcagcggcgcgggctggaggccgagcgcgcccgcctggccgcccagctggacgcgctgcgggccgaggtggcccgcctggcccgggagcgcgatctctacaaggctcgctgtgaccggctaacctcgagcggccccgggtccggggacccctcccacctcttcctctgagccgttcagagcaccttgtggtgtagtgggggctgggtggggtggctccgcccaggaggcggctgcacggttctctgcatcgttaccagagcgccttctggtcctagccacgccctgtatgaccgcgcaaatatccccaaagcttttgggtcctcaagtcatgcccgaatttagatgctggtcattttctggagaggggtcccctccccttacgaacacagaaacccagcccacatgactagcacgctgagctctgcagggaccagtgccaggcactggggggtggaagtgtggtgacacagtgaatgggaggtggaggagggttgcagctcccacctcagtttagtttttaattcagggttttcaacctgtaacacattaaagctgtaattagcaatgaggctgtattttcattctgaagcttgtaacctccccattttagcactacagaattttcaagatttcaatatccaacaactagatagattaggacctctatccgagatgctttttccctgcccaaccctgtggccttcagggctcagagcagcaaaggcctgaagagtgagctctgggggttgttggtgtgggttgggagagagctgtgtgcagaagtctggaaacctgggtcctagtcccagctcttccatgggatccccctgtcaccctgagcaaatcagttgcttcctggacttgtgttacttcatctaattctcatgtggattggacgacttctgctccctttccagttctggcatctccccagtatggaagtcccggtggtctccccaagaagtccccaagacaatctcgccaaaggcacctcctatcctgctgcagtttcccagctgcagcctaggcaggggatgcacagcccaggcgaggaagcctggcttctctgtgagcacatacgtgggtcctcggcagctccctccaggctgtctgggcctccagacctgcacagggtgctcctgccacctcccacctctctgagggctgaggtgagacttctcctgggatgacaatttgctgagagagtgcagcttttgtgaattaaacttgaagtccaggcagaattctaatgcaataagctaaatgttcttgcaatttaagaagtgttcattcttta

SEQ ID NO: 158508 - DNA, 788 bp, Homo sapiens
  Payload ID: 11023
  Gene Symbol: NRL
  Gene Name: neural retina leucine zipper
  Uniprot ID: P54845
  ENST ID: ENST00000560550
  CDS Start-End: 256-552
ccaaatcctgtgagggtcaccgggttgcaggcttcaggacagggaaacgcagcgcgttggagggttgggggctgtctgggtgcgggtccactggacacacccgggcctggagctggatgccggggatcccagagacgagcccggggtttaggtgcgcgacgggctcgcctgaccgtggccggccctgcaccgtggggcgcccgcctgactggagcaacgctggcagagcggttttccgacgcggcgctggtctcgatgtctgtgcgggagctaaaccggcagctgcggggctgcgggcgcgacgaggcgctgcggctgaagcagaggcgccgcacgctgaagaaccgcggctacgcgcaggcctgtcgctccaagcggctgcagcagcggcgcgggctggaggccgagcgcgcccgcctggccgcccagctggacgcgctgcgggccgaggtggcccgcctggcccgggagcgcgatctctacaaggctcgctgtgaccggctaacctcgagcggccccgggtccggggacccctcccacctcttcctctgagccgttcagagcaccttgtggtgtagtgggggctgggtggggtggctccgcccaggaggcggctgcacggttctctgcatcgttaccagagcgccttctggtcctagccacgccctgtatgaccgcgcaaatatccccaaagcttttgggtcctcaagtcatgcccgaatttagatgctggtcattttctggagaggggtcccctccccttacgaacacagaaacccagcccacat

SEQ ID NO: 158509 - DNA, 2103 bp, Homo sapiens
  Payload ID: 11023
  Gene Symbol: NRL
  Gene Name: neural retina leucine zipper
  Uniprot ID: P54845
  ENST ID: ENST00000561028
  CDS Start-End: 321-1034
cgccgggggtgtgtacgccatgagggggaggaagccgagaagcacctcccactgaagccggcggtaaccgccccacgcgagaccacccaccagccaggagcggtcgcaggacccgcagcggcgcgaggccttgtttacaccgactgccgccactgcgttggccaaccgctcctccgtcacgcgcttcgctcgtcacgcatctcgcggcttcctggccggcgggctgcaaacgtcacacgacggccccgcccccttggccagccaactggacagcggagcacgatgattgataggtgcactcctcccagcccagctccagaatggccctgccccccagccccctggccatggaatatgtcaatgactttgacttgatgaagtttgaggtaaagcgggaaccctctgagggccgacctggcccccctacagcctcactgggctccacaccttacagctcagtgcctccttcacccaccttcagtgaaccaggcatggtgggggcaaccgagggcacccggccaggcctggaggagctgtactggctggctaccctgcagcagcagctgggggctggggaggcattggggctgagtcctgaagaggccatggagctgctgcagggtcagggcccagtccctgttgatgggccccatggctactacccagggagcccagaggagacaggagcccagcacgtccagctggcagagcggttttccgacgcggcgctggtctcgatgtctgtgcgggagctaaaccggcagctgcggggctgcgggcgcgacgaggcgctgcggctgaagcagaggcgccgcacgctgaagaaccgcggctacgcgcaggcctgtcgctccaagcggctgcagcagcggcgcgggctggaggccgagcgcgcccgcctggccgcccagctggacgcgctgcgggccgaggtggcccgcctggcccgggagcgcgatctctacaaggctcgctgtgaccggctaacctcgagcggccccgggtccggggacccctcccacctcttcctctgagccgttcagagcaccttgtggtgtagtgggggctgggtggggtggctccgcccaggaggcggctgcacggttctctgcatcgttaccagagcgccttctggtcctagccacgccctgtatgaccgcgcaaatatccccaaagcttttgggtcctcaagtcatgcccgaatttagatgctggtcattttctggagaggggtcccctccccttacgaacacagaaacccagcccacatgactagcacgctgagctctgcagggaccagtgccaggcactggggggtggaagtgtggtgacacagtgaatgggaggtggaggagggttgcagctcccacctcagtttagtttttaattcagggttttcaacctgtaacacattaaagctgtaattagcaatgaggctgtattttcattctgaagcttgtaacctccccattttagcactacagaattttcaagatttcaatatccaacaactagatagattaggacctctatccgagatgctttttccctgcccaaccctgtggccttcagggctcagagcagcaaaggcctgaagagtgagctctgggggttgttggtgtgggttgggagagagctgtgtgcagaagtctggaaacctgggtcctagtcccagctcttccatgggatccccctgtcaccctgagcaaatcagttgcttcctggacttgtgttacttcatctaattctcatgtggattggacgacttctgctccctttccagttctggcatctccccagtatggaagtcccggtggtctccccaagaagtccccaagacaatctcgccaaaggcacctcctatcctgctgcagtttcccagctgcagcctaggcaggggatgcacagcccaggcgaggaagcctggcttctctgtgagcacatacgtgggtcctcggcagctccctccaggctgtctgggcctccagacctgcacagggtgctcctgccacctcccacctctctgagggctgaggtgagacttctcctgggatgacaatttgctgagagagtgcagcttttgtgaattaaacttgaagtcca

SEQ ID NO: 158510 - DNA, 737 bp, Homo sapiens
  Payload ID: 11023
  Gene Symbol: NRL
  Gene Name: neural retina leucine zipper
  ENST ID: ENST00000558280
  CDS Start-End: 543-737
gggggtgtgtacgccatgagggggaggaagccgagaagcacctcccactgaagccggcggtaaccgccccacgcgagaccacccaccagccaggagcggtcgcaggacccgcagcggcgcgaggccttgtttacaccgactgccgccactgcgttggccaaccgctcctccgtcacgcgcttcgctcgtcacgcatctcgcggcttcctggccggcgggctgcaaacgtcacacgacggccccgcccccttggccagccaactggacagcggagcacgatgattgataggccaataagatatgcaaatgatctccttaccttattggttggaggcctcaggaccacagatgacctcagagagctggccctttaagaatgccctttgggctctgtgcccacagccccctggagctgagcagaggcaccaggccctgctccatggagccttcagtctcctgggaagctgtgcctgtctggctctggcactgaccacatcctctcggccatttctgaagtgcactcctcccagcccagctccagaatggccctgccccccagccccctggccatggaatatgtcaatgactttgacttgatgaagtttgaggtaaagcgggaaccctctgagggccgacctggcccccctacagcctcactgggctccacaccttacagctcagtgcctccttcacccaccttcagtgaaccaggcatggtgggggcaaccgagggcacc

SEQ ID NO: 158511 - DNA, 4314 bp, Homo sapiens
  Payload ID: 11024
  Gene Symbol: NEURL1
  Gene Name: neuralized E3 ubiquitin protein ligase 1
  Uniprot ID: O76050
  ENST ID: ENST00000369780
  CDS Start-End: 410-2134
cgaacgcccacgccagcgaccctgactctatggccccgggggagcgcgccggagccgccgcgccgcccacccccagccggaaccctagcgtcccggggagcaagcggggagccccgggcgtccccggccccggcccagggccctgcttgtggcccccgctcccgccacggggcatgggaggcaggtagcccagcctgcgccaggacacccgtggcgggcggaacccgccaaggaccgcgaagtccagagaaaggaagctgaggagctgcccgcccgcccccggctgcagccccagcagggccctcccccggtggcgcgcacccgcgcgcgcacactcgcacaccgcacctcagcgcctgcccggcctcgcccccacccgcgagcgccgaacctcctggggccggatgccatgggtaacaacttctccagtatcccctcgctgccccgaggaaacccgagccgcgcgccgcggggccacccccagaacctcaaagactctatcgggggccccttccccgtcacttctcaccgatgccaccacaagcagaagcactgtccggcagtgctgcccagcggggggctcccagccacgccgctgctcttccacccgcacaccaagggctcccagatcctcatggacctcagccacaaggctgtcaagaggcaggccagcttctgcaacgccatcaccttcagcaaccgcccggtcctcatctacgagcaagtcaggctgaagatcaccaagaagcagtgctgctggagcggggccctgcggctgggcttcaccagcaaggacccgtcccgcatccaccctgactcgctgcccaagtacgcctgccccgacctggtgtcccagagtggcttctgggccaaggcgctgcctgaggagtttgccaatgagggcaacatcatcgcattctgggtggacaagaagggccgtgtcttccaccgcatcaacgactcggctgttatgctgttcttcagcggggtccgcacggccgacccgctctgggccctggtggacgtctacggcctcacgcggggcgtccagctgcttgatagcgagctggtgctcccggactgtctgcggccgcgctccttcaccgccctgcggcggccgtcgctgcggcgcgaggcggacgacgcgcgcctctcggtgagcctatgcgacctcaacgtgccgggcgcggacggcgacgaggccgcgccggccgccggctgccccatcccgcagaactcactcaactcgcagcacagccgcgcgctgccggcgcagctcgacggcgacctgcgtttccacgccctgcgcgccggcgcgcacgtccgcatcctcgacgagcagacggtggcgcgcgtggagcacgggcgcgacgagcgcgcgctcgtcttcaccagccggcccgtgcgcgtggccgagaccatcttcgtcaaggtcacgcgctcgggtggcgcgcggcccggcgcgctgtcgttcggcgtcaccacgtgcgaccccggcacgctgcggccggccgacctgcctttcagccctgaggccctggtggaccgcaaggaattctgggccgtgtgccgcgtgcccgggcccctgcacagcggcgacatcctgggcctggtggtcaacgccgacggcgagctgcacctcagccacaatggcgcggccgccggcatgcagctgtgcgtggacgcctcgcagccgctttggatgctcttcggcctgcacgggaccatcacgcagatccgcatcctcggctccactatcctggccgagcggggtatcccatcactcccctgctcccctgcctccacgccaacctcgcccagtgccctgggcagccgcctgtctgaccccttgctcagcacgtgcagctctggccctctgggtagctctgctggtgggacagcccccaattcgccagtgagcctgcccgagtcgccagtgaccccaggtctgggccagtggagcgatgagtgcaccatttgctatgaacacgcggtggacacggtcatctacacatgtggccacatgtgcctctgctacgcctgtggcctgcgcctcaagaaggctctgcacgcctgctgccccatctgccgccgccccatcaaggacatcatcaagacctaccgcagctcctagcccgttgcggtggcccatcccgcatacccatcttctcgggcttcagcccagtcccagctgaggaacaagccagtggggccccttctcttcctcattttggaaacttttcctcctctattaaacatgggaaactgaagcccttgaaggtttggggagaggggggtatcaggcagggagggggcagaggcaaatcaccgggcagagggaggggaggagaggaggccgcactctccctgtctctcccgtctctgcacccagctcctctctgcatgctgagggctaaattgggatctcagcctgccctaatctttccccatctgaggcaggtttctaggaggtgtctgtagtccatgtggcacctttgtgagaattagaaaacatgtaccttcctctgggcagctgcagccctgagccaggacatgtggcctggctagtgcagcatggagtggattttaggctcatttgccctctcagccaactgcccttgagcagtgtacagcctgctcaacaaccgccctgggcaggccgctcctgagctgctgtctccctctctgacctatgcctaccttctctttcttcgttccctgcccactgggcatggcagctgggggtgagaggctggtggttgcctcccgtcctgggcaggctgcagcctcatgccatgtctctctcccactacctgatgggcacatggacaggctgcagagggctccaggttctgggcccctggctgagaaggggaggatcctgtcctggctgtagccttcctgccccaatcatctcgctggatgccattgcccaggggtagcccttcggtatgggctggggagaagggttggtcttctgccagggtccctaagaacaggtttgcagctaccctctctgaccttttccccatatcttgtgctgtccagggcctaggctgatagtcagagcctgtggcacacctgggatgggccagggccctgggtggggaggtgtgggttccctgggccaagaccagcctttttcctcagtttaattaatttatttatttggtttgtggttttgggttttttttgtttgtttgtttgtaggtgagttcccatcctctgggcccctagaaatgctgcctttgtgtgtggggtacctgggaaagggtgtggctgaggcagtcataatgcagtatcttcccctgactccagccacaaagctcatacccagccctaccaatcatgaactggaactccataaggaggggccaaattgggaggccttttggcaaacagtgtctattttacagagaggcaaaccaagcctccttagtgccctggggctgatggtcacccagagccatagagcacccttcctcctgggccagagctgggttatcatggttggcttaggtacctcaggtggcccaggaggtcccccctccataaggacgtcaaacttccaggagggccagtgttcctagtgtgggccaggaacaggacagggagaccttgtgatggcggggcagggagcctgttcgtagggaagatgaggaggcaagggctgcctctcacacctccaggttctctaagttctggggagggagcgccccacctgctgaggtcggtcctctcagccctgcctgccctggcctgggctctcccagcctcccagccctctgccccctcagatggctttttgtttttgtttttttttgcatccatcagagactgcacctctgtgtggcaggcagggcatgggttttagtcctggccactgaccagctgtgtggccctggccgagtcgtagccccctggagcccagcttccatttctataaaatggttgtttcgggagagaggggcaggctttctgtgtgactcgggagttcttccgtgagggctgccagggggtggtgtgccaggacctcaggctgggcctttgtgctggccttgcagtgggtgtgtggggaagtcactgtcccactatgggtctccactacccagtcactgaccctgggagaccccttctgtgtgggagggagcgggggctggctagcgggccccccagccagggatcccagaggctgagggttggggagaggaagccatcatctcattacctctgtcagtgcaggggtggctgctgcttcccttgtgcacttgggtcgctgtgattgtgaataaaagtgatttcgtaccagcctga

SEQ ID NO: 158512 - DNA, 628 bp, Homo sapiens
  Payload ID: 11024
  Gene Symbol: NEURL1
  Gene Name: neuralized E3 ubiquitin protein ligase 1
  ENST ID: ENST00000455386
  CDS Start-End: 305-628
ggtcaggctggtcttgaattcctgacctcgtgatccacctgtgtcggcctcccaaagtgctgggtttacaggtgtgagccaccgcgcttggctgattgtattttctttagggccttggactttcggcttgattcgggccaaacattttggattgctgcgttaaaactctatcgggggccccttccccgtcacttctcaccgatgccaccacaagcagaagcactgtccggcagtgctgcccagcggggggctcccagccacgccgctgctcttccacccgcacaccaagggctcccagatcctcatggacctcagccacaaggctgtcaagaggcaggccagcttctgcaacgccatcaccttcagcaaccgcccggtcctcatctacgagcaagtcaggctgaagatcaccaagaagcagtgctgctggagcggggccctgcggctgggcttcaccagcaaggacccgtcccgcatccaccctgactcgctgcccaagtacgcctgccccgacctggtgtcccagagtggcttctgggccaaggcgctgcctgaggagtttgccaatgagggcaacatcatcgcattctgggtggacaagaagggccgtgtcttccaccgcatcaac

SEQ ID NO: 158513 - DNA, 746 bp, Homo sapiens
  Payload ID: 11024
  Gene Symbol: NEURL1
  Gene Name: neuralized E3 ubiquitin protein ligase 1
  ENST ID: ENST00000437579
  CDS Start-End: 149-746
gggggcgcgggaggggcctcggccctgccatgccggtctccgcccgcgggggaggagacgggggaggaggaggggagcagccggccggggcgactcggtgaccagccggccggcccagcagaggtggctgcactgcccgtcgccggagatggggggacagatcacccggagcactctccacgactctatcgggggccccttccccgtcacttctcaccgatgccaccacaagcagaagcactgtccggcagtgctgcccagcggggggctcccagccacgccgctgctcttccacccgcacaccaagggctcccagatcctcatggacctcagccacaaggctgtcaagaggcaggccagcttctgcaacgccatcaccttcagcaaccgcccggtcctcatctacgagcaagtcaggctgaagatcaccaagaagcagtgctgctggagcggggccctgcggctgggcttcaccagcaaggacccgtcccgcatccaccctgactcgctgcccaagtacgcctgccccgacctggtgtcccagagtggcttctgggccaaggcgctgcctgaggagtttgccaatgagggcaacatcatcgcattctgggtggacaagaagggccgtgtcttccaccgcatcaacgactcggctgttatgctgttcttcagcggggtccgcacggccgacccgctctgggccctggtggacgtctacggcctcacgcggggcgtccagctgcttg

SEQ ID NO: 158514 - DNA, 6424 bp, Homo sapiens
  Payload ID: 11025
  Gene Symbol: NEURL1B
  Gene Name: neuralized E3 ubiquitin protein ligase 1B
  Uniprot ID: A8MQ27
  ENST ID: ENST00000369800
  CDS Start-End: 142-1809
gccccagctgccgcccgccggctcgcccgtgcagctgcgatgccccggagcgtcgaccccggtcctggtccctggcccgccgcgtaattagcctccgcgcgcccagagcgcgccgccgccaacgccgcgcccgacgcagcgatgggcaacacggtgcaccggaccctgccagacccgagcccaccggcgcgcctcctggccacccggccgtgctgcggccccggccccgagcgacgcccggtcctgggcgaggcgccgcgcttccacgcgcaggccaaaggcaagaacgtgcggctggacggccactcgcgccgggccacacggcgcaacagcttctgcaatggcgtcacgttcacgcagcggcccatccggctgtacgagcaggtgcggctgcgcctggtggccgtgcgccctggctggagcggcgcgctgcgcttcggcttcaccgcgcacgatccgtcgctcatgagcgcccaggacatccccaagtacgcctgcccggacctggtcacgcggccgggctactgggccaaggcactgcccgagaacctggcgctgcgcgacacggtgctggcctactgggccgaccgccacggccgcgtgttctacagcgtgaacgacggcgagccggtgctcttccactgcggcgtggccgtgggcggcccgctctgggcgctcattgatgtctacggcatcaccgacgaggtgcagcttctggagagcgccttcgctgacacgctgacgcccgcgcgcctcagccaggcccgcttcagcgcctgcctgccgcccagcagccacgacgcggccaacttcgacaacaacgagctcgagaacaaccaggtggtggccaagctgggccacctggcgctgggccgcgccccgggcccaccgccagccgacgccgcggccgccgccattccgtgcgggccccgtgagcgcccgcggcccgcgtcgtcgccggcgctactggaggccgacctgcgcttccacgcaacacgcgggcccgacgtgagcctgtcggccgaccgcaaagtggcctgcgcaccgcggcccgacggcggccgcacgctggtcttctccgagcgcccgctgcggcccggcgagagcctcttcgtggaggtgggccgtccggggctggcggcgcccggcgcgctggccttcggcatcacgtcgtgcgacccgggcgtgctacggcccaacgagctgcccgccgacccagacgcgctgctcgaccgcaaagagtactgggtggtggcgcgcgccgggcccgtgccgagcggcggcgacgcgctcagcttcacgctgcggcccggcggcgacgtgctcctgggcatcaacgggcgtccgcgcggccgcctgctgtgcgtcgacaccacgcaggcgctctgggccttcttcgccgtgcgcggcggcgtcgcgggccagctgcgtctcctcggtaccctgcagtccagccctgcgaccacgactccatcagggtccctcagcggctcccaggacgatagtgattcagatatgaccttcagtgtcaaccagtcctcctcggcatctgagtcatccctggtgacggcccccagctccccgctgagccccccggtgtcccccgtgttctccccaccggagccggcaggcatcaagaatggcgagtgcacggtgtgcttcgatggcgaggtggacacggtcatctacacgtgtggacacatgtgcctgtgccacagctgcggcctgcggctcaagcgacaggcccgggcctgctgccccatctgccggcggcccatcaaggacgtcattaagatctacaggccatagcctagcctgcccacgggccttggccggtgcaaggtcacctttctgaaggccccctgggctgggcaaccacatggctgccagggagtccacgggcagcggccatctctccagtggtgggcaaggtgtgacagtcgtggagcgaggcccacagggcctcagcccaggcaggggttgcttctggctccaaagtgctttgcccccaaaaggccgtcccaagagcaagctcaggaactgcctggcagatcaccctgtcccttggtgacctttcaactgggaaacagcgtcctctgtctgtgcaatgcttcttgctggggttgggttgagtgtgagagaaggggaggggagggagggagaacagagagaatgtgtgtgtgagagagagagagagagaatgaacgtgtagcgattttaccaggggtcccggctccgggaggagacgtgcaatccggagccccgacattggcatgactagaagttgttcactttctggggatgggacataagctggttttgaatgtatgaagctgaccctcacagaactccctggggtggtgtagaaaagagatgctcagattttctaaggggaggcaaaaataactcattgtttacagctccaaagcatgaactccttgaggggaaggtgggtgaagaacaattcacttcttcatttcttactgggtcttagagctgggtgtgatgggcaccgaggccaacccctctggattgtgtcatcttttcaccccttcacccccagactgtctaataatacacacatcataccttgtctccgtctctggaggcaagtctctgtaatgcccttccctatctccaaggagaagaccagcagtaagttctgtttttctgtgggagagaaagaatcctagaggcaggtgacccacctggagctggaaagcccactccacgatgcagacagctctctaccttcctgtggtggcccctgggcctggcattcccaggggacctgctggcaggaggaggaacgagggctttataactttggttataacttttggtctttgttctgattctcagtgtatcttcctccgctggttactaaagtgttcactgataagtatgttaactaatgatcgagacagtaacgaaaaatgctggcactgggattctctcccttcccagacctacctgctggtatttcctgggaccttgaccctgccccaccccctcagccgtgcccatctctgcagactcccagatcacatctgggctgatgggctggcccaggcctgtccctcccttcttgcccccagttctgggctccacctctgccctcttctgtgctgtcccattagggaagtcccttggcctgtctatttttcagttcccaattagaagtctagaacctgacaactccaggagttcttgggaggaccagtacaacgttctaaaaagcctgagacgccttacaaaaagcaagtatcatttggagtacaattcctaatctgttcatgtcctgctgaaggagggaaggagggagaggaaggcaggggagttgatgcattcatataacaaacactgctgggtgtctgggtgcccagagcaaagctgggccaggccttcaccagatcaagccccacagaccagctggtgcccatgcgctgctggtggtttggggcctcctgttcctcctctagctgggagtaatcacagttgtctgacctgattccaacttaaggtccccactctcttgccccatcaagaatccctgattatttacttttccctagaaaatctggggaaattcccacattttaattttgcagcagaatcttttgagcagcttttggaaccacagtgtttgccaagataagagtttgagaatccagcagccctgggtgcctggctgaatttggtttcctgcatgtgctgggtgtgggcggggccacgcacaggccctgcatgggaggactcctcaccccaggcctgtggtgctgcagacaaccgtctcctgtctacactgcgacccagccacaagctgtggggtctcagtggcctgggggaaagcagctccactctcctgcccttcctggctgcccctttgggttccagccggggtcacgtccagcctccactgggaaaccagtgactgaggcctggacccagaggtggaccaggcatctcctggccacctgtgacctgggaagaagcgagtcagtggcccgttcaacctgctctgcagctgctataaatagcctccctgtttccaagaggaggtaaggaagtgtttatcttctaaaaaccagacgtttcctgatgctctgagcgttactcagtgctacagaggagatgcacacgtccccactatgttctgtcttgagaaggggacaagagaaagaggaaaaggagccactgtactttattttgcacctacagcgtgccttggcactgggctagagaggcaccttcctgcgtgaatcctgtgcggcaggtcttattgccataataagtcacatcaaagacactgctggtcataaaacactgttttacataccatagggaaaaacgctgccaatcttaactaagatgctacaactgtacagttccttccaatcagagatgttcacgtgtgaaaaaaaaactgtgctacttacaatctatgaaagctggtgttatcccacttggcaggtaaggaaactgaggtcctgtgagtgaagtgacctcatgatcacacaacaggagatggcagggctgggattcaaacccgggagtgtctgctgccacatcccacactcccactgcctggctccaagtcccaggaagctcgagactgtgagttttctcccttgaaactcacctggagagagtccgggcacctgtgcctatgtggagggttccagccccagccaggcccctccgctgcccacaccctgggaggagaagcggcctcccttccaggctcatctgctcactgcccgcattctcctggcagagctgaggtctgagagatctggactccaacccaagggccctctcttgttattcaggggtgtccacagttaggaagggacctggggccttgtcccaccaccttcctaggccccgtgatcaccaccccctcaagcggggccccagccccctgagcaccccctcacgtgacccagccctcggctgttccaggctcactgcccatggtgtgctcttctgggccacagcagccagggctccagggcgaggacaggggacacctgaaaacaccccgttgttcatggtcttgtgcccattcattcggagactcctgaaaaactgggctgtttgcaaagcaaatccagctccttgtcctagcaggttctcagaacggggagtcccctgggatggagctgctcccctcacggcagcaccacgtttccagtccctcgatgccactaatcagcatggactgtgttcaggacacagggtgaacttttctctgacccccggtgctggtcctgtgccagcacgtagtagttactcagtagaggtttgctgagtaaaccagaaatcagattatgagtgttcaggggtttgataaaacagcaccacataacgcacacaaagatactccagaaacatttgctgagtacctagtacgtgtgaggtgctgtgaggatagagcagagaggactgtgccccagctgtgatgctggcagaggtgacactaagagggaaatgagatatttggggcagaatccactgggctctcttggccatccgctgccttgggtctgttgaggtgggtgcccaaaggctgccttcttgaccagaacctgctgtgcgcttcacagaacctcctcttcattggaaatgctgggcacattgcagtcagtgagctgctgccaaaacggcgttaagtagaacccccagaggccccgccggttggtgatcaccctcaggtcctgccagggagacacagtgaggaggttggctaattgctgctttcaggccctggaaatcagtcgccaaggcccaggagaaccccggtgagtccgtccagttgaggcagaggcaataacctcccattgctcggccctgcgcctgccccagtcctggcagggggcaccggctcaggaacatgcggcctcctggcatttctcggtatttaactgtctcgctgtcttatccgagtccctaatgaaacgacttgtgtgacaatctgtctgtgccttacgaaagtgtctgtgcactttttatcctttttaaaagcaacttttaaaagtggatggggaggggggctagcatacgtggtagggttctagaaatctgtggtcatcgctgaaatcctttttgcatcatgttttttgatgttggagtgatgaagtgtacatcccccaccccacacaccactacctgtgtacagaccttttaaaacatgtcttctttttctgattcaatactgtgacctctccgatacagtctaatccttggggatctgtaatcaaggttttaaaacctgggaagtgggttgggaagggtttgcactggtcttgagtgttgtgcttttctgtgttgtgtgttttgatttttgtctttttatctgttttatattgacataattttcctgtttaaaaaaatacaactttggcttgttaaaaaaaaaaaa

SEQ ID NO: 158515 - DNA, 1089 bp, Homo sapiens
  Payload ID: 11025
  Gene Symbol: NEURL1B
  Gene Name: neuralized E3 ubiquitin protein ligase 1B
  Uniprot ID: A8MQ27
  ENST ID: ENST00000520919
  CDS Start-End: 142-1089
gccccagctgccgcccgccggctcgcccgtgcagctgcgatgccccggagcgtcgaccccggtcctggtccctggcccgccgcgtaattagcctccgcgcgcccagagcgcgccgccgccaacgccgcgcccgacgcagcgatgggcaacacggtgcaccggaccctgccagacccgagcccaccggcgcgcctcctggccacccggccgtgctgcggccccggccccgagcgacgcccggtcctgggcgaggcgccgcgcttccacgcgcaggccaaaggcaagaacgtgcggctggacggccactcgcgccgggccacacggcgcaacagcttctgcaatggcgtcacgttcacgcagcggcccatccggctgtacgagcaggtgcggctgcgcctggtggccgtgcgccctggctggagcggcgcgctgcgcttcggcttcaccgcgcacgatccgtcgctcatgagcgcccaggacatccccaagtacgcctgcccggacctggtcacgcggccgggctactgggccaaggcactgcccgagaacctggcgctgcgcgacacggtgctggcctactgggccgaccgccacggccgcgtgttctacagcgtgaacgacggcgagccggtgctcttccactgcggcgtggccgtgggcggcccgctctgggcgctcattgatgtctacggcatcaccgacgaggtgcagcttctgggtaccctgcagtccagccctgcgaccacgactccatcagggtccctcagcggctcccaggacgatagtgattcagatatgaccttcagtgtcaaccagtcctcctcggcatctgagtcatccctggtgacggcccccagctccccgctgagccccccggtgtcccccgtgttctccccaccggagccggcaggcatcaagaatggcgagtgcacggtgtgcttcgatggcgaggtggacacggtcatctacacgtgtggacacatgtgcctgtgccacagctgcggcctgcggctcaagcgacaggcccgggcctgctgccccatctgccggcggcccatcaaggacgtcattaagatctacaggccatag

SEQ ID NO: 158516 - DNA, 1263 bp, Homo sapiens
  Payload ID: 11025
  Gene Symbol: NEURL1B
  Gene Name: neuralized E3 ubiquitin protein ligase 1B
  Uniprot ID: A8MQ27
  ENST ID: ENST00000522853
  CDS Start-End: 142-1263
gccccagctgccgcccgccggctcgcccgtgcagctgcgatgccccggagcgtcgaccccggtcctggtccctggcccgccgcgtaattagcctccgcgcgcccagagcgcgccgccgccaacgccgcgcccgacgcagcgatgggcaacacggtgcaccggaccctgccagagagcgccttcgctgacacgctgacgcccgcgcgcctcagccaggcccgcttcagcgcctgcctgccgcccagcagccacgacgcggccaacttcgacaacaacgagctcgagaacaaccaggtggtggccaagctgggccacctggcgctgggccgcgccccgggcccaccgccagccgacgccgcggccgccgccattccgtgcgggccccgtgagcgcccgcggcccgcgtcgtcgccggcgctactggaggccgacctgcgcttccacgcaacacgcgggcccgacgtgagcctgtcggccgaccgcaaagtggcctgcgcaccgcggcccgacggcggccgcacgctggtcttctccgagcgcccgctgcggcccggcgagagcctcttcgtggaggtgggccgtccggggctggcggcgcccggcgcgctggccttcggcatcacgtcgtgcgacccgggcgtgctacggcccaacgagctgcccgccgacccagacgcgctgctcgaccgcaaagagtactgggtggtggcgcgcgccgggcccgtgccgagcggcggcgacgcgctcagcttcacgctgcggcccggcggcgacgtgctcctgggcatcaacgggcgtccgcgcggccgcctgctgtgcgtcgacaccacgcaggcgctctgggccttcttcgccgtgcgcggcggcgtcgcgggccagctgcgtctcctcggtaccctgcagtccagccctgcgaccacgactccatcagggtccctcagcggctcccaggacgatagtgattcagatatgaccttcagtgtcaaccagtcctcctcggcatctgagtcatccctggtgacggcccccagctccccgctgagccccccggtgtcccccgtgttctccccaccggagccggcaggcatcaagaatggcgagtgcacggtgtgcttcgatggcgaggtggacacggtcatctacacgtgtggacacatgtgcctgtgccacagctgcggcctgcggctcaagcgacaggcccgggcctgctgccccatctgccggcggcccatcaaggacgtcattaagatctacaggccatag

SEQ ID NO: 158517 - DNA, 1278 bp, Homo sapiens
  Payload ID: 11026
  Gene Symbol: NEURL2
  Gene Name: neuralized E3 ubiquitin protein ligase 2
  Uniprot ID: Q9BR09
  ENST ID: ENST00000372518
  CDS Start-End: 297-1154
cttcctcccgccccttctttggtccctacggacctggggggcggtggcggtcaatgccgggtcaaggtccgcgggcctcgcagatcgtagcccgggcgcacgcgatcagatgatcctgttgtggacggctaagttgtaggcgggatggctgagaaagcggcgctaggacccccgggcagaggctcggggaagggagtcaggggggaaatgccttacaaggtcgccttgcggtcaccatcattgcccgccgcccaaaatagcccccggcgccagctggcctgccctatggccgagagatggctgctgcctccgagcccgtggattcgggtgcactctggggactcgagcgcccggagccccctcccacccgcttccatcgggtgcacggtgccaacatccgcgtggacccctctgggacgcgggccacacgcgtggagagcttcgcccacggcgtgtgcttcagccgcgagccgctggccccgggccaggtcttcctggtcgagatcgaggagaaagagctgggctggtgcggacatctgcgtctcggtctgaccgcgctggaccccgccagtctggcccccgttcccgagttttctctgcccgatctggtcaacctgggccacacctgggtcttcgccatcacgcgccaccacaaccgcgtgccccgggagggccgcccggaggcggaggcagcggcccccagccgacctccaaccctcctcgtggaaccatatctgcgcattgagcagtttcgcattccccgggaccgcctggtgggccgcagccggccagggctctacagccatctcttggaccagctctatgagctgaacgtgctgcctccgaccgcgcgccgtagccgcctgggtgtcctcttttgcccgcgccccgatggcacggccgacatgcacatcatcatcaacggcgaggacatgggcccgagcgcccggggactgccagctgcgcagcccctctacgcggtggtggacgtgtttgcttccacaaagagcgtgcgccttgtccagctcgagtatggcttgccatccctgcagactctgtgccgcctagtgatacaaaggagcatggtgcaccggctggccattgatgggctccacctgcccaaagaacttaaggatttctgcaagtatgagtgaagacccacagtgcaccagagcacagctgcatcctggagccccagacctgtggctggctggtccgaagttggccacattgctgccagccaagaccagaaataaacagccgatgctgacatcttga

SEQ ID NO: 158518 - DNA, 490 bp, Homo sapiens
  Payload ID: 11026
  Gene Symbol: NEURL2
  Gene Name: neuralized E3 ubiquitin protein ligase 2
  ENST ID: ENST00000545238
  CDS Start-End: 1-271
ggaccagctctatgagctgaacgtgctgcctccgaccgcgcgccgtagccgcctgggtgtcctcttttgcccgcgccccgatggcacggccgacatgcacatcatcatcaacggcgaggacatgggcccgagcgcccggggactgccagctgcgcagcccctctacgcggtggtggacgtgtttgcttccacaaagagcgtgcgccttgtccagctcgagtatggcttcttcttcccacagtgccatccctgcagactctgtgccgcctagtgatacaaaggagcatggtgcaccggctggccattgatgggctccacctgcccaaagaacttaaggatttctgcaagtatgagtgaagacccacagtgcaccagagcacagctgcatcctggagccccagacctgtggctggctggtccgaagttggccacattgctgccagccaagaccagaaataaacagccgatgctgacatcttgatcactggaa

SEQ ID NO: 158519 - DNA, 1461 bp, Homo sapiens
  Payload ID: 11027
  Gene Symbol: NEURL3
  Gene Name: neuralized E3 ubiquitin protein ligase 3
  Uniprot ID: Q96EH8
  ENST ID: ENST00000451794
  CDS Start-End: 72-860
aacctgtccactggccttctccaggcagttccttctagacctggggacctgtgcccgaggaccttagactgatgggtgcccagctctgcttcgaggccaacgccaaggcgccccgagaggcacttcgcttccatgccgaggccaagggcgcacaggtgcgtctggacacgcgtggctgcatcgcgcacaggcgcaccacgttccacgacggcatcgtgttcagccagcggccggtgcgcctgggcgagcgtgtggcgctgcgagtgctgcgggaggagagcggctggtgcggcggcctccgcgtgggcttcacgcgcctggaccccgcgtgcgtgtccgtgcccagcctgccgcccttcctgtgccccgacctggaggagcagagcccgacgtgggcggccgtgctgcctgagggctgcgcgctcactggggacttggtccgcttctgggtggaccgccgcggctgcctcttcgccaaggtcaacgccggctgccggctcctgctgcgtgagggcgtgcccgtcggcgccccgctctgggccgtgatggacgtgtatgggaccactaaggccatcgagctgctggatcccacagccagccggctcccaacacccatgccatgggacctcagcaacaaggctgtgcctgagcccaaagccacaccaggagaggagtgtgccatctgcttctatcacgctgccaacacccgccttgtgccctgcggccacacatacttctgcagatactgtgcctggcgggtcttcagcgatacggccaagtgccctgtgtgccgctggcagatagaggcggtagcccctgcgcagggccctcctgctctgagggttgaggaaggctcatgaaaggaggcttcccagtatgagtggcagcccgggcctagatctgagtctggcccctgcagagaggaaggaggcgcagccctaccttctttctggggaagagtcagaaaggctgattagcaagaggtgcggcagagagaggaaggcagggaggtgctgtctgctgcctccacctgttccccaacaggatagcaaggaaaaacccctctttctgtccatgccagaactatccttctgatggggtgctttgtttagagatggggtggcccaatccccaatcagttttacatctgagggagttcaggtatctgttgtgactggtgaagccctgtacctcctgggtattgaagaacctggacttgaagcaggaggtatctgcaaggaatgtataaagttccacatggaagctgggttgcctcccacaagtccccagtagagtggatctgtagttacccgccctgcctccctttcagggtggtcatgaggtcccagagagaccatgcatctgaagatgatttaaaacatgaaagtgtattgttgtcactgtggtaatttccttgccagtttctgagatatcaaaataaagtttgtgtttcctgaatga

SEQ ID NO: 158520 - DNA, 1710 bp, Homo sapiens
  Payload ID: 11027
  Gene Symbol: NEURL3
  Gene Name: neuralized E3 ubiquitin protein ligase 3
  ENST ID: ENST00000310865
  CDS Start-End: 713-1099
ggccttctccaggcagttccttctagacctggggacctgtgcccgaggaccttagactgatgggtgcccagctctgcttcgaggccatacagaaggggtttcaccatgttagccaggttggtcgcgatctcctgacctcgtgatccacccgcctcggcctcccaaagtgctgggattacaggcgtgagccaccgcacccggccttgaggacctggtctttcagcaccagctattggggttgtgcatctctggacctaccctcccagacgccaaggcgccccgagaggcacttcgcttccatgccgaggccaagggcgcacaggtgcgtctggacacgcgtggctgcatcgcgcacaggcgcaccacgttccacgacggcatcgtgttcagccagcggccggtgcgcctgggcgagcgtgtggcgctgcgagtgctgcgggaggagagcggctggtgcggcggcctccgcgtgggcttcacgcgcctggaccccgcgtgcgtgtccgtgcccagcctgccgcccttcctgtgccccgacctggaggagcagagcccgacgtgggcggccgtgctgcctgagggctgcgcgctcactggggacttggtccgcttctgggtggaccgccgcggctgcctcttcgccaaggtcaacgccggctgccggctcctgctgcgtgagggcgtgcccgtcggcgccccgctctgggccgtgatggacgtgtatgggaccactaaggccatcgagctgctggatcccacagccagccggctcccaacacccatgccatgggacctcagcaacaaggctgtgcctgagcccaaaggctttgggccaaaagatttggctctgcctactggaaacctaaaagcaacctggcatctctgccttcgagagcatttgcctactctccacaccaggagaggagtgtgccatctgcttctatcacgctgccaacacccgccttgtgccctgcggccacacatacttctgcagatactgtgcctggcgggtcttcagcgatacggccaagtgccctgtgtgccgctggcagatagaggcggtagcccctgcgcagggccctcctgctctgagggttgaggaaggctcatgaaaggaggcttcccagtatgagtggcagcccgggcctagatctgagtctggcccctgcagagaggaaggaggcgcagccctaccttctttctggggaagagtcagaaaggctgattagcaagaggtgcggcagagagaggaaggcagggaggtgctgtctgctgcctccacctgttccccaacaggatagcaaggaaaaacccctctttctgtccatgccagaactatccttctgatggggtgctttgtttagagatggggtggcccaatccccaatcagttttacatctgagggagttcaggtatctgttgtgactggtgaagccctgtacctcctgggtattgaagaacctggacttgaagcaggaggtatctgcaaggaatgtataaagttccacatggaagctgggttgcctcccacaagtccccagtagagtggatctgtagttacccgccctgcctccctttcagggtggtcatgaggtcccagagagaccatgcatctgaagatgatttaaaacatgaaagtgtattgttgtcactgtggtaatttccttgccagtttctgagatatcaaaataaagtttgtgtttcctgaa

SEQ ID NO: 158521 - DNA, 1675 bp, Homo sapiens
  Payload ID: 11027
  Gene Symbol: NEURL3
  Gene Name: neuralized E3 ubiquitin protein ligase 3
  ENST ID: ENST00000435380
  CDS Start-End: 763-1077
gcctcaacctgacactcagcagcaagttaggcctatctacaaatctcctgctctgtgcccgcgcagtccagtggaggagatattcctaattagggggcacttccaaggggcggagtctccgcggcgagtggccgtggaggggcgcaaggcagacggtctccagccacgatacctgggccaatcccagcctgtcacgtcatgcctagtgagctgaacaagctgcgtaactgtcgtgtgcctcagtttccccacgtgtataatggaaatgattacaataaacaggacctttttgaggagttgccatgaggactgtcagacgccaaggcgccccgagaggcacttcgcttccatgccgaggccaagggcgcacaggtgcgtctggacacgcgtggctgcatcgcgcacaggcgcaccacgttccacgacggcatcgtgttcagccagcggccggtgcgcctgggcgagcgtgtggcgctgcgagtgctgcgggaggagagcggctggtgcggcggcctccgcgtgggcttcacgcgcctggaccccgcgtgcgtgtccgtgcccagcctgccgcccttcctgtgccccgacctggaggagcagagcccgacgtgggcggccgtgctgcctgagggctgcgcgctcactggggacttggtccgcttctgggtggaccgccgcggctgcctcttcgccaaggtcaacgccggctgccggctcctgctgcgtgagggcgtgcccgtcggcgccccgctctgggccgtgatggacgtgtatgggaccactaaggccatcgagctgctggatcccacagccagccggctcccaacacccatgccatgggacctcagcaacaaggctgtgcctgagcccaaagccacaccaggagaggagtgtgccatctgcttctatcacgctgccaacacccgccttgtgccctgcggccacacatacttctgcagatactgtgcctggcgggtcttcagcgatacggccaagtgccctgtgtgccgctggcagatagaggcggtagcccctgcgcagggccctcctgctctgagggttgaggaaggctcatgaaaggaggcttcccagtatgagtggcagcccgggcctagatctgagtctggcccctgcagagaggaaggaggcgcagccctaccttctttctggggaagagtcagaaaggctgattagcaagaggtgcggcagagagaggaaggcagggaggtgctgtctgctgcctccacctgttccccaacaggatagcaaggaaaaacccctctttctgtccatgccagaactatccttctgatggggtgctttgtttagagatggggtggcccaatccccaatcagttttacatctgagggagttcaggtatctgttgtgactggtgaagccctgtacctcctgggtattgaagaacctggacttgaagcaggaggtatctgcaaggaatgtataaagttccacatggaagctgggttgcctcccacaagtccccagtagagtggatctgtagttacccgccctgcctccctttcagggtggtcatgaggtcccagagagaccatgcatctgaagatgatttaaaacatgaaagtgtattgttgtcactgtggtaatttccttgccagtttctgagatatcaaaataaagtttgtgtttcctgaa

SEQ ID NO: 158522 - DNA, 5182 bp, Homo sapiens
  Payload ID: 11028
  Gene Symbol: NEURL4
  Gene Name: neuralized E3 ubiquitin protein ligase 4
  Uniprot ID: Q96JN8
  ENST ID: ENST00000315614
  CDS Start-End: 5-4687
ggagatggcggcagggtcgggtgggagtgggggctctgggggaggccctggaccggggccgggcgggggtgggggccccagcgggagcggctcaggaccggggtccaacgggggtctgggcagcggcggggaactgcacccgcgcactgggcgcttggtgagcctgtcggcctgtgggcgtacggcgcggcggcagcagccgggccaggagtttaaccacgggctggtgttgagccgagaacccttgcgcgatggacgcgtcttcaccgtccgcatcgaccgcaaggtcaactcctggagcggctccattgagattggggtgacagcgctggaccccagtgtgctggactttccaagcagtgccacgggcctgaaggggggctcgtgggtagtgtcgggctgctctgtgctgagagatggacgctctgtgttggaggagtatggtcaggacctggaccagcttggtgaaggggaccgcgtgggcgtggagcgcacagttgctggggagcttcggctctgggtgaatgggcgggattgcggtgtggctgccacaggcctgccccctcgtgtctgggccgtcgtggacctttatggcaagtgcacccagatcaccgtgctaccccctgagccaggcttcagcccccctactcccatccccacacctcccctcgagcccttggcccccactgaagactctgccttggctgaacaggggacctctgcagatgaagccttcatggtgtccccagcgcaggcccggccggagacgtttcctaacagccttgagtcgcataatgactttgccaacatggagctgtctgaggtggtgagcaacaccatcctgtctgcctacaatggagggctcctgaatgtgaacctgagctccccaccggcaggggaaggcctgggatctagcggtgctgccacctcgcccattctcacttccaacgatgccctgctctttcatgaaaagtgcgggaccctcatcaaactcagcaacaataataagacggctgagcgccggcggcccctggatgaattcaacaatggggttgtcatgaccaatcgcccccttcgggacaatgagatgtttgagatccgtatcgacaagcttgttgataagtggtcaggctccattgagattggggtcaccacccacaaccccaacagtttggagtacccagccaccatgaccaacctccagtcaggcaccatcatgatgagcggctgtggaatcctgaccaatggcaagggcacccgccgggagtactgcgaattcagtctggatgagttgcaggagggtgaccacattggcctcacaaggaagtccaactctgccctacacttcttcattaatggtatcgatcagggagtggcaacccccttgacgcccccagtggtgtatggtgtggtggacttgtacgggatggcagtgaaggtgaccatcgtccacaataacaaccacagtgaccgtctccgccgaaacaacgccatcctgcgggcgctgtcccccgagggtgctctccgccgtgctgcccctgccgcccaggcagaacctgagcgcctgctcttccaccccaactgtgggcagaaggcagccatcacccacgagggacgcactgccctgaggccccatgccaccgatgacttcaatcacggcgtggtgctgagcagcagagccctgcgggatggagaggtgttccaggtgcgcatcgacaagatggtggacaaatgggctggctccattgaaattggtgtcaccacccacaaccctgcctacctccagttgccctccaccatgaccaacttgcgctctgggacctggatgatgactgggaatggggtgatgcacaatgggacgaccatcctggatgaatacgggcacaatctggaccgcctcaaggcaggggacacggtgggcgtggtacggcgggaggacgggactctccacttctttgtcaatgggatgactcagggccctgctgcctggaacgtgcccccgggcgtctatgctgtcgtcgatctctatggccaggcggcccaggccaccattgtggacgacgtggaggtggctccagttcctgaaccactccctgaggggaacaaccaggtgtctccaagctctccgtcctcaggggccgggggctctgacctgcgcttccatcagctgcacggcagtaacgcagtcatcactaacgggggccgcaccgccctccgccacaactgtcgcagcgagtttaatgacgccatcgtcatctccaaccgggccctgcgggatggagagctgtttgaaattgtcattcagaagatggtggaccgctggtcaggctccattgaggctggagtgactgctattcggcctgaagacctggaattccccaacaccatgacagacattgactatgacacatggatgctgagtggtacagccatcatgcaagacggtaacacgatgcgcaacaattatgggtgtgacctggatgcgctgggcacaggtgcacgcattggcatgatgcgaactgccaagggcgacctgcactacttcatcaacggccaggaccaaggcgctgcctgctcgggcctgcctccggaggtgtatgcggtagtcgatctctatggccagtgtgtccaagtgtccatcaccaatgccaccggccccatggacaacagcctggcgaccagcaacactgccaccgagaagtccttcccactgcactccccagtggctggcgtggctcaccgattccacagtacttgcggcaagaacgtcactctagaggaggatggcacgagggcagtgcgtgccgctggctatgctcatggccttgtcttcagtaccaaggagctgagggctgaggaagtctttgaggtgaaagtggaagagctagatgagaagtgggcaggttccctgcggctggggctgaccacactagcaccgggggagatgggacccggggcaggcggtggtggcccagggctgcctccttccctgccagagctccggacgaagaccacttggatggtatccagctgtgaagtgaggcgtgatgggcagctccagaggatgaactatggccggaacctagagaggctgggggtggggagccgtgtgggtgttcgtcggggggcagatgacacgatgcacatcctggtggatggagaggatatggggcctgcagccactggcattgccaagaacgtgtgggctgtgttggatctctacgggccagtccgcggtgtgtcaattgtcagttccacgagactggaggagtcagaaggcacccagcctccttcccccagttcagacaccggcagtgagggcgaggaggatgacgagggcgaggagcatggcctgggaggccagaatgaagtgggtattatacccaccaccctcgagttcctggagaaccatgggaagaatatccttttgtctaatgggaaccgtacggccacacgggtggccagctacaatcagggcatcgttgtcatcaaccaacctctggtgccccagctgctggtgcaggtgcggatagatttcctaaaccgacagtggacatcttcccttgtcctgggagtcatcacctgcgcgcctgagaggctcaacttccctgcttctgcctgtgccctcaaacgggcagcctggctgctgcggggccgtggggtcttccacaacggtctcaagatctgcgagaagtttgggcccaatctggacacgtgccctgaaggcaccatcctgggactgcggctggacagctctggggggctgcatcttcatgttaatggggtggaccagggggtagctgtgccagatgtgccccagccctgccatgcgcttgtggacctctatgggcagtgtgagcaggtgacaatcgtgaaccctgagccaggggctgccagtgggaaaagtgctggaacccaaggggacatggagaaagcagacatggtggacggtatcaaagagagtgtgtgctggggtccaccacctgccgctagtcctctaaagagctgcgagtaccatgccctttgctctcgcttccaagaactcctgctgcttcccgaagattatttcatgcctccgccaaagcgaagcctgtgctactgtgagtcttgccggaagctgcgaggagacgaggcccacaggcgcagaggggagcctccccgggaatatgcactgccctttggctggtgcaggttcaacctcagagtgaatccccgcctggaggctgggacactaaccaagaagtggcacatggcatatcacgggagcaatgttgccgctgtacggagagtgctggaccgaggggagctgggagcaggtactgcctccatcctgagctgccgtcctttgaagggagaacctggggtagggttcgaggagcctggcgagaactgtgcacctcctcgggaggagcagccccctcctgtgctgctttccccctcccttcaatatgctggggcggagaccctggcctccaaagtgcaattccgggaccccaaatcccagcggacgcaccaggctcaggtggcgttccaggtgtgtgtgcgccctggctcctacaccccgggacccccttccgctgcccttggagaacctcctgaccctcacttcagtccagccgaacttgagtgggtcactaaggagaagggggccacactcctctgtgccctgctggtacgggtggaatgaggggtgagacaccactactacaagcacagtcgggccgcgggcccatggactctgagtggcgactgcctccacctcattcccgtgactcgtggcatgcgcaggtgctggagcttggcagccgcgcaggagcatgtaggcaggctctcagatgtaggtggcaagtggcacagctccatgtccggaggcccagcactccgtctgatgggaggagtcgtgggagcccagctccaggccctggtacccctcttcatgcactgatttggggaacatgactcccttttactcccctaccccacatcacttaatttatttccgtttttgtttctggttactgtgaatcccagaggagtctctccctgtgcccacatgaagctgctttttccggggccaccgggcgggagtggggaagggtgggcgcacggaagatgggggcctctgtacagttgttactgactctgatttctaaggagccaataaacaccgtctcagagcctc

SEQ ID NO: 158523 - DNA, 5200 bp, Homo sapiens
  Payload ID: 11028
  Gene Symbol: NEURL4
  Gene Name: neuralized E3 ubiquitin protein ligase 4
  Uniprot ID: Q96JN8
  ENST ID: ENST00000399464
  CDS Start-End: 17-4705
cccggtgtcagcggagatggcggcagggtcgggtgggagtgggggctctgggggaggccctggaccggggccgggcgggggtgggggccccagcgggagcggctcaggaccggggtccaacgggggtctgggcagcggcggggaactgcacccgcgcactgggcgcttggtgagcctgtcggcctgtgggcgtacggcgcggcggcagcagccgggccaggagtttaaccacgggctggtgttgagccgagaacccttgcgcgatggacgcgtcttcaccgtccgcatcgaccgcaaggtcaactcctggagcggctccattgagattggggtgacagcgctggaccccagtgtgctggactttccaagcagtgccacgggcctgaaggggggctcgtgggtagtgtcgggctgctctgtgctgagagatggacgctctgtgttggaggagtatggtcaggacctggaccagcttggtgaaggggaccgcgtgggcgtggagcgcacagttgctggggagcttcggctctgggtgaatgggcgggattgcggtgtggctgccacaggcctgccccctcgtgtctgggccgtcgtggacctttatggcaagtgcacccagatcaccgtgctaccccctgagccaggcttcagcccccctactcccatccccacacctcccctcgagcccttggcccccactgaagactctgccttggctgaacaggggacctctgcagatgaagccttcatggtgtccccagcgcaggcccggccggagacgtttcctaacagccttgagtcgcataatgactttgccaacatggagctgtctgaggtggtgagcaacaccatcctgtctgcctacaatggagggctcctgaatgtgaacctgagctccccaccggcaggggaaggcctgggatctagcggtgctgccacctcgcccattctcacttccaacgatgccctgctctttcatgaaaagtgcgggaccctcatcaaactcagcaacaataataagacggctgagcgccggcggcccctggatgaattcaacaatggggttgtcatgaccaatcgcccccttcgggacaatgagatgtttgagatccgtatcgacaagcttgttgataagtggtcaggctccattgagattggggtcaccacccacaaccccaacagtttggagtacccagccaccatgaccaacctccagtcaggcaccatcatgatgagcggctgtggaatcctgaccaatggcaagggcacccgccgggagtactgcgaattcagtctggatgagttgcaggagggtgaccacattggcctcacaaggaagtccaactctgccctacacttcttcattaatggtatcgatcagggagtggcaacccccttgacgcccccagtggtgtatggtgtggtggacttgtacgggatggcagtgaaggtgaccatcgtccacaataacaaccacagtgaccgtctccgccgaaacaacgccatcctgcgggcgctgtcccccgagggtgctctccgccgtgctgcccctgccgcccaggcagaacctgagcgcctgctcttccaccccaactgtgggcagaaggcagccatcacccacgagggacgcactgccctgaggccccatgccaccgatgacttcaatcacggcgtggtgctgagcagcagagccctgcgggatggagaggtgttccaggtgcgcatcgacaagatggtggacaaatgggctggctccattgaaattggtgtcaccacccacaaccctgcctacctccagttgccctccaccatgaccaacttgcgctctgggacctggatgatgactgggaatggggtgatgcacaatgggacgaccatcctggatgaatacgggcacaatctggaccgcctcaaggcaggggacacggtgggcgtggtacggcgggaggacgggactctccacttctttgtcaatgggatgactcagggccctgctgcctggaacgtgcccccgggcgtctatgctgtcgtcgatctctatggccaggcggcccaggccaccattgtggacgacgtggaggtggctccagttcctgaaccactccctgaggggaacaaccaggtgtctccaagctctccgtcctcaggggccgggggctctgacctgcgcttccatcagctgcacggcagtaacgcagtcatcactaacgggggccgcaccgccctccgccacaactgtcgcagcgagtttaatgacgccatcgtcatctccaaccgggccctgcgggatggagagctgtttgaaattgtcattcagaagatggtggaccgctggtcaggctccattgaggctggagtgactgctattcggcctgaagacctggaattccccaacaccatgacagacattgactatgacacatggatgctgagtggtacagccatcatgcaagacggtaacacgatgcgcaacaattatgggtgtgacctggatgcgctgggcacaggtgcacgcattggcatgatgcgaactgccaagggcgacctgcactacttcatcaacggccaggaccaaggcgctgcctgctcgggcctgcctccgggtaaagaggtgtatgcggtagtcgatctctatggccagtgtgtccaagtgtccatcaccaatgccaccggccccatggacaacagcctggcgaccagcaacactgccaccgagaagtccttcccactgcactccccagtggctggcgtggctcaccgattccacagtacttgcggcaagaacgtcactctagaggaggatggcacgagggcagtgcgtgccgctggctatgctcatggccttgtcttcagtaccaaggagctgagggctgaggaagtctttgaggtgaaagtggaagagctagatgagaagtgggcaggttccctgcggctggggctgaccacactagcaccgggggagatgggacccggggcaggcggtggtggcccagggctgcctccttccctgccagagctccggacgaagaccacttggatggtatccagctgtgaagtgaggcgtgatgggcagctccagaggatgaactatggccggaacctagagaggctgggggtggggagccgtgtgggtgttcgtcggggggcagatgacacgatgcacatcctggtggatggagaggatatggggcctgcagccactggcattgccaagaacgtgtgggctgtgttggatctctacgggccagtccgcggtgtgtcaattgtcagttccacgagactggaggagtcagaaggcacccagcctccttcccccagttcagacaccggcagtgagggcgaggaggatgacgagggcgaggagcatggcctgggaggccagaatgaagtgggtattatacccaccaccctcgagttcctggagaaccatgggaagaatatccttttgtctaatgggaaccgtacggccacacgggtggccagctacaatcagggcatcgttgtcatcaaccaacctctggtgccccagctgctggtgcaggtgcggatagatttcctaaaccgacagtggacatcttcccttgtcctgggagtcatcacctgcgcgcctgagaggctcaacttccctgcttctgcctgtgccctcaaacgggcagcctggctgctgcggggccgtggggtcttccacaacggtctcaagatctgcgagaagtttgggcccaatctggacacgtgccctgaaggcaccatcctgggactgcggctggacagctctggggggctgcatcttcatgttaatggggtggaccagggggtagctgtgccagatgtgccccagccctgccatgcgcttgtggacctctatgggcagtgtgagcaggtgacaatcgtgaaccctgagccaggggctgccagtgggaaaagtgctggaacccaaggggacatggagaaagcagacatggtggacggtatcaaagagagtgtgtgctggggtccaccacctgccgctagtcctctaaagagctgcgagtaccatgccctttgctctcgcttccaagaactcctgctgcttcccgaagattatttcatgcctccgccaaagcgaagcctgtgctactgtgagtcttgccggaagctgcgaggagacgaggcccacaggcgcagaggggagcctccccgggaatatgcactgccctttggctggtgcaggttcaacctcagagtgaatccccgcctggaggctgggacactaaccaagaagtggcacatggcatatcacgggagcaatgttgccgctgtacggagagtgctggaccgaggggagctgggagcaggtactgcctccatcctgagctgccgtcctttgaagggagaacctggggtagggttcgaggagcctggcgagaactgtgcacctcctcgggaggagcagccccctcctgtgctgctttccccctcccttcaatatgctggggcggagaccctggcctccaaagtgcaattccgggaccccaaatcccagcggacgcaccaggctcaggtggcgttccaggtgtgtgtgcgccctggctcctacaccccgggacccccttccgctgcccttggagaacctcctgaccctcacttcagtccagccgaacttgagtgggtcactaaggagaagggggccacactcctctgtgccctgctggtacgggtggaatgaggggtgagacaccactactacaagcacagtcgggccgcgggcccatggactctgagtggcgactgcctccacctcattcccgtgactcgtggcatgcgcaggtgctggagcttggcagccgcgcaggagcatgtaggcaggctctcagatgtaggtggcaagtggcacagctccatgtccggaggcccagcactccgtctgatgggaggagtcgtgggagcccagctccaggccctggtacccctcttcatgcactgatttggggaacatgactcccttttactcccctaccccacatcacttaatttatttccgtttttgtttctggttactgtgaatcccagaggagtctctccctgtgcccacatgaagctgctttttccggggccaccgggcgggagtggggaagggtgggcgcacggaagatgggggcctctgtacagttgttactgactctgatttctaaggagccaataaacaccgtctcagagcctc

SEQ ID NO: 158524 - DNA, 4291 bp, Homo sapiens
  Payload ID: 11028
  Gene Symbol: NEURL4
  Gene Name: neuralized E3 ubiquitin protein ligase 4
  ENST ID: ENST00000571887
  CDS Start-End: 1-4291
gaccggggccgggcgggggtgggggccccagcgggagcggctcaggaccggggtccaacgggggtctgggcagcggcggggaactgcacccgcgcactgggcgcttggtgagcctgtcggcctgtgggcgtacggcgcggcggcagcagccgggccaggagtttaaccacgggctggtgttgagccgagaacccttgcgcgatggacgcgtcttcaccgtccgcatcgaccgcaaggtcaactcctggagcggctccattgagattggggtgacagcgctggaccccagtgtgctggactttccaagcagtgccacgggcctgaaggggggctcgtgggtagtgtcgggctgctctgtgctgagagatggacgctctgtgttggaggagtatggtcaggacctggaccagcttggtgaaggggaccgcgtgggcgtggagcgcacagttgctggggagcttcggctctgggtgaatgggcgggattgcggtgtggctgccacaggcctgccccctcgtgtctgggccgtcgtggacctttatggcaagtgcacccagatcaccgtgctaccccctgagccaggcttcagcccccctactcccatccccacacctcccctcgagcccttggcccccactgaagactctgccttggctgaacaggggacctctgcagatgaagactttgccaacatggagctgtctgaggtggtgagcaacaccatcctgtctgcctacaatggagggctcctgaatgtgaacctgagctccccaccggcaggggaaggcctgggatctagcggtgctgccacctcgcccattctcacttccaacgatgccctgctctttcatgaaaagtgcgggaccctcatcaaactcagcaacaataataagacggctgagcgccggcggcccctggatgaattcaacaatggggttgtcatgaccaatcgcccccttcgggacaatgagatgtttgagatccgtatcgacaagcttgttgataagtggtcaggctccattgagattggggtcaccacccacaaccccaacagtttggagtacccagccaccatgaccaacctccagtcaggcaccatcatgatgagcggctgtggaatcctgaccaatggcaagggcacccgccgggagtactgcgaattcagtctggatgagttgcaggagggtgaccacattggcctcacaaggaagtccaactctgccctacacttcttcattaatggtatcgatcagggagtggcaacccccttgacgcccccagtggtgtatggtgtggtggacttgtacgggatggcagtgaaggtgaccatcgtccacaataacaaccacagtgaccgtctccgccgaaacaacgccatcctgcgggcgctgtcccccgagggtgctctccgccgtgctgcccctgccgcccaggcagaacctgagcgcctgctcttccaccccaactgtgggcagaaggcagccatcacccacgagggacgcactgccctgaggccccatgccaccgatgacttcaatcacggcgtggtgctgagcagcagagccctgcgggatggagaggtgttccaggtgcgcatcgacaagatggtggacaaatgggctggctccattgaaattggtgtcaccacccacaaccctgcctacctccagttgccctccaccatgaccaacttgcgctctgggacctggatgatgactgggaatggggtgatgcacaatgggacgaccatcctggatgaatacgggcacaatctggaccgcctcaaggcaggggacacggtgggcgtggtacggcgggaggacgggactctccacttctttgtcaatgggatgactcagggccctgctgcctggaacgtgcccccgggcgtctatgctgtcgtcgatctctatggccaggcggcccaggccaccattgtggacgacgtggaggtggctccagttcctgaaccactccctgaggggaacaaccaggtgtctccaagctctccgtcctcaggggccgggggctctgacctgcgcttccatcagctgcacggcagtaacgcagtcatcactaacgggggccgcaccgccctccgccacaactgtcgcagcgagtttaatgacgccatcgtcatctccaaccgggccctgcgggatggagagctgtttgaaattgtcattcagaagatggtggaccgctggtcaggctccattgaggctggagtgactgctattcggcctgaagacctggaattccccaacaccatgacagacattgactatgacacatggatgctgagtggtacagccatcatgcaagacggtaacacgatgcgcaacaattatgggtgtgacctggatgcgctgggcacaggtgcacgcattggcatgatgcgaactgccaagggcgacctgcactacttcatcaacggccaggaccaaggcgctgcctgctcgggcctgcctccgggtaaagaggtgtatgcggtagtcgatctctatggccagtgtgtccaagtgtccatcaccaatgccaccggccccatggacaacagcctggcgaccagcaacactgccaccgagaagtccttcccactgcactccccagtggctggcgtggctcaccgattccacagtacttgcggcaagaacgtcactctagaggaggatggcacgagggcagtgcgtgccgctggctatgctcatggccttgtcttcagtaccaaggagctgagggctgaggaagtctttgaggtgaaagtggaagagctagatgagaagtgggcaggttccctgcggctggggctgaccacactagcaccgggggagatgggacccggggcaggcggtggtggcccagggctgcctccttccctgccagagctccggacgaagaccacttggatggtatccagctgtgaagtgaggcgtgatgggcagctccagaggatgaactatggccggaacctagagaggctgggggtggggagccgtgtgggtgttcgtcggggggcagatgacacgatgcacatcctggtggatggagaggatatggggcctgcagccactggcattgccaagaacgtgtgggctgtgttggatctctacgggccagtccgcggtgtgtcaattgtcagttccacgagactggaggagtcagaaggcacccagcctccttcccccagttcagacaccggcagtgagggcgaggaggatgacgagggcgaggagcatggcctgggaggccagaatgaagtgggtattatacccaccaccctcgagttcctggagaaccatgggaagaatatccttttgtctaatgggaaccgtacggccacacgggtggccagctacaatcagggcatcgttgtcatcaaccaacctctggtgccccagctgctggtgcaggtgcggatagatttcctaaaccgacagtggacatcttcccttgtcctgggagtcatcacctgcgcgcctgagaggctcaacttccctgcttctgcctgtgccctcaaacgggcagcctggctgctgcggggccgtggggtcttccacaacggtctcaagatctgcgagaagtttgggcccaatctggacacgtgccctgaaggcaccatcctgggactgcggctggacagctctggggggctgcatcttcatgttaatggggtggaccagggggtagctgtgccagatgtgccccagccctgccatgcgcttgtggacctctatgggcagtgtgagcaggtgacaatcgtgaaccctgagccaggggctgccagtgggaaaagtgctggaacccaaggggacatggagaaagcagacatggtggacggtatcaaagagagtgtgtgctggggtccaccacctgccgctagtcctctaaagagctgcgagtaccatgccctttgctctcgcttccaagaactcctgctgcttcccgaagattatttcatgcctccgccaaagcgaagcctgtgctactgtgagtcttgccggaagctgcgaggagacgaggcccacaggcgcagaggggagcctccccgggaatatgcactgccctttggctggtgcaggttcaacctcagagtgaatccccgcctggaggctgggacactaaccaagaagtggcacatggcatatcacgggagcaatgttgccgctgtacggagagtgctggaccgaggggagctgggagcaggtactgcctccatcctgagctgccgtcctttgaagggagaacctggggtagggttcgaggagcctggcgagaactgtgcacctcc

SEQ ID NO: 158525 - DNA, 4890 bp, Homo sapiens
  Payload ID: 11028
  Gene Symbol: NEURL4
  Gene Name: neuralized E3 ubiquitin protein ligase 4
  ENST ID: ENST00000570460
  CDS Start-End: 82-4698
gtatccctcggactgtctgcccgacgcggttgccacggtgccgccaagcgcggctgtcgcgctgccccggtgtcagcggagatggcggcagggtcgggtgggagtgggggctctgggggaggccctggaccggggccgggcgggggtgggggccccagcgggagcggctcaggaccggggtccaacgggggtctgggcagcggcggggaactgcacccgcgcactgggcgcttggtgagcctgtcggcctgtgggcgtacggcgcggcggcagcagccgggccaggagtttaaccacgggctggtgttgagccgagaacccttgcgcgatggacgcgtcttcaccgtccgcatcgaccgcaaggtcaactcctggagcggctccattgagattggggtgacagcgctggaccccagtgtgctggactttccaagcagtgccacgggcctgaaggggggctcgtgggtagtgtcgggctgctctgtgctgagagatggacgctctgtgttggaggagtatggtcaggacctggaccagcttggtgaaggggaccgcgtgggcgtggagcgcacagttgctggggagcttcggctctgggtgaatgggcgggattgcggtgtggctgccacaggcctgccccctcgtgtctgggccgtcgtggacctttatggcaagtgcacccagatcaccgtgctaccccctgagccaggcttcagcccccctactcccatccccacacctcccctcgagcccttggcccccactgaagactctgccttggctgaacaggggacctctgcagatgaagactttgccaacatggagctgtctgaggtggtgagcaacaccatcctgtctgcctacaatggagggctcctgaatgtgaacctgagctccccaccggcaggggaaggcctgggatctagcggtgctgccacctcgcccattctcacttccaacgatgccctgctctttcatgaaaagtgcgggaccctcatcaaactcagcaacaataataagacggctgagcgccggcggcccctggatgaattcaacaatggggttgtcatgaccaatcgcccccttcgggacaatgagatgtttgagatccgtatcgacaagcttgttgataagtggtcaggctccattgagattggggtcaccacccacaaccccaacagtttggagtacccagccaccatgaccaacctccagtcaggcaccatcatgatgagcggctgtggaatcctgaccaatggcaagggcacccgccgggagtactgcgaattcagtctggatgagttgcaggagggtgaccacattggcctcacaaggaagtccaactctgccctacacttcttcattaatggtatcgatcagggagtggcaacccccttgacgcccccagtggtgtatggtgtggtggacttgtacgggatggcagtgaaggtgaccatcgtccacaataacaaccacagtgaccgtctccgccgaaacaacgccatcctgcgggcgctgtcccccgagggtgctctccgccgtgctgcccctgccgcccaggcagaacctgagcgcctgctcttccaccccaactgtgggcagaaggcagccatcacccacgagggacgcactgccctgaggccccatgccaccgatgacttcaatcacggcgtggtgctgagcagcagagccctgcgggatggagaggtgttccaggtgcgcatcgacaagatggtggacaaatgggctggctccattgaaattggtgtcaccacccacaaccctgcctacctccagttgccctccaccatgaccaacttgcgctctgggacctggatgatgactgggaatggggtgatgcacaatgggacgaccatcctggatgaatacgggcacaatctggaccgcctcaaggcaggggacacggtgggcgtggtacggcgggaggacgggactctccacttctttgtcaatgggatgactcagggccctgctgcctggaacgtgcccccgggcgtctatgctgtcgtcgatctctatggccaggcggcccaggccaccattgtggacgacgtggaggtggctccagttcctgaaccactccctgaggggaacaaccaggtgtctccaagctctccgtcctcaggggccgggggctctgacctgcgcttccatcagctgcacggcagtaacgcagtcatcactaacgggggccgcaccgccctccgccacaactgtcgcagcgagtttaatgacgccatcgtcatctccaaccgggccctgcgggatggagagctgtttgaaattgtcattcagaagatggtggaccgctggtcaggctccattgaggctggagtgactgctattcggcctgaagacctggaattccccaacaccatgacagacattgactatgacacatggatgctgagtggtacagccatcatgcaagacggtaacacgatgcgcaacaattatgggtgtgacctggatgcgctgggcacaggtgcacgcattggcatgatgcgaactgccaagggcgacctgcactacttcatcaacggccaggaccaaggcgctgcctgctcgggcctgcctccggaggtgtatgcggtagtcgatctctatggccagtgtgtccaagtgtccatcaccaatgccaccggccccatggacaacagcctggcgaccagcaacactgccaccgagaagtccttcccactgcactccccagtggctggcgtggctcaccgattccacagtacttgcggcaagaacgtcactctagaggaggatggcacgagggcagtgcgtgccgctggctatgctcatggccttgtcttcagtaccaaggagctgagggctgaggaagtctttgaggtgaaagtggaagagctagatgagaagtgggcaggttccctgcggctggggctgaccacactagcaccgggggagatgggacccggggcaggcggtggtggcccagggctgcctccttccctgccagagctccggacgaagaccacttggatggtatccagctgtgaagtgaggcgtgatgggcagctccagaggatgaactatggccggaacctagagaggctgggggtggggagccgtgtgggtgttcgtcggggggcagatgacacgatgcacatcctggtggatggagaggatatggggcctgcagccactggcattgccaagaacgtgtgggctgtgttggatctctacgggccagtccgcggtgtgtcaattgtcagttccacgagactggaggagtcagaaggcacccagcctccttcccccagttcagacaccggcagtgagggcgaggaggatgacgagggcgaggagcatggcctgggaggccagaatgaagtgggtattatacccaccaccctcgagttcctggagaaccatgggaagaatatccttttgtctaatgggaaccgtacggccacacgggtggccagctacaatcagggcatcgttgtcatcaaccaacctctggtgccccagctgctggtgcaggtgcggatagatttcctaaaccgacagtggacatcttcccttgtcctgggagtcatcacctgcgcgcctgagaggctcaacttccctgcttctgcctgtgccctcaaacgggcagcctggctgctgcggggccgtggggtcttccacaacggtctcaagatctgcgagaagtttgggcccaatctggacacgtgccctgaaggcaccatcctgggactgcggctggacagctctggggggctgcatcttcatgttaatggggtggaccagggggtagctgtgccagatgtgccccagccctgccatgcgcttgtggacctctatgggcagtgtgagcaggtgacaatcgtgaaccctgagccaggggctgccagtgggaaaagtgctggaacccaaggggacatggagaaagcagacatggtggacggtatcaaagagagtgtgtgctggggtccaccacctgccgctagtcctctaaagagctgcgagtaccatgccctttgctctcgcttccaagaactcctgctgcttcccgaagattatttcatgcctccgccaaagcgaagcctgtgctactgtgagtcttgccggaagctgcgaggagacgaggcccacaggcgcagaggggagcctccccgggaatatgcactgccctttggctggtgcaggttcaacctcagagtgaatccccgcctggaggctgggacactaaccaagaagtggcacatggcatatcacgggagcaatgttgccgctgtacggagagtgctggaccgaggggagctgggagcaggtactgcctccatcctgagctgccgtcctttgaagggagaacctggggtagggttcgaggagcctggcgagaactgtgcacctcctcgggaggagcagccccctcctgtgctgctttccccctcccttcaatatgctggggcggagaccctggcctccaaagtgcaattccgggaccccaaatcccagcggacgcaccaggctcaggtggcgttccaggtgtgtgtgcgccctggctcctacaccccgggacccccttccgctgcccttggagaacctcctgaccctcacttcagtccagccgaacttgagtgggtcactaaggagaagggggccacactcctctgtgccctgctggtacgggtggaatgaggggtgagacaccactactacaagcacagtcgggccgcgggcccatggactctgagtggcgactgcctccacctcattcccgtgactcgtggcatgcgcaggtgctggagcttggcagccgcgcaggagcatgtaggcaggctctcagatgtaggtggcaagtggcacagctccatgtccggaggcccagca

SEQ ID NO: 158526 - DNA, 4431 bp, Homo sapiens
  Payload ID: 11028
  Gene Symbol: NEURL4
  Gene Name: neuralized E3 ubiquitin protein ligase 4
  ENST ID: ENST00000573186
  CDS Start-End: 1-3054
gagcccttggcccccactgaagactctgccttggctgaacaggggacctctgcagatgaagccttcatggtgtccccagcgcaggcccggccggagacgtttcctaacagccttgagtcgcataatggggaaggcctgggatctagcggtgctgccacctcgcccattctcacttccaacgatgccctgctctttcatgaaaagtgcgggaccctcatcaaactcagcaacaataataagacggctgagcgccggcggcccctggatgaattcaacaatggggttgtcatgaccaatcgcccccttcgggacaatgagatgtttgagatccgtatcgacaagcttgttgataagtggtcaggctccattgagattggggtcaccacccacaaccccaacagtttggagtacccagccaccatgaccaacctccagtcaggcaccatcatgatgagcggctgtggaatcctgaccaatggcaagggcacccgccgggagtactgcgaattcagtctggatgagttgcaggagggtgaccacattggcctcacaaggaagtccaactctgccctacacttcttcattaatggtatcgatcagggagtggcaacccccttgacgcccccagtggtgtatggtgtggtggacttgtacgggatggcagtgaaggtgaccatcgtccacaataacaaccacagtgaccgtctccgccgaaacaacgccatcctgcgggcgctgtcccccgagggtgctctccgccgtgctgcccctgccgcccaggcagaacctgagcgcctgctcttccaccccaactgtgggcagaaggcagccatcacccacgagggacgcactgccctgaggccccatgccaccgatgacttcaatcacggcgtggtgctgagcagcagagccctgcgggatggagaggtgttccaggtgcgcatcgacaagatggtggacaaatgggctggctccattgaaattggtgtcaccacccacaaccctgcctacctccagttgccctccaccatgaccaacttgcgctctgggacctggatgatgactgggaatggggtgatgcacaatgggacgaccatcctggatgaatacgggcacaatctggaccgcctcaaggcaggggacacggtgggcgtggtacggcgggaggacgggactctccacttctttgtcaatgggatgactcagggccctgctgcctggaacgtgcccccgggcgtctatgctgtcgtcgatctctatggccaggcggcccaggccaccattgtggacgacgtggaggtggctccagttcctgaaccactccctgaggggaacaaccaggtgtctccaagctctccgtcctcaggggccgggggctctgacctgcgcttccatcagctgcacggcagtaacgcagtcatcactaacgggggccgcaccgccctccgccacaactgtcgcagcgagtttaatgacgccatcgtcatctccaaccgggccctgcgggatggagagctgtttgaaattgtcattcagaagatggtggaccgctggtcaggctccattgaggctggagtgactgctattcggcctgaagacctggaattccccaacaccatgacagacattgactatgacacatggatgctgagtggtacagccatcatgcaagacggtaacacgatgcgcaacaattatgggtgtgacctggatgcgctgggcacaggtgcacgcattggcatgatgcgaactgccaagggcgacctgcactacttcatcaacggccaggaccaaggcgctgcctgctcgggcctgcctccgggtaaagaggtgtatgcggtagtcgatctctatggccagtgtgtccaagtgtccatcaccaatgccaccggccccatggacaacagcctggcgaccagcaacactgccaccgagaagtccttcccactgcactccccagtggctggcgtggctcaccgattccacagtacttgcggcaagaacgtcactctagaggaggatggcacgagggcagtgcgtgccgctggctatgctcatggccttgtcttcagtaccaaggagctgagggctgaggaagtctttgaggtgaaagtggaagagctagatgagaagtgggcaggttccctgcggctggggctgaccacactagcaccgggggagatgggacccggggcaggcggtggtggcccagggctgcctccttccctgccagagctccggacgaagaccacttggatggtatccagctgtgaagtgaggcgtgatgggcagctccagaggatgaactatggccggaacctagagaggctgggggtggggagccgtgtgggtgttcgtcggggggcagatgacacgatgcacatcctggtggatggagaggatatggggcctgcagccactggcattgccaagaacgtgtgggctgtgttggatctctacgggccagtccgcggtgtgtcaattgtcagttccacgagactggaggagtcagaaggcacccagcctccttcccccagttcagacaccggcagtgagggcgaggaggatgacgagggcgaggagcatggcctgggaggccagaatgaagtgggtattatacccaccaccctcgagttcctggagaaccatgggaagaatatccttttgtctaatgggaaccgtacggccacacgggtggccagctacaatcagggcatcgttgtcatcaaccaacctctggtgccccagctgctggtgcaggtgcggatagatttcctaaaccgacagtggacatcttcccttgtcctgggagtcatcacctgcgcgcctgagaggctcaacttccctgcttctgcctgtgccctcaaacgggcagcctggctgctgcggggccgtggggtcttccacaacggtctcaagccggtctctcctcccagatctgcgagaagtttgggcccaatctggacacgtgccctgaaggcaccatcctgggactgcggctggacagctctggggggctgcatcttcatgttaatggggtggaccagggggtagctgtgccagatgtgccccagccctgccatgcgcttgtggacctctatgggcagtgtgagcaggtgacaatcgtgaaccctgagccaggggctgccagtgggaaaagtgctggaacccaaggggacatggagaaagcagacatggtggacggtatcaaagagagtgtgtgctggggtccaccacctgccgctagtcctctaaagagctgcgagtaccatgccctttgctctcgcttccaagaactcctgctgcttcccgaagattatttcatgcctccgccaaagcgaagcctgtgctactgtgagtcttgccggaagctgcgaggagacgaggcccacaggcgcagaggggagcctccccgggaatatgcactgccctttggctggtgcaggttcaacctcagagtgaatccccgcctggaggctgggacactaaccaagaagtggcacatggcatatcacgggagcaatgttgccgctgtacggagagtgctggaccgaggggagctgggagcaggtactgcctccatcctgagctgccgtcctttgaagggagaacctggggtagggttcgaggagcctggcgagaactgtgcacctcctcgggaggagcagccccctcctgtgctgctttccccctcccttcaatatgctggggcggagaccctggcctccaaagtgcaattccgggaccccaaatcccagcggacgcaccaggctcaggtggcgttccaggtgtgtgtgcgccctggctcctacaccccgggacccccttccgctgcccttggagaacctcctgaccctcacttcagtccagccgaacttgagtgggtcactaaggagaagggggccacactcctctgtgccctgctggtacgggtggaatgaggggtgagacaccactactacaagcacagtcgggccgcgggcccatggactctgagtggcgactgcctccacctcattcccgtgactcgtggcatgcgcaggtgctggagcttggcagccgcgcaggagcatgtaggcaggctctcagatgtaggtggcaagtggcacagctccatgtccggaggcccagcactccgtctgatgggaggagtcgtgggagcccagctccaggccctggtacccctcttcatgcactgatttggggaacatgactcccttttactcccctaccccacatcacttaatttatttccgtttttgtttctggttactgtgaatcccagaggagtctctccctgtgcccacatgaagctgctttttccggggccaccgggcgggagtggggaagggtgggcgcacggaagatgggggcctctgtacagttgttactgactctgatttctaaggagccaataaacaccgtctcaga

SEQ ID NO: 158527 - DNA, 1850 bp, Homo sapiens
  Payload ID: 11028
  Gene Symbol: NEURL4
  Gene Name: neuralized E3 ubiquitin protein ligase 4
  ENST ID: ENST00000573651
  CDS Start-End: 1-750
gaaaagtgcgggaccctcatcaaactcagcaacaataataagacggctgagcgccggcggcccctggatgaattcaacaatggggttgtcatgaccaatcgcccccttcgggacaatgagatgtttgagatccgtatcgacaagcttgttgataagtggtcaggctccattgagattggggtcaccacccacaaccccaacagtttggagtacccagccaccatgaccaacctccagtcaggcaccatcatgatgagcggctgtggaatcctgaccaatggcaagggcacccgccgggagtactgcgaattcagtctggatgagttgcaggagggtgaccacattggcctcacaaggaagtccaactctgccctacacttcttcattaatggtatcgatcagggagtggcaacccccttgacgcccccagtggtgtatggtgtggtggacttgtacgggatggcagtgaaggtgaccatcgtccacaataacaaccacagtgaccgtctccgccgaaacaacgccatcctgcgggcgctgtcccccgagggtgctctccgccgtgctgcccctgccgcccaggcagaacctgagcgcctgctcttccaccccaactgtgggcagaaggcagccatcacccacgagggacgcactgccctgaggccccatgccaccgatgacttcaatcacggcgtggtgctgagcagcagagccctgcgggatggagaggtgttccagggacctggatgatgactgggaatggggtgatgcacaatgggacgaccatcctggatgaatacgggcacaatctggaccgcctcaaggggacacggtgggcgtggtacggcgggaggacgggactctccacttctttgtcaatgggatgactcagggccctgctgcctggaacgtgcccccgggcgtctatgctgtcgtcgatctctatggccaggcggcccaggccaccattgtggacgacgtggaggtggctccagttcctgaaccactccctgaggggaacaaccaggtgtctccaagctctccgtcctcaggggccgggggctctgacctgcgcttccatcagctgcacggcagtaacgcagtcatcactaacgggggccgcaccgccctccgccacaactgtcgcagcgagtttaatgacgccatcgtcatctccaaccgggccctgcgggatggagagctgtttgaaattgtcattcagaagatggtggaccgctggtcaggctccattgaggctggagtgactgctattcggcctgaagacctggaattccccaacaccatgacagacattgactatgacacatggatgctgagtggtacagccatcatgcaagacggtaacacgatgcgcaacaattatgggtgtgacctggatgcgctgggcacaggtgcacgcattggcatgatgcgaactgccaagggcgacctgcactacttcatcaacggccaggaccaaggcgctgcctgctcgggcctgcctccgggtaaagaggtgtatgcggtagtcgatctctatggccagtgtgtccaagtgtccatcaccaatgccaccggccccatggacaacagcctggcgaccagcaacactgccaccgagaagtccttcccactgcactccccagtggctggcgtggctcaccgattccacagtacttgcggcaagaacgtcactctagaggaggatggcacgagggcagtgcgtgccgctggctatgctcatggccttgtcttcagtaccaaggagctgagggctgaggaagtctttgaggtgaaagtggaagagctagatgagaagtgggcaggttccctgcggctggggctgacca

SEQ ID NO: 158528 - DNA, 2035 bp, Homo sapiens
  Payload ID: 11029
  Gene Symbol: NRG1
  Gene Name: neuregulin 1
  Uniprot ID: Q02297
  ENST ID: ENST00000287842
  CDS Start-End: 93-2030
gggacaaacttttcccaaacccgatccgagcccttggaccaaactcgcctgcgccgagagccgtccgcgtagagcgctccgtctccggcgagatgtccgagcgcaaagaaggcagaggcaaagggaagggcaagaagaaggagcgaggctccggcaagaagccggagtccgcggcgggcagccagagcccagccttgcctccccgattgaaagagatgaaaagccaggaatcggctgcaggttccaaactagtccttcggtgtgaaaccagttctgaatactcctctctcagattcaagtggttcaagaatgggaatgaattgaatcgaaaaaacaaaccacaaaatatcaagatacaaaaaaagccagggaagtcagaacttcgcattaacaaagcatcactggctgattctggagagtatatgtgcaaagtgatcagcaaattaggaaatgacagtgcctctgccaatatcaccatcgtggaatcaaacgagatcatcactggtatgccagcctcaactgaaggagcatatgtgtcttcagagtctcccattagaatatcagtatccacagaaggagcaaatacttcttcatctacatctacatccaccactgggacaagccatcttgtaaaatgtgcggagaaggagaaaactttctgtgtgaatggaggggagtgcttcatggtgaaagacctttcaaacccctcgagatacttgtgcaagtgcccaaatgagtttactggtgatcgctgccaaaactacgtaatggccagcttctacaagcatcttgggattgaatttatggaggcggaggagctgtaccagaagagagtgctgaccataaccggcatctgcatcgccctccttgtggtcggcatcatgtgtgtggtggcctactgcaaaaccaagaaacagcggaaaaagctgcatgaccgtcttcggcagagccttcggtctgaacgaaacaatatgatgaacattgccaatgggcctcaccatcctaacccaccccccgagaatgtccagctggtgaatcaatacgtatctaaaaacgtcatctccagtgagcatattgttgagagagaagcagagacatccttttccaccagtcactatacttccacagcccatcactccactactgtcacccagactcctagccacagctggagcaacggacacactgaaagcatcctttccgaaagccactctgtaatcgtgatgtcatccgtagaaaacagtaggcacagcagcccaactgggggcccaagaggacgtcttaatggcacaggaggccctcgtgaatgtaacagcttcctcaggcatgccagagaaacccctgattcctaccgagactctcctcatagtgaaaggtatgtgtcagccatgaccaccccggctcgtatgtcacctgtagatttccacacgccaagctcccccaaatcgcccccttcggaaatgtctccacccgtgtccagcatgacggtgtccatgccttccatggcggtcagccccttcatggaagaagagagacctctacttctcgtgacaccaccaaggctgcgggagaagaagtttgaccatcaccctcagcagttcagctccttccaccacaaccccgcgcatgacagtaacagcctccctgctagccccttgaggatagtggaggatgaggagtatgaaacgacccaagagtacgagccagcccaagagcctgttaagaaactcgccaatagccggcgggccaaaagaaccaagcccaatggccacattgctaacagattggaagtggacagcaacacaagctcccagagcagtaactcagagagtgaaacagaagatgaaagagtaggtgaagatacgcctttcctgggcatacagaaccccctggcagccagtcttgaggcaacacctgccttccgcctggctgacagcaggactaacccagcaggccgcttctcgacacaggaagaaatccaggccaggctgtctagtgtaattgctaaccaagaccctattgctgtataaaacct

SEQ ID NO: 158529 - DNA, 5931 bp, Homo sapiens
  Payload ID: 11029
  Gene Symbol: NRG1
  Gene Name: neuregulin 1
  Uniprot ID: Q02297
  ENST ID: ENST00000356819
  CDS Start-End: 461-2374
gtggctgcggggcaattgaaaaagagccggcgaggagttccccgaaacttgttggaactccgggctcgcgcggaggccaggagctgagcggcggcggctgccggacgatgggagcgtgagcaggacggtgataacctctccccgatcgggttgcgagggcgccgggcagaggccaggacgcgagccgccagcggtgggacccatcgacgacttcccggggcgacaggagcagccccgagagccagggcgagcgcccgttccaggtggccggaccgcccgccgcgtccgcgccgcgctccctgcaggcaacgggagacgcccccgcgcagcgcgagcgcctcagcgcggccgctcgctctccccctcgagggacaaacttttcccaaacccgatccgagcccttggaccaaactcgcctgcgccgagagccgtccgcgtagagcgctccgtctccggcgagatgtccgagcgcaaagaaggcagaggcaaagggaagggcaagaagaaggagcgaggctccggcaagaagccggagtccgcggcgggcagccagagcccagccttgcctccccgattgaaagagatgaaaagccaggaatcggctgcaggttccaaactagtccttcggtgtgaaaccagttctgaatactcctctctcagattcaagtggttcaagaatgggaatgaattgaatcgaaaaaacaaaccacaaaatatcaagatacaaaaaaagccagggaagtcagaacttcgcattaacaaagcatcactggctgattctggagagtatatgtgcaaagtgatcagcaaattaggaaatgacagtgcctctgccaatatcaccatcgtggaatcaaacgagatcatcactggtatgccagcctcaactgaaggagcatatgtgtcttcagagtctcccattagaatatcagtatccacagaaggagcaaatacttcttcatctacatctacatccaccactgggacaagccatcttgtaaaatgtgcggagaaggagaaaactttctgtgtgaatggaggggagtgcttcatggtgaaagacctttcaaacccctcgagatacttgtgcaagtgcccaaatgagtttactggtgatcgctgccaaaactacgtaatggccagcttctacaaggcggaggagctgtaccagaagagagtgctgaccataaccggcatctgcatcgccctccttgtggtcggcatcatgtgtgtggtggcctactgcaaaaccaagaaacagcggaaaaagctgcatgaccgtcttcggcagagccttcggtctgaacgaaacaatatgatgaacattgccaatgggcctcaccatcctaacccaccccccgagaatgtccagctggtgaatcaatacgtatctaaaaacgtcatctccagtgagcatattgttgagagagaagcagagacatccttttccaccagtcactatacttccacagcccatcactccactactgtcacccagactcctagccacagctggagcaacggacacactgaaagcatcctttccgaaagccactctgtaatcgtgatgtcatccgtagaaaacagtaggcacagcagcccaactgggggcccaagaggacgtcttaatggcacaggaggccctcgtgaatgtaacagcttcctcaggcatgccagagaaacccctgattcctaccgagactctcctcatagtgaaaggtatgtgtcagccatgaccaccccggctcgtatgtcacctgtagatttccacacgccaagctcccccaaatcgcccccttcggaaatgtctccacccgtgtccagcatgacggtgtccatgccttccatggcggtcagccccttcatggaagaagagagacctctacttctcgtgacaccaccaaggctgcgggagaagaagtttgaccatcaccctcagcagttcagctccttccaccacaaccccgcgcatgacagtaacagcctccctgctagccccttgaggatagtggaggatgaggagtatgaaacgacccaagagtacgagccagcccaagagcctgttaagaaactcgccaatagccggcgggccaaaagaaccaagcccaatggccacattgctaacagattggaagtggacagcaacacaagctcccagagcagtaactcagagagtgaaacagaagatgaaagagtaggtgaagatacgcctttcctgggcatacagaaccccctggcagccagtcttgaggcaacacctgccttccgcctggctgacagcaggactaacccagcaggccgcttctcgacacaggaagaaatccaggccaggctgtctagtgtaattgctaaccaagaccctattgctgtataaaacctaaataaacacatagattcacctgtaaaactttattttatataataaagtattccaccttaaattaaacaatttattttattttagcagttctgcaaatagaaaacaggaaaaaaacttttataaattaaatatatgtatgtaaaaatgtgttatgtgccatatgtagcaattttttacagtatttcaaaacgagaaagatatcaatggtgcctttatgttatgttatgtcgagagcaagttttgtacagttacagtgattgcttttccacagtatttctgcaaaacctctcatagattcagtttttgctggcttcttgtgcattgcattatgatgttgactggatgtatgatttgcaagacttgcaactgtccctctgtttgcttgtagtagcacccgatcagtatgtcttgtaatggcacatccatccagatatgcctctcttgtgtatgaagttttctttgctttcagaatatgaaatgagttgtgtctactctgccagccaaaggtttgcctcattgggctctgagataatagtagatccaacagcatgctactattaaatacagcaagaaactgcattaagtaatgttaaatattaggaagaaagtaatactgtgatttaaaaaaaactatattattaatcagaagacagcttgctcttactaaaaggagctctcatttactttatttgattttatttttcttgacaaaaagcaacagttttagggatagcttagaaaatgggttctggcttgctatcagggtaaatctaacaccttacaagaggactgagtgtcactttctctctgggggaatgatccagcagcttatctagttgacaatcaaaacacggctgataaaggtgcaatcatttctgacatgtatttttcactgattttgaagctagtgattggttgtgtcttcttggctcaaaaagaagcatattacggcacaaaaagcccagcccagacagcacatgcagcattttgtctgaaatacttctagagtcaaacgtgcctgctgtacatagcgatgacttgtcatcatagggaagtatttccatcgtagagtgttcagaaggagtgactgtataggtggagagaagcttagtgactccgttgaaattttaaaatgtggatgaccacccctttctcccccttatttttcttttatctttccatgttgccttgatcaggtcataactatgcatgaacattttttatcaggaatggccgatgtgtatgtgatttgtaatcacaagtaatgattcatcaggaaatgtcaatcctgttggaaagattgcacctttacttgcagaagtgacccccacctgtgtcctgacctctccatttacaggctctctcacccatttcccccacctcctttaatttttgctttactgtcataaagtaggactaagattggtctaagcattgcatgttcttttgtgatggtaaatccaaaggaaggcctataagtattaacatttgaaataactgctaattcaggaaaatggaagaaaaaaaattatttgaaacacagaacccatttcatggcctgcctgatatctgtgaaatcagggctggagctttacttaggattcacatggcctcctaggaaccatgggacaaatgggaaacaggttatcgggggattcatgaagtcagtgagagtaattgcttcttttttgcgggtgaactgaatgtatttcttcaccaaatcttgatgttaacaattaaaaagaagaaatgacatgcaagtaggtcttagcagaaaaatgcaggctgggcatgagtcatgttgttaccctcccacatgctcctacaatccacagagatgcctgtctgcaggttcttgaagttattgttagtatttggtatctcaaatttttcgtcactgttcacatgccactttctctgtgcacagtggtatcctcatttgctttttaacctacactgaggagtctttgtcaggttgcactgattttccaattctgcagtaatgagtaagctcacggcatggggaagaagacagtcagtccaatgaagttctctaaattattttaacattgcctttgaaggccttgactcatccttagctatttcaatgaagaaattcctaccatgaatttaaaaccctaaaaattctgtttcaaattctttgggcattggggtactcagatatcccattgtggaagaattttaagaataaatagaagtttctgttgagaaccatgagcaacatgtttcttacaatgagaattgctatgcattttaaaattgcaaatatatatgaaaattgaagacaagaggaaattgtatttctaacttgattctgatcactcacagaggtggcatattattatagttgggacatcctttgcacccttcataaaaaaggccagctgactgctcagcatcacctgccaaggccactagatttgtgtttacaggggtatctctgtgatgcttgtcacatcactcttgaccacctctgttaataaattccgacagtgcagtggcgatcggagtgtgaacttatgttcccagcatatggaaagctatcttaggttttaaggtagtagaaattgcccaggagtttgacagcaactttgtttcccgggtctaaaatcgtatcccactgaggtgtatgcagtggagcataatacatgcaaatacatgcaaaactccttttgtttcacctaagattcactttctatcttactttcccttcctgcctagtgtgacttttgcccccaagagtgcctggacagcattctagtttctacaaaatggtcctctgtgtaggtgaatgtgtcccaaacctgctatcactttcttgtttcagtgtgactgtcttgttagaggtgaagtttatccagggtaacttgctcactaactattcctttttatggcctggggttaaagggcgcatggctcacactggtgaaaataaggaaggcctggtcttatcttgtattaataatactggctgcattccaccagccagagatttctatctgcgaagacctatgaaacactgaagagaaatgtaggcagaaggaaatggccacatatcacaagttctattatatattcttttgtaaatacatattgtatattacttggatgttttcttatatcatttactgtctttttgagttaatgtcagtttttactctctcaacttactatgtaacattgtaaataacataatgtcctttattatttatatttaagcatctaacatatagagttgttttcatataagtttaagataaatgtcaaaaatatatgttcttttgtttttctttgctttaaaattatgtatcttttccttttcttttttttaagaataatttattgttcaggagaaagaatgtatatgtaactgaaactatctgaagaatgcacattgaaggccgtgaggtactgataaactaaagaatttattattcaaaatactaagcaataagtaattgtgatttatttaaagttttgtccattttccatgaaagacatactgcaataaaaatgctactctgtggaga

SEQ ID NO: 158530 - DNA, 1992 bp, Homo sapiens
  Payload ID: 11029
  Gene Symbol: NRG1
  Gene Name: neuregulin 1
  Uniprot ID: Q02297
  ENST ID: ENST00000405005
  CDS Start-End: 1-1923
atgtccgagcgcaaagaaggcagaggcaaagggaagggcaagaagaaggagcgaggctccggcaagaagccggagtccgcggcgggcagccagagcccagccttgcctccccgattgaaagagatgaaaagccaggaatcggctgcaggttccaaactagtccttcggtgtgaaaccagttctgaatactcctctctcagattcaagtggttcaagaatgggaatgaattgaatcgaaaaaacaaaccacaaaatatcaagatacaaaaaaagccagggaagtcagaacttcgcattaacaaagcatcactggctgattctggagagtatatgtgcaaagtgatcagcaaattaggaaatgacagtgcctctgccaatatcaccatcgtggaatcaaacgagatcatcactggtatgccagcctcaactgaaggagcatatgtgtcttcagagtctcccattagaatatcagtatccacagaaggagcaaatacttcttcatctacatctacatccaccactgggacaagccatcttgtaaaatgtgcggagaaggagaaaactttctgtgtgaatggaggggagtgcttcatggtgaaagacctttcaaacccctcgagatacttgtgcaagtgccaacctggattcactggagcaagatgtactgagaatgtgcccatgaaagtccaaaaccaagaaaaggcggaggagctgtaccagaagagagtgctgaccataaccggcatctgcatcgccctccttgtggtcggcatcatgtgtgtggtggcctactgcaaaaccaagaaacagcggaaaaagctgcatgaccgtcttcggcagagccttcggtctgaacgaaacaatatgatgaacattgccaatgggcctcaccatcctaacccaccccccgagaatgtccagctggtgaatcaatacgtatctaaaaacgtcatctccagtgagcatattgttgagagagaagcagagacatccttttccaccagtcactatacttccacagcccatcactccactactgtcacccagactcctagccacagctggagcaacggacacactgaaagcatcctttccgaaagccactctgtaatcgtgatgtcatccgtagaaaacagtaggcacagcagcccaactgggggcccaagaggacgtcttaatggcacaggaggccctcgtgaatgtaacagcttcctcaggcatgccagagaaacccctgattcctaccgagactctcctcatagtgaaaggtatgtgtcagccatgaccaccccggctcgtatgtcacctgtagatttccacacgccaagctcccccaaatcgcccccttcggaaatgtctccacccgtgtccagcatgacggtgtccatgccttccatggcggtcagccccttcatggaagaagagagacctctacttctcgtgacaccaccaaggctgcgggagaagaagtttgaccatcaccctcagcagttcagctccttccaccacaaccccgcgcatgacagtaacagcctccctgctagccccttgaggatagtggaggatgaggagtatgaaacgacccaagagtacgagccagcccaagagcctgttaagaaactcgccaatagccggcgggccaaaagaaccaagcccaatggccacattgctaacagattggaagtggacagcaacacaagctcccagagcagtaactcagagagtgaaacagaagatgaaagagtaggtgaagatacgcctttcctgggcatacagaaccccctggcagccagtcttgaggcaacacctgccttccgcctggctgacagcaggactaacccagcaggccgcttctcgacacaggaagaaatccaggccaggctgtctagtgtaattgctaaccaagaccctattgctgtataaaacctaaataaacacatagattcacctgtaaaactttattttatataataaagtattccaccttaaatt

SEQ ID NO: 158531 - DNA, 563 bp, Homo sapiens
  Payload ID: 11029
  Gene Symbol: NRG1
  Gene Name: neuregulin 1
  ENST ID: ENST00000519240
  CDS Start-End: 159-563
agcttctgctccagagcttcatcttcaggaaccacctaagcatttttttccccagtaggagttcagtctgctcattatacctaattgcaaaggagctatattcagagcaagaataataatttcagattttttaactggacttcaaagagcaggaaagtatgcagattcctaaacacataagcattgaagatattacagctacatctacatccaccactgggacaagccatcttgtaaaatgtgcggagaaggagaaaactttctgtgtgaatggaggggagtgcttcatggtgaaagacctttcaaacccctcgagatacttgtgcaagtgcccaaatgagtttactggtgatcgctgccaaaactacgtaatggccagcttctacaaggcggaggagctgtaccagaagagagtgctgaccataaccggcatctgcatcgccctccttgtggtcggcatcatgtgtgtggtggcctactgcaaaaccaagaaacagcggaaaaagctgcatgaccgtcttcggcagagccttcggtctgaacgaaacaatatgatgaacatt

SEQ ID NO: 158532 - DNA, 555 bp, Homo sapiens
  Payload ID: 11029
  Gene Symbol: NRG1
  Gene Name: neuregulin 1
  ENST ID: ENST00000518084
  CDS Start-End: 251-555
tctgaacctttcctttggaaaactaatgactccacctatcattcccttggcatctagagaagctacattaggtggcacagctctttctgctcagcttctgctccagagcttcatcttcaggaaccacctaagcatttttttccccagtaggagttcagtctgctcattatacctaattgcaaaggagctatattcagagcaagaataataatttcagattttttaactggacttcaaagagcaggaaagtatgcagattcctaaacacataagcattgaagatattacagctacatctacatccaccactgggacaagccatcttgtaaaatgtgcggagaaggagaaaactttctgtgtgaatggaggggagtgcttcatggtgaaagacctttcaaacccctcgagatacttgtgcaagtgcccaaatgagtttactggtgatcgctgccaaaactacgtaatggccagcttctacaagcatcttgggattgaatttatggaggcggaggagctgtaccagaagagagtgctgaccataaccggcatctgcat

SEQ ID NO: 158533 - DNA, 1769 bp, Homo sapiens
  Payload ID: 11029
  Gene Symbol: NRG1
  Gene Name: neuregulin 1
  Uniprot ID: Q02297
  ENST ID: ENST00000521670
  CDS Start-End: 109-1497
tcgctctccccctcgagggacaaacttttcccaaacccgatccgagcccttggaccaaactcgcctgcgccgagagccgtccgcgtagagcgctccgtctccggcgagatgtccgagcgcaaagaaggcagaggcaaagggaagggcaagaagaaggagcgaggctccggcaagaagccggagtccgcggcgggcagccagagcccagccttgcctccccgattgaaagagatgaaaagccaggaatcggctgcaggttccaaactagtccttcggtgtgaaaccagttctgaatactcctctctcagattcaagtggttcaagaatgggaatgaattgaatcgaaaaaacaaaccacaaaatatcaagatacaaaaaaagccagggaagtcagaacttcgcattaacaaagcatcactggctgattctggagagtatatgtgcaaagtgatcagcaaattaggaaatgacagtgcctctgccaatatcaccatcgtggaatcaaacgagatcatcactggtatgccagcctcaactgaaggagcatatgtgtcttcagagtctcccattagaatatcagtatccacagaaggagcaaatacttcttcatctacatctacatccaccactgggacaagccatcttgtaaaatgtgcggagaaggagaaaactttctgtgtgaatggaggggagtgcttcatggtgaaagacctttcaaacccctcgagatacttgtgcaagtgccaacctggattcactggagcaagatgtactgagaatgtgcccatgaaagtccaaaaccaagaaaaggcggaggagctgtaccagaagagagtgctgaccataaccggcatctgcatcgccctccttgtggtcggcatcatgtgtgtggtggcctactgcaaaaccaagaaacagcggaaaaagctgcatgaccgtcttcggcagagccttcggtctgaacgaaacaatatgatgaacattgccaatgggcctcaccatcctaacccaccccccgagaatgtccagctggtgaatcaatacgtatctaaaaacgtcatctccagtgagcatattgttgagagagaagcagagacatccttttccaccagtcactatacttccacagcccatcactccactactgtcacccagactcctagccacagctggagcaacggacacactgaaagcatcctttccgaaagccactctgtaatcgtgatgtcatccgtagaaaacagtaggcacagcagcccaactgggggcccaagaggacgtcttaatggcacaggaggccctcgtgaatgtaacagcttcctcaggcatgccagagaaacccctgattcctaccgagactctcctcatagtgaaagacataaccttatagctgagctaaggagaaacaaggcacacagatccaaatgcatgcagatccagctatcagcaactcatcttagatcttcttccattccccatttgggcttcattctctaagaccccttggcctttaggaaggtatgtgtcagccatgaccaccccggctcgtatgtcacctgtagatttccacacgccaagctcccccaaatcgcccccttcggaaatgtctccacccgtgtccagcatgacggtgtccatgccttccatggcggtcagccccttcatggaagaagagagacctctacttctcgtgacaccaccaaggctgcgggagaagaagtttgaccatcaccctcagcagttcagctccttccaccacaaccccgcgc

SEQ ID NO: 158534 - DNA, 2516 bp, Homo sapiens
  Payload ID: 11029
  Gene Symbol: NRG1
  Gene Name: neuregulin 1
  ENST ID: ENST00000523534
  CDS Start-End: 1-2142
gtgcccagcgccggcgagcccggggaggaggcgccctatctggtgaaggtgcaccaggtgtgggcggtgaaagccgggggcttgaagaaggactcgctgctcaccgtgcgcctggggacctggggccaccccgccttcccctcctgcgggaggctcaaggaggacagcaggtacatcttcttcatggagcccgacgccaacagcaccagccgcgcgccggccgccttccgagcctctttcccccctctggagacgggccggaacctcaagaaggaggtcagccgggtgctgtgcaagcggtgcgccttgcctccccgattgaaagagatgaaaagccaggaatcggctgcaggttccaaactagtccttcggtgtgaaaccagttctgaatactcctctctcagattcaagtggttcaagaatgggaatgaattgaatcgaaaaaacaaaccacaaaatatcaagatacaaaaaaagccagggaagtcagaacttcgcattaacaaagcatcactggctgattctggagagtatatgtgcaaagtgatcagcaaattaggaaatgacagtgcctctgccaatatcaccatcgtggaatcaaacgagatcatcactggtatgccagcctcaactgaaggagcatatgtgtcttcagagtctcccattagaatatcagtatccacagaaggagcaaatacttcttcatctacatctacatccaccactgggacaagccatcttgtaaaatgtgcggagaaggagaaaactttctgtgtgaatggaggggagtgcttcatggtgaaagacctttcaaacccctcgagatacttgtgcaagtgcccaaatgagtttactggtgatcgctgccaaaactacgtaatggccagcttctacaagcatcttgggattgaatttatggaggcggaggagctgtaccagaagagagtgctgaccataaccggcatctgcatcgccctccttgtggtcggcatcatgtgtgtggtggcctactgcaaaaccaagaaacagcggaaaaagctgcatgaccgtcttcggcagagccttcggtctgaacgaaacaatatgatgaacattgccaatgggcctcaccatcctaacccaccccccgagaatgtccagctggtgaatcaatacgtatctaaaaacgtcatctccagtgagcatattgttgagagagaagcagagacatccttttccaccagtcactatacttccacagcccatcactccactactgtcacccagactcctagccacagctggagcaacggacacactgaaagcatcctttccgaaagccactctgtaatcgtgatgtcatccgtagaaaacagtaggcacagcagcccaactgggggcccaagaggacgtcttaatggcacaggaggccctcgtgaatgtaacagcttcctcaggcatgccagagaaacccctgattcctaccgagactctcctcatagtgaaaggtatgtgtcagccatgaccaccccggctcgtatgtcacctgtagatttccacacgccaagctcccccaaatcgcccccttcggaaatgtctccacccgtgtccagcatgacggtgtccatgccttccatggcggtcagccccttcatggaagaagagagacctctacttctcgtgacaccaccaaggctgcgggagaagaagtttgaccatcaccctcagcagttcagctccttccaccacaaccccgcgcatgacagtaacagcctccctgctagccccttgaggatagtggaggatgaggagtatgaaacgacccaagagtacgagccagcccaagagcctgttaagaaactcgccaatagccggcgggccaaaagaaccaagcccaatggccacattgctaacagattggaagtggacagcaacacaagctcccagagcagtaactcagagagtgaaacagaagatgaaagagtaggtgaagatacgcctttcctgggcatacagaaccccctggcagccagtcttgaggcaacacctgccttccgcctggctgacagcaggactaacccagcaggccgcttctcgacacaggaagaaatccaggccaggctgtctagtgtaattgctaaccaagaccctattgctgtataaaacctaaataaacacatagattcacctgtaaaactttattttatataataaagtattccaccttaaattaaacaatttattttattttagcagttctgcaaatagaaaacaggaaaaaaacttttataaattaaatatatgtatgtaaaaatgtgttatgtgccatatgtagcaattttttacagtatttcaaaacgagaaagatatcaatggtgcctttatgttatgttatgtcgagagcaagttttgtacagttacagtgattgcttttccacagtatttctgcaaaacctctcatagattcagtttttgctggcttcttgtgcattgcattatgatgttgactggatgtatgatttgcaagacttgcaact

SEQ ID NO: 158535 - DNA, 1785 bp, Homo sapiens
  Payload ID: 11029
  Gene Symbol: NRG1
  Gene Name: neuregulin 1
  Uniprot ID: Q02297
  ENST ID: ENST00000519301
  CDS Start-End: 10-1782
ggcagcagcatggggaaaggacgcgcgggccgagttggcaccacagccttgcctccccgattgaaagagatgaaaagccaggaatcggctgcaggttccaaactagtccttcggtgtgaaaccagttctgaatactcctctctcagattcaagtggttcaagaatgggaatgaattgaatcgaaaaaacaaaccacaaaatatcaagatacaaaaaaagccagggaagtcagaacttcgcattaacaaagcatcactggctgattctggagagtatatgtgcaaagtgatcagcaaattaggaaatgacagtgcctctgccaatatcaccatcgtggaatcaaacgctacatctacatccaccactgggacaagccatcttgtaaaatgtgcggagaaggagaaaactttctgtgtgaatggaggggagtgcttcatggtgaaagacctttcaaacccctcgagatacttgtgcaagtgcccaaatgagtttactggtgatcgctgccaaaactacgtaatggccagcttctacaagcatcttgggattgaatttatggaggcggaggagctgtaccagaagagagtgctgaccataaccggcatctgcatcgccctccttgtggtcggcatcatgtgtgtggtggcctactgcaaaaccaagaaacagcggaaaaagctgcatgaccgtcttcggcagagccttcggtctgaacgaaacaatatgatgaacattgccaatgggcctcaccatcctaacccaccccccgagaatgtccagctggtgaatcaatacgtatctaaaaacgtcatctccagtgagcatattgttgagagagaagcagagacatccttttccaccagtcactatacttccacagcccatcactccactactgtcacccagactcctagccacagctggagcaacggacacactgaaagcatcctttccgaaagccactctgtaatcgtgatgtcatccgtagaaaacagtaggcacagcagcccaactgggggcccaagaggacgtcttaatggcacaggaggccctcgtgaatgtaacagcttcctcaggcatgccagagaaacccctgattcctaccgagactctcctcatagtgaaaggtatgtgtcagccatgaccaccccggctcgtatgtcacctgtagatttccacacgccaagctcccccaaatcgcccccttcggaaatgtctccacccgtgtccagcatgacggtgtccatgccttccatggcggtcagccccttcatggaagaagagagacctctacttctcgtgacaccaccaaggctgcgggagaagaagtttgaccatcaccctcagcagttcagctccttccaccacaaccccgcgcatgacagtaacagcctccctgctagccccttgaggatagtggaggatgaggagtatgaaacgacccaagagtacgagccagcccaagagcctgttaagaaactcgccaatagccggcgggccaaaagaaccaagcccaatggccacattgctaacagattggaagtggacagcaacacaagctcccagagcagtaactcagagagtgaaacagaagatgaaagagtaggtgaagatacgcctttcctgggcatacagaaccccctggcagccagtcttgaggcaacacctgccttccgcctggctgacagcaggactaacccagcaggccgcttctcgacacaggaagaaatccaggccaggctgtctagtgtaattgctaaccaagaccctattgctgtataaaac

SEQ ID NO: 158536 - DNA, 1453 bp, Homo sapiens
  Payload ID: 11029
  Gene Symbol: NRG1
  Gene Name: neuregulin 1
  ENST ID: ENST00000518104
  CDS Start-End: 10-1453
ggcagcagcatggggaaaggacgcgcgggccgagttggcaccacagccttgcctccccgattgaaagagatgaaaagccaggaatcggctgcaggttccaaactagtccttcggtgtgaaaccagttctgaatactcctctctcagattcaagtggttcaagaatgggaatgaattgaatcgaaaaaacaaaccacaaaatatcaagatacaaaaaaagccagggaagtcagaacttcgcattaacaaagcatcactggctgattctggagagtatatgtgcaaagtgatcagcaaattaggaaatgacagtgcctctgccaatatcaccatcgtggaatcaaacgagatcatcactggtatgccagcctcaactgaaggagcatatgtgtcttcagctacatctacatccaccactgggacaagccatcttgtaaaatgtgcggagaaggagaaaactttctgtgtgaatggaggggagtgcttcatggtgaaagacctttcaaacccctcgagatacttgtgcaagtgcccaaatgagtttactggtgatcgctgccaaaactacgtaatggccagcttctacaagcatcttgggattgaatttatggaggcggaggagctgtaccagaagagagtgctgaccataaccggcatctgcatcgccctccttgtggtcggcatcatgtgtgtggtggcctactgcaaaaccaagaaacagcggaaaaagctgcatgaccgtcttcggcagagccttcggtctgaacgaaacaatatgatgaacattgccaatgggcctcaccatcctaacccaccccccgagaatgtccagctggtgaatcaatacgtatctaaaaacgtcatctccagtgagcatattgttgagagagaagcagagacatccttttccaccagtcactatacttccacagcccatcactccactactgtcacccagactcctagccacagctggagcaacggacacactgaaagcatcctttccgaaagccactctgtaatcgtgatgtcatccgtagaaaacagtaggcacagcagcccaactgggggcccaagaggacgtcttaatggcacaggaggccctcgtgaatgtaacagcttcctcaggcatgccagagaaacccctgattcctaccgagactctcctcatagtgaaaggtatgtgtcagccatgaccaccccggctcgtatgtcacctgtagatttccacacgccaagctcccccaaatcgcccccttcggaaatgtctccacccgtgtccagcatgacggtgtccatgccttccatggcggtcagccccttcatggaagaagagagacctctacttctcgtgacaccaccaaggctgcgggagaagaagtttgaccatcaccctcagcagttcagctccttccaccacaaccccgcgcatgacagtaacagcctccctgcta

SEQ ID NO: 158537 - DNA, 2359 bp, Homo sapiens
  Payload ID: 11029
  Gene Symbol: NRG1
  Gene Name: neuregulin 1
  Uniprot ID: Q02297
  ENST ID: ENST00000523079
  CDS Start-End: 518-1780
gaggccaggggagggtgcgaaggaggcgcctgcctccaacctgcgggcgggaggtgggtggctgcggggcaattgaaaaagagccggcgaggagttccccgaaacttgttggaactccgggctcgcgcggaggccaggagctgagcggcggcggctgccggacgatgggagcgtgagcaggacggtgataacctctccccgatcgggttgcgagggcgccgggcagaggccaggacgcgagccgccagcggtgggacccatcgacgacttcccggggcgacaggagcagccccgagagccagggcgagcgcccgttccaggtggccggaccgcccgccgcgtccgcgccgcgctccctgcaggcaacgggagacgcccccgcgcagcgcgagcgcctcagcgcggccgctcgctctccccctcgagggacaaacttttcccaaacccgatccgagcccttggaccaaactcgcctgcgccgagagccgtccgcgtagagcgctccgtctccggcgagatgtccgagcgcaaagaaggcagaggcaaagggaagggcaagaagaaggagcgaggctccggcaagaagccggagtccgcggcgggcagccagagcccagccttgcctccccgattgaaagagatgaaaagccaggaatcggctgcaggttccaaactagtccttcggtgtgaaaccagttctgaatactcctctctcagattcaagtggttcaagaatgggaatgaattgaatcgaaaaaacaaaccacaaaatatcaagatacaaaaaaagccagggaagtcagaacttcgcattaacaaagcatcactggctgattctggagagtatatgtgcaaagtgatcagcaaattaggaaatgacagtgcctctgccaatatcaccatcgtggaatcaaacgagatcatcactggtatgccagcctcaactgaaggagcatatgtgtcttcagagtctcccattagaatatcagtatccacagaaggagcaaatacttcttcatctacatctacatccaccactgggacaagccatcttgtaaaatgtgcggagaaggagaaaactttctgtgtgaatggaggggagtgcttcatggtgaaagacctttcaaacccctcgagatacttgtgcaagtgcccaaatgagtttactggtgatcgctgccaaaactacgtaatggccagcttctacaaggcggaggagctgtaccagaagagagtgctgaccataaccggcatctgcatcgccctccttgtggtcggcatcatgtgtgtggtggcctactgcaaaaccaagaaacagcggaaaaagctgcatgaccgtcttcggcagagccttcggtctgaacgaaacaatatgatgaacattgccaatgggcctcaccatcctaacccaccccccgagaatgtccagctggtgaatcaatacgtatctaaaaacgtcatctccagtgagcatattgttgagagagaagcagagacatccttttccaccagtcactatacttccacagcccatcactccactactgtcacccagactcctagccacagctggagcaacggacacactgaaagcatcctttccgaaagccactctgtaatcgtgatgtcatccgtagaaaacagtaggcacagcagcccaactgggggcccaagaggacgtcttaatggcacaggaggccctcgtgaatgtaacagcttcctcaggcatgccagagaaacccctgattcctaccgagactctcctcatagtgaaaggtaaaaccgaagggcaaagctactgcagaggagaaactcagtcagagaatccctgtgagcacctgcggtctcacctcaggaaatctactctaatcagaataaggggcggcagttacctgttctaggagtgctcctagttgatgaagtcatctctttgtttgacggaacttatttcttctgagcttctctcgtcgtcccagtgactgacaggcaacagactcttaaagagctgggatgctttgatgcggaaggtgcagcacatggagtttccagctctggccatgggctcagacccactcggggtctcagtgtcctcagttgtaacattagagagatggcatcaatgcttgataaggacccttctataattccaattgccagttatccaaactctgattcggtggtcgagctggcctcgtgttcttatctgctaaccctgtcttaccttccagcctcagttaagtcaaatcaagggctatgtcattgctgaatgtcatggggggcaactgcttgccctccaccctatagtatctattttatgaaattccaagaagggatgaataaataaatctcttggatgctg

SEQ ID NO: 158538 - DNA, 570 bp, Homo sapiens
  Payload ID: 11029
  Gene Symbol: NRG1
  Gene Name: neuregulin 1
  ENST ID: ENST00000522402
  CDS Start-End: 185-570
attaggtggcacagctctttctgctcagcttctgctccagagcttcatcttcaggaaccacctaagcatttttttccccagtaggagttcagtctgctcattatacctaattgcaaaggagctatattcagagcaagaataataatttcagattttttaactggacttcaaagagcaggaaagtatgcagattcctaaacacataagcattgaagatattacagctacatctacatccaccactgggacaagccatcttgtaaaatgtgcggagaaggagaaaactttctgtgtgaatggaggggagtgcttcatggtgaaagacctttcaaacccctcgagatacttgtgcaagtgccaacctggattcactggagcaagatgtactgagaatgtgcccatgaaagtccaaaaccaagaaaaggcggaggagctgtaccagaagagagtgctgaccataaccggcatctgcatcgccctccttgtggtcggcatcatgtgtgtggtggcctactgcaaaaccaagaaacagcggaaaaagctgcatgaccgtcttcggcagagccttcg

SEQ ID NO: 158539 - DNA, 886 bp, Homo sapiens
  Payload ID: 11029
  Gene Symbol: NRG1
  Gene Name: neuregulin 1
  ENST ID: ENST00000518206
  CDS Start-End: 1-380
gtgcctctgccaatatcaccatcgtggaatcaaacgagatcatcactggtatgccagcctcaactgaaggagcatatgtgtcttcagagtctcccattagaatatcagtatccacagaaggagcaaatacttcttcatctacatctacatccaccactgggacaagccatcttgtaaaatgtgcggagaaggagaaaactttctgtgtgaatggaggggagtgcttcatggtgaaagacctttcaaacccctcgagatacttgtgcaagtgccaacctggattcactggagcaagatgtactgagaatgtgcccatgaaagtccaaaaccaagaaagtgcccaaatgagtttactggtgatcgctgccaaaactacgtaatggccagcttctacagtacgtccactccctttctgtctctgcctgaataggagcatgctcagttggtgctgctttcttgttgctgcatctcccctcagattccacctagagctagatgtgtcttaccagatctaatattgactgcctctgcctgtcgcatgagaacattaacaaaagcaattgtattacttcctctgttcgcgactagttggctctgagatactaataggtgtgtgaggctccggatgtttctggaattgatattgaatgatgtgatacaaattgatagtcaatatcaagcagtgaaatatgataataaaggcatttcaaagtctcacttttattgataaaataaaaatcattctactgaacagtccatcttctttatacaatgaccacatcctgaaaagggtgttgctaagctgtaaccgatatgcacttgaaatgatggtaagttaattttgattcagaatgtgttatttgtcacaaataaacataataaaagg

SEQ ID NO: 158540 - DNA, 1330 bp, Homo sapiens
  Payload ID: 11029
  Gene Symbol: NRG1
  Gene Name: neuregulin 1
  Uniprot ID: Q02297
  ENST ID: ENST00000520502
  CDS Start-End: 1-891
atggagatttattccccagacatgtctgaggtcgccgccgagaggtcctccagcccctccactcagctgagtgcagacccatctcttgatgggcttccggcagcagaagacatgccagagccccagactgaagatgggagaacccctggactcgtgggcctggccgtgccctgctgtgcgtgcctagaagctgagcgcctgagaggttgcctcaactcagagaaaatctgcattgtccccatcctggcttgcctggtcagcctctgcctctgcatcgccggcctcaagtgggtatttgtggacaagatctttgaatatgactctcctactcaccttgaccctggggggttaggccaggaccctattatttctctggacgcaactgctgcctcagctgtgtgggtgtcgtctgaggcatacacttcacctgtctctagggctcaatctgaaagtgaggttcaagttacagtgcaaggtgacaaggctgttgtctcctttgaaccatcagcggcaccgacaccgaagaatcgtatttttgccttttctttcttgccgtccactgcgccatccttcccttcacccacccggaaccctgaggtgagaacgcccaagtcagcaactcagccacaaacaacagaaactaatctccaaactgctcctaaactttctacatctacatccaccactgggacaagccatcttgtaaaatgtgcggagaaggagaaaactttctgtgtgaatggaggggagtgcttcatggtgaaagacctttcaaacccctcgagatacttgtgcaagtgcccaaatgagtttactggtgatcgctgccaaaactacgtaatggccagcttctacagtacgtccactccctttctgtctctgcctgaataggagcatgctcagttggtgctgctttcttgttgctgcatctcccctcagattccacctagagctagatgtgtcttaccagatctaatattgactgcctctgcctgtcgcatgagaacattaacaaaagcaattgtattacttcctctgttcgcgactagttggctctgagatactaataggtgtgtgaggctccggatgtttctggaattgatattgaatgatgtgatacaaattgatagtcaatatcaagcagtgaaatatgataataaaggcatttcaaagtctcacttttattgataaaataaaaatcattctactgaacagtccatcttctttatacaatgaccacatcctgaaaagggtgttgctaagctgtaaccgatatgcacttgaaatgatggtaagttaattttgattcagaatgtgttatttgtcacaa

SEQ ID NO: 158541 - DNA, 1094 bp, Homo sapiens
  Payload ID: 11029
  Gene Symbol: NRG1
  Gene Name: neuregulin 1
  ENST ID: ENST00000523041
  CDS Start-End: 1-591
ccccagactgaagatgggagaacccctggactcgtgggcctggccgtgccctgctgtgcgtgcctagaagctgagcgcctgagaggttgcctcaactcagagaaaatctgcattgtccccatcctggcttgcctggtcagcctctgcctctgcatcgccggcctcaagtgggtatttgtggacaagatctttgaatatgactctcctactcaccttgaccctggggggttaggccaggaccctattatttctctggacgcaactgctgcctcagctgtgtgggtgtcgtctgaggcatacacttcacctgtctctagggctcaatctgaaagtgaggttcaagttacagtgcaaggtgacaaggctgttgtctcctttgaaccatcagcggcaccgacaccgaagaatcgtatttttgccttttctttcttgccgtccactgcgccatccttcccttcacccacccggaaccctgaggtgagaacgcccaagtcagcaactcagccacaaacaacagaaactaatctccaaactgctcctaaactttgtgcccaaatgagtttactggtgatcgctgccaaaactacgtaatggccagcttctacagtacgtccactccctttctgtctctgcctgaataggagcatgctcagttggtgctgctttcttgttgctgcatctcccctcagattccacctagagctagatgtgtcttaccagatctaatattgactgcctctgcctgtcgcatgagaacattaacaaaagcaattgtattacttcctctgttcgcgactagttggctctgagatactaataggtgtgtgaggctccggatgtttctggaattgatattgaatgatgtgatacaaattgatagtcaatatcaagcagtgaaatatgataataaaggcatttcaaagtctcacttttattgataaaataaaaatcattctactgaacagtccatcttctttatacaatgaccacatcctgaaaagggtgttgctaagctgtaaccgatatgcacttgaaatgatggtaagttaattttgattcagaatgtgttatttgtcacaaataaacataataaa

SEQ ID NO: 158542 - DNA, 1955 bp, Homo sapiens
  Payload ID: 11029
  Gene Symbol: NRG1
  Gene Name: neuregulin 1
  Uniprot ID: Q02297
  ENST ID: ENST00000520407
  CDS Start-End: 231-1499
ttttttttgcccttatacctcttcgcctttctgtggttccatccacttcttccccctcctcctcccataaacaactctcctacccctgcacccccaataaataaataaaaggaggagggcaaggggggaggaggaggagtggtgctgcgaggggaaggaaaagggaggcagcgcgagagagccgggcagagtccgaaccgacagccagaagcccgcacgcacctcgcaccatgagatggcgacgcgccccgcgccgctccgggcgtcccggcccccgggcccagcgccccggctccgccgcccgctcgtcgccgccgctgccgctgctgccactactgctgctgctggggaccgcggccctggcgccgggggcggcggccggcaacgaggcggctcccgcgggggcctcggtgtgctactcgtccccgcccagcgtgggatcggtgcaggagctagctcagcgcgccgcggtggtgatcgagggaaaggtgcacccgcagcggcggcagcagggggcactcgacaggaaggcggcggcggcggcgggcgaggcaggggcgtggggcggcgatcgcgagccgccagccgcgggcccacgggcgctggggccgcccgccgaggagccgctgctcgccgccaacgggaccgtgccctcttggcccaccgccccggtgcccagcgccggcgagcccggggaggaggcgccctatctggtgaaggtgcaccaggtgtgggcggtgaaagccgggggcttgaagaaggactcgctgctcaccgtgcgcctggggacctggggccaccccgccttcccctcctgcgggaggctcaaggaggacagcaggtacatcttcttcatggagcccgacgccaacagcaccagccgcgcgccggccgccttccgagcctctttcccccctctggagacgggccggaacctcaagaaggaggtcagccgggtgctgtgcaagcggtgcgccttgcctccccgattgaaagagatgaaaagccaggaatcggctgcaggttccaaactagtccttcggtgtgaaaccagttctgaatactcctctctcagattcaagtggttcaagaatgggaatgaattgaatcgaaaaaacaaaccacaaaatatcaagatacaaaaaaagccagggaagtcagaacttcgcattaacaaagcatcactggctgattctggagagtatatgtgcaaagtgatcagcaaattaggaaatgacagtgcctctgccaatatcaccatcgtggaatcaaacgctacatctacatccaccactgggacaagccatcttgtaaaatgtgcggagaaggagaaaactttctgtgtgaatggaggggagtgcttcatggtgaaagacctttcaaacccctcgagatacttgtgcaagtgcccaaatgagtttactggtgatcgctgccaaaactacgtaatggccagcttctacagtacgtccactccctttctgtctctgcctgaataggagcatgctcagttggtgctgctttcttgttgctgcatctcccctcagattccacctagagctagatgtgtcttaccagatctaatattgactgcctctgcctgtcgcatgagaacattaacaaaagcaattgtattacttcctctgttcgcgactagttggctctgagatactaataggtgtgtgaggctccggatgtttctggaattgatattgaatgatgtgatacaaattgatagtcaatatcaagcagtgaaatatgataataaaggcatttcaaagtctcacttttattgataaaataaaaatcattctactgaacagtccatcttctttatacaatgaccacatcctgaaaagggtgttgctaagctgtaaccgatatgcacttgaaatgatggtaagttaattttgattcagaatgtgttatttgtcacaaataaacataataaaagg

SEQ ID NO: 158543 - DNA, 2401 bp, Homo sapiens
  Payload ID: 11029
  Gene Symbol: NRG1
  Gene Name: neuregulin 1
  ENST ID: ENST00000539990
  CDS Start-End: 171-1097
ctctttctgctcagcttctgctccagagcttcatcttcaggaaccacctaagcatttttttccccagtaggagttcagtctgctcattatacctaattgcaaaggagctatattcagagcaagaataataatttcagattttttaactggacttcaaagagcaggaaagtatgcagattcctaaacacataagcattgaagatattacagctacatctacatccaccactgggacaagccatcttgtaaaatgtgcggagaaggagaaaactttctgtgtgaatggaggggagtgcttcatggtgaaagacctttcaaacccctcgagatacttgtgcaagtgccaacctggattcactggagcaagatgtactgagaatgtgcccatgaaagtccaaaaccaagaaaaggcggaggagctgtaccagaagagagtgctgaccataaccggcatctgcatcgccctccttgtggtcggcatcatgtgtgtggtggcctactgcaaaaccaagaaacagcggaaaaagctgcatgaccgtcttcggcagagccttcggtctgaacgaaacaatatgatgaacattgccaatgggcctcaccatcctaacccaccccccgagaatgtccagctggtgaatcaatacgtatctaaaaacgtcatctccagtgagcatattgttgagagagaagcagagacatccttttccaccagtcactatacttccacagcccatcactccactactgtcacccagactcctagccacagctggagcaacggacacactgaaagcatcctttccgaaagccactctgtaatcgtgatgtcatccgtagaaaacagtaggcacagcagcccaactgggggcccaagaggacgtcttaatggcacaggaggccctcgtgaatgtaacagcttcctcaggcatgccagagaaacccctgattcctaccgagactctcctcatagtgaaagacataaccttatagctgagctaaggagaaacaaggcacacagatccaaatgcatgcagatccagctatcagcaactcatcttagatcttcttccattccccatttgggcttcattctctaagaccccttggcctttaggaaggtatgtgtcagccatgaccaccccggctcgtatgtcacctgtagatttccacacgccaagctcccccaaatcgcccccttcggaaatgtctccacccgtgtccagcatgacggtgtccatgccttccatggcggtcagccccttcatggaagaagagagacctctacttctcgtgacaccaccaaggctgcgggagaagaagtttgaccatcaccctcagcagttcagctccttccaccacaaccccgcgcatgacagtaacagcctccctgctagccccttgaggatagtggaggatgaggagtatgaaacgacccaagagtacgagccagcccaagagcctgttaagaaactcgccaatagccggcgggccaaaagaaccaagcccaatggccacattgctaacagattggaagtggacagcaacacaagctcccagagcagtaactcagagagtgaaacagaagatgaaagagtaggtgaagatacgcctttcctgggcatacagaaccccctggcagccagtcttgaggcaacacctgccttccgcctggctgacagcaggactaacccagcaggccgcttctcgacacaggaagaaatccaggccaggctgtctagtgtaattgctaaccaagaccctattgctgtataaaacctaaataaacacatagattcacctgtaaaactttattttatataataaagtattccaccttaaattaaacaatttattttattttagcagttctgcaaatagaaaacaggaaaaaaacttttataaattaaatatatgtatgtaaaaatgtgttatgtgccatatgtagcaattttttacagtatttcaaaacgagaaagatatcaatggtgcctttatgttatgttatgtcgagagcaagttttgtacagttacagtgattgcttttccacagtatttctgcaaaacctctcatagattcagtttttgctggcttcttgtgcattgcattatgatgttgactggatgtatgatttgcaagacttgcaactgtccctctgtttgcttgtagtagcacccgatcagtatgtcttgtaatggcacatccatccagatatgcctctcttgtgtatgaagttttctttgctttcagaatatgaaatgagttgtgtctactctgccagccaaaggtttgcctcattgggctctgagataatagtagatccaacagcatgctactattaaatacagcaagaaactgcattaagtaatgttaaatattaggaagaaagtaatactgtgattt

SEQ ID NO: 158544 - DNA, 762 bp, Homo sapiens
  Payload ID: 11029
  Gene Symbol: NRG1
  Gene Name: neuregulin 1
  ENST ID: ENST00000614767
  CDS Start-End: 1-762
atgagatggcgacgcgccccgcgccgctccgggcgtcccggcccccgggcccagcgccccggctccgccgcccgctcgtcgccgccgctgccgctgctgccactactgctgctgctggggaccgcggccctggcgccgggggcggcggccggcaacgaggcggctcccgcgggggcctcggtgtgctactcgtccccgcccagcgtgggatcggtgcaggagctagctcagcgcgccgcggtggtgatcgagggaaaggtgcacccgcagcggcggcagcagggggcactcgacaggaaggcggcggcggcggcgggcgaggcaggggcgtggggcggcgatcgcgagccgccagccgcgggcccacgggcgctggggccgcccgccgaggagccgctgctcgccgccaacgggaccgtgccctcttggcccaccgccccggtgcccagcgccggcgagcccggggaggaggcgccctatctggtgaaggtgcaccaggtgtgggcggtgaaagccgggggcttgaagaaggactcgctgctcaccgtgcgcctggggacctggggccaccccgccttcccctcctgcgggaggctcaaggaggacagcaggtacatcttcttcatggagcccgacgccaacagcaccagccgcgcgccggccgccttccgagcctctttcccccctctggagacgggccggaacctcaagaaggaggtcagccgggtgctgtgcaagcggtgcgcttttccccctggtctt

SEQ ID NO: 158545 - DNA, 623 bp, Homo sapiens
  Payload ID: 11029
  Gene Symbol: NRG1
  Gene Name: neuregulin 1
  ENST ID: ENST00000631040
  CDS Start-End: 44-623
tgtcaattcttctacggagttttaacctacactcaatggatgcatgaaaaaaagaaatgaaatgatttttttagctactttaaaaaataaagccttgcctccccgattgaaagagatgaaaagccaggaatcggctgcaggttccaaactagtccttcggtgtgaaaccagttctgaatactcctctctcagattcaagtggttcaagaatgggaatgaattgaatcgaaaaaacaaaccacaaaatatcaagatacaaaaaaagccagggaagtcagaacttcgcattaacaaagcatcactggctgattctggagagtatatgtgcaaagtgatcagcaaattaggaaatgacagtgcctctgccaatatcaccatcgtggaatcaaacgagatcatcactggtatgccagcctcaactgaaggagcatatgtgtcttcagagtctcccattagaatatcagtatccacagaaggagcaaatacttcttcatctacatctacatccaccactgggacaagccatcttgtaaaatgtgcggagaaggagaaaactttctgtgtgaatggaggggagtgcttcatggtgaaagacctttcaaacccctcgagatacttgtgca

SEQ ID NO: 158546 - DNA, 2535 bp, Homo sapiens
  Payload ID: 11030
  Gene Symbol: NRG2
  Gene Name: neuregulin 2
  Uniprot ID: O14511
  ENST ID: ENST00000289409
  CDS Start-End: 1-2535
atgcggcaggtttgctgctcagcgctgccgccgccgccactggagaagggtcggtgcagcagctacagcgacagcagcagcagcagcagcgagaggagcagcagcagcagcagcagcagcagcgagagcggcagcagcagcaggagcagcagcaacaacagcagcatctctcgtcccgctgcgcccccagagccgcggccgcagcaacagccgcagccccgcagccccgcagcccggagagccgccgcccgttcgcgagccgcagccgccggcggcatgaggcgcgacccggcccccggcttctccatgctgctcttcggtgtgtcgctcgcctgctactcgcccagcctcaagtcagtgcaggaccaggcgtacaaggcacccgtggtggtggagggcaaggtacaggggctggtcccagccggcggctccagctccaacagcacccgagagccgcccgcctcgggtcgggtggcgttggtaaaggtgctggacaagtggccgctccggagcggggggctgcagcgcgagcaggtgatcagcgtgggctcctgtgtgccgctcgaaaggaaccagcgctacatctttttcctggagcccacggaacagcccttagtctttaagacggcctttgcccccctcgataccaacggcaaaaatctcaagaaagaggtgggcaagatcctgtgcactgactgcgccacccggcccaagttgaagaagatgaagagccagacgggacaggtgggtgagaagcaatcgctgaagtgtgaggcagcagccggtaatccccagccttcctaccgttggttcaaggatggcaaggagctcaaccgcagccgagacattcgcatcaaatatggcaacggcagaaagaactcacgactacagttcaacaaggtgaaggtggaggacgctggggagtatgtctgcgaggccgagaacatcctggggaaggacaccgtccggggccggctttacgtcaacagcgtgagcaccaccctgtcatcctggtcggggcacgcccggaagtgcaacgagacagccaagtcctattgcgtcaatggaggcgtctgctactacatcgagggcatcaaccagctctcctgcaagtgtcctgtgggatacaccggggacaggtgtcagcagttcgcaatggtcaacttctccaaagccgaggagctgtaccagaagagggtcctgaccatcacgggcatctgcgtggctctgctggtcgtgggcatcgtctgtgtggtggcctactgcaagaccaaaaaacagcggaagcagatgcacaaccacctccggcagaacatgtgcccggcccatcagaaccggagcttggccaatgggcccagccacccccggctggacccagaggagatccagatggcagattatatttccaagaacgtgccagccacagaccatgtcatcaggagagaaactgagaccaccttctctgggagccactcctgttctccttctcaccactgctccacagccacacccacctccagccacagacacgagagccacacgtggagcctggaacgttctgagagcctgacttctgactcccagtcggggatcatgctatcatcagtgggtaccagcaaatgcaacagcccagcatgtgtggaggcccgggcaaggcgggcagcagcctacaacctggaggagcggcgcagggccaccgcgccaccctatcacgattccgtggactcccttcgcgactccccacacagcgagaggtacgtgtcggccctgaccacgcccgcgcgcctctcgcccgtggacttccactactcgctggccacgcaggtgccaactttcgagatcacgtcccccaactcggcgcacgccgtgtcgctgccgccggcggcgcccatcagttaccgcctggccgagcagcagccgttactgcggcacccggcgccccccggcccgggacccggacccgggcccgggcccgggcccggcgcagacatgcagcgcagctatgacagctactattaccccgcggcggggcccggaccgcggcgcgggacctgcgcgctcggcggcagcctgggcagcctgcctgccagccccttccgcatccccgaggacgacgagtacgagaccacgcaggagtgcgcgcccccgccgccgccgcggccgcgcgcgcgcggtgcgtcccgcaggacgtcggcggggccccggcgctggcgccgctcgcgcctcaacgggctggcggcgcagcgcgcacgggcggcgagggactcgctgtcgctgagcagcggctcgggcggcggctcagcctcggcgtcggacgacgacgcggacgacgcggacggggcgctggcggccgagagcacacctttcctgggcctgcgtggggcgcacgacgcgctgcgctcggactcgccgccactgtgcccggcggccgacagcaggacttactactcactggacagccacagcacgcgggccagcagcagacacagccgcgggccgcccccgcgggccaagcaggactcggcgccactctag

SEQ ID NO: 158547 - DNA, 2923 bp, Homo sapiens
  Payload ID: 11030
  Gene Symbol: NRG2
  Gene Name: neuregulin 2
  Uniprot ID: O14511
  ENST ID: ENST00000289422
  CDS Start-End: 79-2655
cggttttccagcgggctctgtttcccctcccaaggcggcggcggctgagcggcggagccccccaaatggcctggccagatgcggcaggtttgctgctcagcgctgccgccgccgccactggagaagggtcggtgcagcagctacagcgacagcagcagcagcagcagcgagaggagcagcagcagcagcagcagcagcagcgagagcggcagcagcagcaggagcagcagcaacaacagcagcatctctcgtcccgctgcgcccccagagccgcggccgcagcaacagccgcagccccgcagccccgcagcccggagagccgccgcccgttcgcgagccgcagccgccggcggcatgaggcgcgacccggcccccggcttctccatgctgctcttcggtgtgtcgctcgcctgctactcgcccagcctcaagtcagtgcaggaccaggcgtacaaggcacccgtggtggtggagggcaaggtacaggggctggtcccagccggcggctccagctccaacagcacccgagagccgcccgcctcgggtcgggtggcgttggtaaaggtgctggacaagtggccgctccggagcggggggctgcagcgcgagcaggtgatcagcgtgggctcctgtgtgccgctcgaaaggaaccagcgctacatctttttcctggagcccacggaacagcccttagtctttaagacggcctttgcccccctcgataccaacggcaaaaatctcaagaaagaggtgggcaagatcctgtgcactgactgcgccacccggcccaagttgaagaagatgaagagccagacgggacaggtgggtgagaagcaatcgctgaagtgtgaggcagcagccggtaatccccagccttcctaccgttggttcaaggatggcaaggagctcaaccgcagccgagacattcgcatcaaatatggcaacggcagaaagaactcacgactacagttcaacaaggtgaaggtggaggacgctggggagtatgtctgcgaggccgagaacatcctggggaaggacaccgtccggggccggctttacgtcaacagcgtgagcaccaccctgtcatcctggtcggggcacgcccggaagtgcaacgagacagccaagtcctattgcgtcaatggaggcgtctgctactacatcgagggcatcaaccagctctcctgcaaatgtccaaatggattcttcggacagagatgtttggagaaactgcctttgcgattgtacatgccagatcctaagcaaaagcaccttggatttgaattaaaggaagccgaggagctgtaccagaagagggtcctgaccatcacgggcatctgcgtggctctgctggtcgtgggcatcgtctgtgtggtggcctactgcaagaccaaaaaacagcggaagcagatgcacaaccacctccggcagaacatgtgcccggcccatcagaaccggagcttggccaatgggcccagccacccccggctggacccagaggagatccagatggcagattatatttccaagaacgtgccagccacagaccatgtcatcaggagagaaactgagaccaccttctctgggagccactcctgttctccttctcaccactgctccacagccacacccacctccagccacagacacgagagccacacgtggagcctggaacgttctgagagcctgacttctgactcccagtcggggatcatgctatcatcagtgggtaccagcaaatgcaacagcccagcatgtgtggaggcccgggcaaggcgggcagcagcctacaacctggaggagcggcgcagggccaccgcgccaccctatcacgattccgtggactcccttcgcgactccccacacagcgagaggtacgtgtcggccctgaccacgcccgcgcgcctctcgcccgtggacttccactactcgctggccacgcaggtgccaactttcgagatcacgtcccccaactcggcgcacgccgtgtcgctgccgccggcggcgcccatcagttaccgcctggccgagcagcagccgttactgcggcacccggcgccccccggcccgggacccggacccgggcccgggcccgggcccggcgcagacatgcagcgcagctatgacagctactattaccccgcggcggggcccggaccgcggcgcgggacctgcgcgctcggcggcagcctgggcagcctgcctgccagccccttccgcatccccgaggacgacgagtacgagaccacgcaggagtgcgcgcccccgccgccgccgcggccgcgcgcgcgcggtgcgtcccgcaggacgtcggcggggccccggcgctggcgccgctcgcgcctcaacgggctggcggcgcagcgcgcacgggcggcgagggactcgctgtcgctgagcagcggctcgggcggcggctcagcctcggcgtcggacgacgacgcggacgacgcggacggggcgctggcggccgagagcacacctttcctgggcctgcgtggggcgcacgacgcgctgcgctcggactcgccgccactgtgcccggcggccgacagcaggacttactactcactggacagccacagcacgcgggccagcagcagacacagccgcgggccgcccccgcgggccaagcaggactcggcgccactctagggccccgccgcgcgcccctccgccccgcccgccccactatctttaaggagaccagagaccgcctactggagagaaaggaggaaaaaagaaataaaaatatttttattttctataaaaggaaaaaagtataacaaaatgttttattttcattttagcaaaaattgtcttataatactagctaacggcaaaggcgtttttatagggaaactatttatatgtaacatcctgatttacagcttcggaaaaaaaaaagaaacaacaaaaaaaa

SEQ ID NO: 158548 - DNA, 1944 bp, Homo sapiens
  Payload ID: 11030
  Gene Symbol: NRG2
  Gene Name: neuregulin 2
  Uniprot ID: O14511
  ENST ID: ENST00000340391
  CDS Start-End: 1-1944
atgtcggagtccaggaggaggggccgcggccgcggcaagaagcacccagaggggaggaagcgggagagggagcccgatcccggggagaaagccacccggcccaagttgaagaagatgaagagccagacgggacaggtgggtgagaagcaatcgctgaagtgtgaggcagcagccggtaatccccagccttcctaccgttggttcaaggatggcaaggagctcaaccgcagccgagacattcgcatcaaatatggcaacggcagaaagaactcacgactacagttcaacaaggtgaaggtggaggacgctggggagtatgtctgcgaggccgagaacatcctggggaaggacaccgtccggggccggctttacgtcaacagcgtgagcaccaccctgtcatcctggtcggggcacgcccggaagtgcaacgagacagccaagtcctattgcgtcaatggaggcgtctgctactacatcgagggcatcaaccagctctcctgcaaatgtccaaatggattcttcggacagagatgtttggagaaactgcctttgcgattgtacatgccagatcctaagcaaaaagccgaggagctgtaccagaagagggtcctgaccatcacgggcatctgcgtggctctgctggtcgtgggcatcgtctgtgtggtggcctactgcaagaccaaaaaacagcggaagcagatgcacaaccacctccggcagaacatgtgcccggcccatcagaaccggagcttggccaatgggcccagccacccccggctggacccagaggagatccagatggcagattatatttccaagaacgtgccagccacagaccatgtcatcaggagagaaactgagaccaccttctctgggagccactcctgttctccttctcaccactgctccacagccacacccacctccagccacagacacgagagccacacgtggagcctggaacgttctgagagcctgacttctgactcccagtcggggatcatgctatcatcagtgggtaccagcaaatgcaacagcccagcatgtgtggaggcccgggcaaggcgggcagcagcctacaacctggaggagcggcgcagggccaccgcgccaccctatcacgattccgtggactcccttcgcgactccccacacagcgagaggtacgtgtcggccctgaccacgcccgcgcgcctctcgcccgtggacttccactactcgctggccacgcaggtgccaactttcgagatcacgtcccccaactcggcgcacgccgtgtcgctgccgccggcggcgcccatcagttaccgcctggccgagcagcagccgttactgcggcacccggcgccccccggcccgggacccggacccgggcccgggcccgggcccggcgcagacatgcagcgcagctatgacagctactattaccccgcggcggggcccggaccgcggcgcgggacctgcgcgctcggcggcagcctgggcagcctgcctgccagccccttccgcatccccgaggacgacgagtacgagaccacgcaggagtgcgcgcccccgccgccgccgcggccgcgcgcgcgcggtgcgtcccgcaggacgtcggcggggccccggcgctggcgccgctcgcgcctcaacgggctggcggcgcagcgcgcacgggcggcgagggactcgctgtcgctgagcagcggctcgggcggcggctcagcctcggcgtcggacgacgacgcggacgacgcggacggggcgctggcggccgagagcacacctttcctgggcctgcgtggggcgcacgacgcgctgcgctcggactcgccgccactgtgcccggcggccgacagcaggacttactactcactggacagccacagcacgcgggccagcagcagacacagccgcgggccgcccccgcgggccaagcaggactcggcgccactctag

SEQ ID NO: 158549 - DNA, 2559 bp, Homo sapiens
  Payload ID: 11030
  Gene Symbol: NRG2
  Gene Name: neuregulin 2
  Uniprot ID: O14511
  ENST ID: ENST00000358522
  CDS Start-End: 1-2559
atgcggcaggtttgctgctcagcgctgccgccgccgccactggagaagggtcggtgcagcagctacagcgacagcagcagcagcagcagcgagaggagcagcagcagcagcagcagcagcagcgagagcggcagcagcagcaggagcagcagcaacaacagcagcatctctcgtcccgctgcgcccccagagccgcggccgcagcaacagccgcagccccgcagccccgcagcccggagagccgccgcccgttcgcgagccgcagccgccggcggcatgaggcgcgacccggcccccggcttctccatgctgctcttcggtgtgtcgctcgcctgctactcgcccagcctcaagtcagtgcaggaccaggcgtacaaggcacccgtggtggtggagggcaaggtacaggggctggtcccagccggcggctccagctccaacagcacccgagagccgcccgcctcgggtcgggtggcgttggtaaaggtgctggacaagtggccgctccggagcggggggctgcagcgcgagcaggtgatcagcgtgggctcctgtgtgccgctcgaaaggaaccagcgctacatctttttcctggagcccacggaacagcccttagtctttaagacggcctttgcccccctcgataccaacggcaaaaatctcaagaaagaggtgggcaagatcctgtgcactgactgcgccacccggcccaagttgaagaagatgaagagccagacgggacaggtgggtgagaagcaatcgctgaagtgtgaggcagcagccggtaatccccagccttcctaccgttggttcaaggatggcaaggagctcaaccgcagccgagacattcgcatcaaatatggcaacggcagaaagaactcacgactacagttcaacaaggtgaaggtggaggacgctggggagtatgtctgcgaggccgagaacatcctggggaaggacaccgtccggggccggctttacgtcaacagcgtgagcaccaccctgtcatcctggtcggggcacgcccggaagtgcaacgagacagccaagtcctattgcgtcaatggaggcgtctgctactacatcgagggcatcaaccagctctcctgcaagtgtcctgtgggatacaccggggacaggtgtcagcagttcgcaatggtcaacttctccaagcaccttggatttgaattaaaggaagccgaggagctgtaccagaagagggtcctgaccatcacgggcatctgcgtggctctgctggtcgtgggcatcgtctgtgtggtggcctactgcaagaccaaaaaacagcggaagcagatgcacaaccacctccggcagaacatgtgcccggcccatcagaaccggagcttggccaatgggcccagccacccccggctggacccagaggagatccagatggcagattatatttccaagaacgtgccagccacagaccatgtcatcaggagagaaactgagaccaccttctctgggagccactcctgttctccttctcaccactgctccacagccacacccacctccagccacagacacgagagccacacgtggagcctggaacgttctgagagcctgacttctgactcccagtcggggatcatgctatcatcagtgggtaccagcaaatgcaacagcccagcatgtgtggaggcccgggcaaggcgggcagcagcctacaacctggaggagcggcgcagggccaccgcgccaccctatcacgattccgtggactcccttcgcgactccccacacagcgagaggtacgtgtcggccctgaccacgcccgcgcgcctctcgcccgtggacttccactactcgctggccacgcaggtgccaactttcgagatcacgtcccccaactcggcgcacgccgtgtcgctgccgccggcggcgcccatcagttaccgcctggccgagcagcagccgttactgcggcacccggcgccccccggcccgggacccggacccgggcccgggcccgggcccggcgcagacatgcagcgcagctatgacagctactattaccccgcggcggggcccggaccgcggcgcgggacctgcgcgctcggcggcagcctgggcagcctgcctgccagccccttccgcatccccgaggacgacgagtacgagaccacgcaggagtgcgcgcccccgccgccgccgcggccgcgcgcgcgcggtgcgtcccgcaggacgtcggcggggccccggcgctggcgccgctcgcgcctcaacgggctggcggcgcagcgcgcacgggcggcgagggactcgctgtcgctgagcagcggctcgggcggcggctcagcctcggcgtcggacgacgacgcggacgacgcggacggggcgctggcggccgagagcacacctttcctgggcctgcgtggggcgcacgacgcgctgcgctcggactcgccgccactgtgcccggcggccgacagcaggacttactactcactggacagccacagcacgcgggccagcagcagacacagccgcgggccgcccccgcgggccaagcaggactcggcgccactctag

SEQ ID NO: 158550 - DNA, 3020 bp, Homo sapiens
  Payload ID: 11030
  Gene Symbol: NRG2
  Gene Name: neuregulin 2
  Uniprot ID: O14511
  ENST ID: ENST00000361474
  CDS Start-End: 226-2778
cctccaggtcctggcgcacagggtgggagcgctgcgctgcgccgcgctgcgcatcgcggcccgcttgccgcctgccccctgccctagctgggccacctccccgggctgccggtggagggctaagaggcgctaacgttacgctgtttccggttttccagcgggctctgtttcccctcccaaggcggcggcggctgagcggcggagccccccaaatggcctggccagatgcggcaggtttgctgctcagcgctgccgccgccgccactggagaagggtcggtgcagcagctacagcgacagcagcagcagcagcagcgagaggagcagcagcagcagcagcagcagcagcgagagcggcagcagcagcaggagcagcagcaacaacagcagcatctctcgtcccgctgcgcccccagagccgcggccgcagcaacagccgcagccccgcagccccgcagcccggagagccgccgcccgttcgcgagccgcagccgccggcggcatgaggcgcgacccggcccccggcttctccatgctgctcttcggtgtgtcgctcgcctgctactcgcccagcctcaagtcagtgcaggaccaggcgtacaaggcacccgtggtggtggagggcaaggtacaggggctggtcccagccggcggctccagctccaacagcacccgagagccgcccgcctcgggtcgggtggcgttggtaaaggtgctggacaagtggccgctccggagcggggggctgcagcgcgagcaggtgatcagcgtgggctcctgtgtgccgctcgaaaggaaccagcgctacatctttttcctggagcccacggaacagcccttagtctttaagacggcctttgcccccctcgataccaacggcaaaaatctcaagaaagaggtgggcaagatcctgtgcactgactgcgccacccggcccaagttgaagaagatgaagagccagacgggacaggtgggtgagaagcaatcgctgaagtgtgaggcagcagccggtaatccccagccttcctaccgttggttcaaggatggcaaggagctcaaccgcagccgagacattcgcatcaaatatggcaacggcagaaagaactcacgactacagttcaacaaggtgaaggtggaggacgctggggagtatgtctgcgaggccgagaacatcctggggaaggacaccgtccggggccggctttacgtcaacagcgtgagcaccaccctgtcatcctggtcggggcacgcccggaagtgcaacgagacagccaagtcctattgcgtcaatggaggcgtctgctactacatcgagggcatcaaccagctctcctgcaaatgtccaaatggattcttcggacagagatgtttggagaaactgcctttgcgattgtacatgccagatcctaagcaaaaagccgaggagctgtaccagaagagggtcctgaccatcacgggcatctgcgtggctctgctggtcgtgggcatcgtctgtgtggtggcctactgcaagaccaaaaaacagcggaagcagatgcacaaccacctccggcagaacatgtgcccggcccatcagaaccggagcttggccaatgggcccagccacccccggctggacccagaggagatccagatggcagattatatttccaagaacgtgccagccacagaccatgtcatcaggagagaaactgagaccaccttctctgggagccactcctgttctccttctcaccactgctccacagccacacccacctccagccacagacacgagagccacacgtggagcctggaacgttctgagagcctgacttctgactcccagtcggggatcatgctatcatcagtgggtaccagcaaatgcaacagcccagcatgtgtggaggcccgggcaaggcgggcagcagcctacaacctggaggagcggcgcagggccaccgcgccaccctatcacgattccgtggactcccttcgcgactccccacacagcgagaggtacgtgtcggccctgaccacgcccgcgcgcctctcgcccgtggacttccactactcgctggccacgcaggtgccaactttcgagatcacgtcccccaactcggcgcacgccgtgtcgctgccgccggcggcgcccatcagttaccgcctggccgagcagcagccgttactgcggcacccggcgccccccggcccgggacccggacccgggcccgggcccgggcccggcgcagacatgcagcgcagctatgacagctactattaccccgcggcggggcccggaccgcggcgcgggacctgcgcgctcggcggcagcctgggcagcctgcctgccagccccttccgcatccccgaggacgacgagtacgagaccacgcaggagtgcgcgcccccgccgccgccgcggccgcgcgcgcgcggtgcgtcccgcaggacgtcggcggggccccggcgctggcgccgctcgcgcctcaacgggctggcggcgcagcgcgcacgggcggcgagggactcgctgtcgctgagcagcggctcgggcggcggctcagcctcggcgtcggacgacgacgcggacgacgcggacggggcgctggcggccgagagcacacctttcctgggcctgcgtggggcgcacgacgcgctgcgctcggactcgccgccactgtgcccggcggccgacagcaggacttactactcactggacagccacagcacgcgggccagcagcagacacagccgcgggccgcccccgcgggccaagcaggactcggcgccactctagggccccgccgcgcgcccctccgccccgcccgccccactatctttaaggagaccagagaccgcctactggagagaaaggaggaaaaaagaaataaaaatatttttattttctataaaaggaaaaaagtataacaaaatgttttattttcattttagcaaaaattgtcttataatactagctaacggcaaaggcgtttttatagggaaactatttatatgtaacatcctgatttacagcttcgg

SEQ ID NO: 158551 - DNA, 1682 bp, Homo sapiens
  Payload ID: 11030
  Gene Symbol: NRG2
  Gene Name: neuregulin 2
  Uniprot ID: O14511
  ENST ID: ENST00000378238
  CDS Start-End: 1-1281
atgcggcaggtttgctgctcagcgctgccgccgccgccactggagaagggtcggtgcagcagctacagcgacagcagcagcagcagcagcgagaggagcagcagcagcagcagcagcagcagcgagagcggcagcagcagcaggagcagcagcaacaacagcagcatctctcgtcccgctgcgcccccagagccgcggccgcagcaacagccgcagccccgcagccccgcagcccggagagccgccgcccgttcgcgagccgcagccgccggcggcatgaggcgcgacccggcccccggcttctccatgctgctcttcggtgtgtcgctcgcctgctactcgcccagcctcaagtcagtgcaggaccaggcgtacaaggcacccgtggtggtggagggcaaggtacaggggctggtcccagccggcggctccagctccaacagcacccgagagccgcccgcctcgggtcgggtggcgttggtaaaggtgctggacaagtggccgctccggagcggggggctgcagcgcgagcaggtgatcagcgtgggctcctgtgtgccgctcgaaaggaaccagcgctacatctttttcctggagcccacggaacagcccttagtctttaagacggcctttgcccccctcgataccaacggcaaaaatctcaagaaagaggtgggcaagatcctgtgcactgactgcgccacccggcccaagttgaagaagatgaagagccagacgggacaggtgggtgagaagcaatcgctgaagtgtgaggcagcagccggtaatccccagccttcctaccgttggttcaaggatggcaaggagctcaaccgcagccgagacattcgcatcaaatatggcaacggcagaaagaactcacgactacagttcaacaaggtgaaggtggaggacgctggggagtatgtctgcgaggccgagaacatcctggggaaggacaccgtccggggccggctttacgtcaacagcgtgagcaccaccctgtcatcctggtcggggcacgcccggaagtgcaacgagacagccaagtcctattgcgtcaatggaggcgtctgctactacatcgagggcatcaaccagctctcctgcaaatgtccaaatggattcttcggacagagatgtttggagaaactgcctttgcgattgtacatgccagatcctaagcaaagtgtcctgtgggatacaccggggacaggtgtcagcagttcgcaatggtcaacttctccaaagccgaggagctgtaccagaagagggtcctgaccatcacgggcatctgcgtggctctgctggtcgtgggcatcgtctgtgtggtggcctactgcaagaccaaaaaacagcggaagcagatgcacaaccacctccggcagaacatgtgcccggcccatcagaaccggagcttggccaatgggcccagccacccccggctggacccagaggagatccagatggcagattatatttccaagaacgtgccagccacagaccatgtcatcaggagagaaactgagaccaccttctctgggagccactcctgttctccttctcaccactgctccacagccacacccacctccagccacagacacgagagccacacgtggagcctggaacgttctgagagcctgacttctgactcccagtcggggatcatgctatcatca

SEQ ID NO: 158552 - DNA, 3723 bp, Homo sapiens
  Payload ID: 11030
  Gene Symbol: NRG2
  Gene Name: neuregulin 2
  ENST ID: ENST00000541337
  CDS Start-End: 231-2585
atcctcctccaggtcctggcgcacagggtgggagcgctgcgctgcgccgcgctgcgcatcgcggcccgcttgccgcctgccccctgccctagctgggccacctccccgggctgccggtggagggctaagaggcgctaacgttacgctgtttccggttttccagcgggctctgtttcccctcccaaggcggcggcggctgagcggcggagccccccaaatggcctggccagatgcggcaggtttgctgctcagcgctgccgccgccgccactggagaagggtcggtgcagcagctacagcgacagcagcagcagcagcagcgagaggagcagcagcagcagcagcagcagcagcgagagcggcagcagcagcaggagcagcagcaacaacagcagcatctctcgtcccgctgcgcccccagagccgcggccgcagcaacagccgcagccccgcagccccgcagcccggagagccgccgcccgttcgcgagccgcagccgccggcggcatgaggcgcgacccggcccccggcttctccatgctgctcttcggtgtgtcgctcgcctgctactcgcccagcctcaagtcagtgcaggaccaggcgtacaaggcacccgtggtggtggagggcaaggtacaggggctggtcccagccggcggctccagctccaacagcacccgagagccgcccgcctcgggtcgggtggcgttggtaaaggtgctggacaagtggccgctccggagcggggggctgcagcgcgagcaggtgatcagcgtgggctcctgtgtgccgctcgaaaggaaccagcgctacatctttttcctggagcccacggaacagcccttagtctttaagacggcctttgcccccctcgataccaacggcaaaaatctcaagaaagaggtgggcaagatcctgtgcactgactgcgccacccggcccaagttgaagaagatgaagagccagacgggacaggtgggtgagaagcaatcgctgaagtgtgaggcagcagccggtaatccccagccttcctaccgttggttcaaggatggcaaggagctcaaccgcagccgagacattcgcatcaaatatggcaacggcagaaagaactcacgactacagttcaacaaggtgaaggtggaggacgctggggagtatgtctgcgaggccgagaacatcctggggaaggacaccgtccggggccggctttacgtcaacagcgaagccgaggagctgtaccagaagagggtcctgaccatcacgggcatctgcgtggctctgctggtcgtgggcatcgtctgtgtggtggcctactgcaagaccaaaaaacagcggaagcagatgcacaaccacctccggcagaacatgtgcccggcccatcagaaccggagcttggccaatgggcccagccacccccggctggacccagaggagatccagatggcagattatatttccaagaacgtgccagccacagaccatgtcatcaggagagaaactgagaccaccttctctgggagccactcctgttctccttctcaccactgctccacagccacacccacctccagccacagacacgagagccacacgtggagcctggaacgttctgagagcctgacttctgactcccagtcggggatcatgctatcatcagtgggtaccagcaaatgcaacagcccagcatgtgtggaggcccgggcaaggcgggcagcagcctacaacctggaggagcggcgcagggccaccgcgccaccctatcacgattccgtggactcccttcgcgactccccacacagcgagaggtacgtgtcggccctgaccacgcccgcgcgcctctcgcccgtggacttccactactcgctggccacgcaggtgccaactttcgagatcacgtcccccaactcggcgcacgccgtgtcgctgccgccggcggcgcccatcagttaccgcctggccgagcagcagccgttactgcggcacccggcgccccccggcccgggacccggacccgggcccgggcccgggcccggcgcagacatgcagcgcagctatgacagctactattaccccgcggcggggcccggaccgcggcgcgggacctgcgcgctcggcggcagcctgggcagcctgcctgccagccccttccgcatccccgaggacgacgagtacgagaccacgcaggagtgcgcgcccccgccgccgccgcggccgcgcgcgcgcggtgcgtcccgcaggacgtcggcggggccccggcgctggcgccgctcgcgcctcaacgggctggcggcgcagcgcgcacgggcggcgagggactcgctgtcgctgagcagcggctcgggcggcggctcagcctcggcgtcggacgacgacgcggacgacgcggacggggcgctggcggccgagagcacacctttcctgggcctgcgtggggcgcacgacgcgctgcgctcggactcgccgccactgtgcccggcggccgacagcaggacttactactcactggacagccacagcacgcgggccagcagcagacacagccgcgggccgcccccgcgggccaagcaggactcggcgccactctagggccccgccgcgcgcccctccgccccgcccgccccactatctttaaggagaccagagaccgcctactggagagaaaggaggaaaaaagaaataaaaatatttttattttctataaaaggaaaaaagtataacaaaatgttttattttcattttagcaaaaattgtcttataatactagctaacggcaaaggcgtttttatagggaaactatttatatgtaacatcctgatttacagcttcggaaaaaaaaaagaaacaacaaaaaaaaaagagagatgggccaattttttgactctttaatagaaacctattttgtggtgccttttgctgtatgctcatctggggctccgggggacaggtctgggttgtggggtgctgagagtgacagctgggagagaagaggtgcgggttctgttgggggcgagggtggggggcggtggggggttggccctaaggaagaactgaggacggaagtagctttgctcccaggcaagagctgaagttcccgacccctgggaggagagggccaggaccctaggcttggagctggagctggggtaacttccagggggagataaagacacagctacccgaatggggaagccctggctactcacagctgttaaaggagggggggcagagaaacgtttccccaagagcctgagcccagggaggtggcagctctgccaggggcccaatgttggcggctcctgtcccccacagcctccaggacgcccctccgtcctctgcagcaccttcgtttacaggtcgtcttttctattttacacctgcatgtcctttgcatttcagattctttagattggatgcatggtcacgctgggaccgagaagagccactcgacagtgtattccccttttagcaataaagtaacaccatttccttctcacaggctgcctcctagcccccaacccacctatgacatccactcgtctccagtcctgccctcccacccccaaaaactgggtccactgctaatttgtcaaaaaggtaattgtttaaaaaaaaaaaaaatcccaaacagaaacagatgggaatcctgtcctgaaatgtctgaacacctgactgttgacacttgaacatttttatattataaataaaatcagaaataactcctgtt

SEQ ID NO: 158553 - DNA, 2158 bp, Homo sapiens
  Payload ID: 11031
  Gene Symbol: NRG3
  Gene Name: neuregulin 3
  Uniprot ID: P56975
  ENST ID: ENST00000372141
  CDS Start-End: 28-2118
gggcgaaggtgaagaccggctcctaggatgagtgaaggggcggccgctgcctcgccacctggtgccgcttcggcagccgccgcctcggccgaggagggcaccgcggcggctgcggcggcggcagcggcgggcgggggcccggacggcggcggcgaaggggcggccgagcccccccgggagttacgctgtagcgactgcatcgtgtggaaccggcagcagacgtggctgtgcgtggtacctctgttcatcggcttcatcggcctggggctcagcctcatgcttctcaaatggatcgtggtgggctccgtcaaggagtacgtgcccaccgacctagtggactccaaggggatgggccaggaccccttcttcctctccaagcccagctctttccccaaggccatggagaccaccaccactaccacttccaccacgtcccccgccaccccctccgccgggggtgccgcctcctccaggacgcccaaccggattagcactcgcctgaccaccatcacgcgggcgcccactcgcttccccgggcaccgggtgcccatccgggccagcccgcgctccaccacagcacggaacactgcggcccctgcgacggtcccgtccaccacggccccgttcttcagtagcagcacgctgggctcccgacccccggtgccaggaactccaagtacccaggcaatgccctcctggcctactgcggcatacgctacctcctcctaccttcacgattctactccctcctggaccctgtctccctttcaggatgctgcctcctcttcttcctcttcttcctcctccgctaccaccaccacaccagaaactagcaccagccccaaatttcatacgacgacatattccacagagcgatccgagcacttcaaaccctgccgagacaaggaccttgcatactgtctcaatgatggcgagtgctttgtgatcgaaaccctgaccggatcccataaacactgtcggtgcaaagaaggctaccaaggagtccgttgtgatcaatttctgccgaaaactgattccatcttatcggatccaacagaccacttggggattgaattcatggagagtgaagaagtttatcaaaggcaggtgctgtcaatttcatgtatcatctttggaattgtcatcgtgggcatgttctgtgcagcattctacttcaaaagcaagaaacaagctaaacaaatccaagagcagctgaaagtgccacaaaatggtaaaagctacagtctcaaagcatccagcacaatggcaaagtcagagaacttggtgaagagccatgtccagctgcaaaattattcaaaggtggaaaggcatcctgtgactgcattggagaaaatgatggagtcaagttttgtcggcccccagtcattccctgaggtcccttctcctgacagaggaagccagtctgtcaaacaccacaggagtctatcctcttgctgcagcccagggcaaagaagtggcatgctccataggaatgccttcagaaggacacccccgtcaccccgaagtaggctaggtggaattgtgggaccagcatatcagcaactcgaagaatcaaggatcccagaccaggatacgataccttgccaagggtattcatccagtggtttaaaaacccaacgaaatacatcaataaatatgcaactgccttcaagagagacaaacccctattttaatagcttggagcaaaaggacctggtgggctattcatccacaagggccagttctgtgcccatcatcccttcagtgggtttagaggaaacctgcctgcaaatgccagggatttctgaagtcaaaagcatcaaatggtgcaaaaactcctattcagctgacgttgtcaatgtgagtattccagtcagcgattgtcttatagcagaacaacaagaagtgaaaatattgctagaaactgtccaggagcagatccgaattctgactgatgccagacggtcagaagactacgaactggccagcgtagaaaccgaggacagtgcaagcgaaaacacagcctttctccccctgagtcccacagccaaatcagaacgagaggcgcaatttgtcttaagaaatgaaatacaaagagactctgcattgaccaagtgacttgagatgtaggaatctgtgcattctatgctttgctcaa

SEQ ID NO: 158554 - DNA, 3136 bp, Homo sapiens
  Payload ID: 11031
  Gene Symbol: NRG3
  Gene Name: neuregulin 3
  Uniprot ID: P56975
  ENST ID: ENST00000372142
  CDS Start-End: 275-1774
caggaaggagggaaggaaggaatctgccacaaaccagaatggcagtagagccagtaacttgctgcttctctctcctttggctgaagcagtcatttttgagagcacattttcccaggaggtgtttagagcctccactcaacaaatctagcttgtgttttgtagaaggataaaggattcatgagtgtatgtgtgaacatattcaatggattgaaaatgagtctaccctgaagaccccagatttttgatctgctcttttgatgcagttgatagaataatggagtgtggtatacctccaacccttgtatgcgttgggagaggagggggactacacacgatcaatataatcatctggtattattttccttctgcctggaggacttgctttaacatttcaagtagtgtgggtctgctgctgacgaattcatacaaattttatacgacgacatattccacagagcgatccgagcacttcaaaccctgccgagacaaggaccttgcatactgtctcaatgatggcgagtgctttgtgatcgaaaccctgaccggatcccataaacactgtcggtgcaaagaaggctaccaaggagtccgttgtgatcaatttctgccgaaaactgattccatcttatcggatccaacagaccacttggggattgaattcatggagagtgaagaagtttatcaaaggcaggtgctgtcaatttcatgtatcatctttggaattgtcatcgtgggcatgttctgtgcagcattctacttcaaaagcaagaaacaagctaaacaaatccaagagcagctgaaagtgccacaaaatggtaaaagctacagtctcaaagcatccagcacaatggcaaagtcagagaacttggtgaagagccatgtccagctgcaaaattattcaaaggtggaaaggcatcctgtgactgcattggagaaaatgatggagtcaagttttgtcggcccccagtcattccctgaggtcccttctcctgacagaggaagccagtctgtcaaacaccacaggagtctatcctcttgctgcagcccagggcaaagaagtggcatgctccataggaatgccttcagaaggacacccccgtcaccccgaagtaggctaggtggaattgtgggaccagcatatcagcaactcgaagaatcaaggatcccagaccaggatacgataccttgccaagggatagaggtcaggaagactatatcccacctgcctatacagctgtggtgtgttgaaagacccctggacttaaagtattcatccagtggtttaaaaacccaacgaaatacatcaataaatatgcaactgccttcaagagagacaaacccctattttaatagcttggagcaaaaggacctggtgggctattcatccacaagggccagttctgtgcccatcatcccttcagtgggtttagaggaaacctgcctgcaaatgccagggatttctgaagtcaaaagcatcaaatggtgcaaaaactcctattcagctgacgttgtcaatgtgagtattccagtcagcgattgtcttatagcagaacaacaagaagtgaaaatattgctagaaactgtccaggagcagatccgaattctgactgatgccagacggtcagaagactacgaactggccagcgtagaaaccgaggacagtgcaagcgaaaacacagcctttctccccctgagtcccacagccaaatcagaacgagaggcgcaatttgtcttaagaaatgaaatacaaagagactctgcattgaccaagtgacttgagatgtaggaatctgtgcattctatgctttgctcaacaggaaagagaggaaatcaaatacaaattatttatatgcattaatttaagagcatctacttagaagaaaccaaatagtctatcgccctcatatcatagtgttttttaacaaaatatttttttaagggaaagaaatgtttcaggagggataaagcttaccattaaagcttttgggtagaattctgaatccaatttcgtttagtcccaacactgtcctctttggctcttagaagatgtgggcaattcagacccttggccccacagtgccagtgtctcattaaaaaacactggcagttacctggtttcaaaaagaggagagctgcatcccgcaggtggatgcaccagtgagcaggtggctcttgccatttggcttgccagtcccaagccctaaatttctattcacccaatagcctcatcacaggttatgtcatgtcgacacatgtagtgttttctatttgatttttggagaatgccacaaaagactctgcaatgggaaggaggacaggagatagaaggagaaaccgggggcaatcttaactactcttgtgtgccaccttcctctgagatttgaatgcacagatctcagctggaggtatgaaattattacagaaaaagagacaaaaaaatccttatatcgtgtcactaaaatcatgctaatagaaatgtttttccttgagattgtttagaggctctggaggagcgtttctcagtttttgtgtgcctgtgtgcacatgtgtgtgcgagcgtgtgtgtgtgtggacttgctcacgcgggcacatatgctgtaagcacatgtgttcattgtgcgtatgtgtgtgcatgtgtgcgcgtattacgcttgctaaaatttgttctgaaacatcagggaatctactattcagaaaaattatttccctcttagatcttttcactttaaatttttccattaagtataaagttcagttagttcttaaatcaaggtcacttgcatggtggggtcgtataaaactcttgacactgtctagaccattttctgatgtgaatacttttgagaggatcaactattggctcattaatgatatcagtatcataaggtgagttcatcaaggatgtgtgtttattttgaatcatgcctacttaaattattaatacaagacaattaacaaattgacagttaccatttgctttctcatcatcctcattaccatttattttatagcaagtctgctatgtgtggaccaaggcttcggcttctgtggttagtatgggaagaataaattgttgaaataaaaatacccagactattcagttcacaagaagccccccaaaagaacagtaaattgt

SEQ ID NO: 158555 - DNA, 2163 bp, Homo sapiens
  Payload ID: 11031
  Gene Symbol: NRG3
  Gene Name: neuregulin 3
  Uniprot ID: P56975
  ENST ID: ENST00000404547
  CDS Start-End: 1-2163
atgagtgaaggggcggccgctgcctcgccacctggtgccgcttcggcagccgccgcctcggccgaggagggcaccgcggcggctgcggcggcggcagcggcgggcgggggcccggacggcggcggcgaaggggcggccgagcccccccgggagttacgctgtagcgactgcatcgtgtggaaccggcagcagacgtggctgtgcgtggtacctctgttcatcggcttcatcggcctggggctcagcctcatgcttctcaaatggatcgtggtgggctccgtcaaggagtacgtgcccaccgacctagtggactccaaggggatgggccaggaccccttcttcctctccaagcccagctctttccccaaggccatggagaccaccaccactaccacttccaccacgtcccccgccaccccctccgccgggggtgccgcctcctccaggacgcccaaccggattagcactcgcctgaccaccatcacgcgggcgcccactcgcttccccgggcaccgggtgcccatccgggccagcccgcgctccaccacagcacggaacactgcggcccctgcgacggtcccgtccaccacggccccgttcttcagtagcagcacgctgggctcccgacccccggtgccaggaactccaagtacccaggcaatgccctcctggcctactgcggcatacgctacctcctcctaccttcacgattctactccctcctggaccctgtctccctttcaggatgctgcctcctcttcttcctcttcttcctcctccgctaccaccaccacaccagaaactagcaccagccccaaatttcatacgacgacatattccacagagcgatccgagcacttcaaaccctgccgagacaaggaccttgcatactgtctcaatgatggcgagtgctttgtgatcgaaaccctgaccggatcccataaacactgtcggtgcaaagaaggctaccaaggagtccgttgtgatcaatttctgccgaaaactgattccatcttatcggatccaacagaccacttggggattgaattcatggagagtgaagaagtttatcaaaggcaggtgctgtcaatttcatgtatcatctttggaattgtcatcgtgggcatgttctgtgcagcattctacttcaaaagcaagaaacaagctaaacaaatccaagagcagctgaaagtgccacaaaatggtaaaagctacagtctcaaagcatccagcacaatggcaaagtcagagaacttggtgaagagccatgtccagctgcaaaattattcaaaggtggaaaggcatcctgtgactgcattggagaaaatgatggagtcaagttttgtcggcccccagtcattccctgaggtcccttctcctgacagaggaagccagtctgtcaaacaccacaggagtctatcctcttgctgcagcccagggcaaagaagtggcatgctccataggaatgccttcagaaggacacccccgtcaccccgaagtaggctaggtggaattgtgggaccagcatatcagcaactcgaagaatcaaggatcccagaccaggatacgataccttgccaagggatagaggtcaggaagactatatcccacctgcctatacagctgtggtgtgttgaaagacccctggacttaaagtattcatccagtggtttaaaaacccaacgaaatacatcaataaatatgcaactgccttcaagagagacaaacccctattttaatagcttggagcaaaaggacctggtgggctattcatccacaagggccagttctgtgcccatcatcccttcagtgggtttagaggaaacctgcctgcaaatgccagggatttctgaagtcaaaagcatcaaatggtgcaaaaactcctattcagctgacgttgtcaatgtgagtattccagtcagcgattgtcttatagcagaacaacaagaagtgaaaatattgctagaaactgtccaggagcagatccgaattctgactgatgccagacggtcagaagactacgaactggccagcgtagaaaccgaggacagtgcaagcgaaaacacagcctttctccccctgagtcccacagccaaatcagaacgagaggcgcaatttgtcttaagaaatgaaatacaaagagactctgcattgaccaagtga

SEQ ID NO: 158556 - DNA, 1503 bp, Homo sapiens
  Payload ID: 11031
  Gene Symbol: NRG3
  Gene Name: neuregulin 3
  ENST ID: ENST00000404576
  CDS Start-End: 1-1503
atggagtgtggtatacctccaacccttgtatgcgttgggagaggagggggactacacacggtaggggtatttcatgttctttctcaattgatttccttgtgtaccattccggaggtctttaaagaaaagcccaagatcaatataatcatctggtattattttccttctgcctggaggacttgctttaacatttcaagtagtgtgggtctgctgctgacgaattcatacaaattttatacgacgacatattccacagagcgatccgagcacttcaaaccctgccgagacaaggaccttgcatactgtctcaatgatggcgagtgctttgtgatcgaaaccctgaccggatcccataaacactgtcggtgcaaagaaggctaccaaggagtccgttgtgatcaatttctgccgaaaactgattccatcttatcggatccaacagaccacttggggattgaattcatggagagtgaagaagtttatcaaaggcaggtgctgtcaatttcatgtatcatctttggaattgtcatcgtgggcatgttctgtgcagcattctacttcaaaagcaagaaacaagctaaacaaatccaagagcagctgaaagtgccacaaaatggtaaaagctacagtctcaaagcatccagcacaatggcaaagtcagagaacttggtgaagagccatgtccagctgcaaaattattcaaaggtggaaaggcatcctgtgactgcattggagaaaatgatggagtcaagttttgtcggcccccagtcattccctgaggtcccttctcctgacagaggaagccagtctgtcaaacaccacaggagtctatcctcttgctgcagcccagggcaaagaagtggcatgctccataggaatgccttcagaaggacacccccgtcaccccgaagtaggctaggtggaattgtgggaccagcatatcagcaactcgaagaatcaaggatcccagaccaggatacgataccttgccaagggtattcatccagtggtttaaaaacccaacgaaatacatcaataaatatgcaactgccttcaagagagacaaacccctattttaatagcttggagcaaaaggacctggtgggctattcatccacaagggccagttctgtgcccatcatcccttcagtgggtttagaggaaacctgcctgcaaatgccagggatttctgaagtcaaaagcatcaaatggtgcaaaaactcctattcagctgacgttgtcaatgtgagtattccagtcagcgattgtcttatagcagaacaacaagaagtgaaaatattgctagaaactgtccaggagcagatccgaattctgactgatgccagacggtcagaagactacgaactggccagcgtagaaaccgaggacagtgcaagcgaaaacacagcctttctccccctgagtcccacagccaaatcagaacgagaggcgcaatttgtcttaagaaatgaaatacaaagagactctgcattgaccaagtga

SEQ ID NO: 158557 - DNA, 1174 bp, Homo sapiens
  Payload ID: 11031
  Gene Symbol: NRG3
  Gene Name: neuregulin 3
  ENST ID: ENST00000537893
  CDS Start-End: 134-1174
actgtagcagacagtgtctccaggcagggtactgagcaaagaggatagtgaaaagggcagtgaaacatcggcctttttcactggcaacttcaagactcactgcctacaatcagaccacttggggattgaattcatggagagtgaagaagtttatcaaaggcaggtgctgtcaatttcatgtatcatctttggaattgtcatcgtgggcatgttctgtgcagcattctacttcaaaagcaagaaacaagctaaacaaatccaagagcagctgaaagtgccacaaaatggtaaaagctacagtctcaaagcatccagcacaatggcaaagtcagagaacttggtgaagagccatgtccagctgcaaaattattcaaaggtggaaaggcatcctgtgactgcattggagaaaatgatggagtcaagttttgtcggcccccagtcattccctgaggtcccttctcctgacagaggaagccagtctgtcaaacaccacaggagtctatcctcttgctgcagcccagggcaaagaagtggcatgctccataggaatgccttcagaaggacacccccgtcaccccgaagtaggctaggtggaattgtgggaccagcatatcagcaactcgaagaatcaaggatcccagaccaggatacgataccttgccaagggtattcatccagtggtttaaaaacccaacgaaatacatcaataaatatgcaactgccttcaagagagacaaacccctattttaatagcttggagcaaaaggacctggtgggctattcatccacaagggccagttctgtgcccatcatcccttcagtgggtttagaggaaacctgcctgcaaatgccagggatttctgaagtcaaaagcatcaaatggtgcaaaaactcctattcagctgacgttgtcaatgtgagtattccagtcagcgattgtcttatagcagaacaacaagaagtgaaaatattgctagaaactgtccaggagcagatccgaattctgactgatgccagacggtcagaagactacgaactggccagcgtagaaaccgaggacagtgcaagcgaaaacacagcctttctccccctgagtcccacagccaaatcagaacgagaggcgcaatttgtcttaagaaatgaaatacaaagagactctgcattgaccaagtga

SEQ ID NO: 158558 - DNA, 2713 bp, Homo sapiens
  Payload ID: 11031
  Gene Symbol: NRG3
  Gene Name: neuregulin 3
  ENST ID: ENST00000545131
  CDS Start-End: 99-1139
ggtgcaaagaaggctaccaaggagtccgttgtgatcaatttctgccgaaaactgattccatcttatcggatccaacagaccacttggggattgaattcatggagagtgaagaagtttatcaaaggcaggtgctgtcaatttcatgtatcatctttggaattgtcatcgtgggcatgttctgtgcagcattctacttcaaaagcaagaaacaagctaaacaaatccaagagcagctgaaagtgccacaaaatggtaaaagctacagtctcaaagcatccagcacaatggcaaagtcagagaacttggtgaagagccatgtccagctgcaaaattattcaaaggtggaaaggcatcctgtgactgcattggagaaaatgatggagtcaagttttgtcggcccccagtcattccctgaggtcccttctcctgacagaggaagccagtctgtcaaacaccacaggagtctatcctcttgctgcagcccagggcaaagaagtggcatgctccataggaatgccttcagaaggacacccccgtcaccccgaagtaggctaggtggaattgtgggaccagcatatcagcaactcgaagaatcaaggatcccagaccaggatacgataccttgccaagggtattcatccagtggtttaaaaacccaacgaaatacatcaataaatatgcaactgccttcaagagagacaaacccctattttaatagcttggagcaaaaggacctggtgggctattcatccacaagggccagttctgtgcccatcatcccttcagtgggtttagaggaaacctgcctgcaaatgccagggatttctgaagtcaaaagcatcaaatggtgcaaaaactcctattcagctgacgttgtcaatgtgagtattccagtcagcgattgtcttatagcagaacaacaagaagtgaaaatattgctagaaactgtccaggagcagatccgaattctgactgatgccagacggtcagaagactacgaactggccagcgtagaaaccgaggacagtgcaagcgaaaacacagcctttctccccctgagtcccacagccaaatcagaacgagaggcgcaatttgtcttaagaaatgaaatacaaagagactctgcattgaccaagtgacttgagatgtaggaatctgtgcattctatgctttgctcaacaggaaagagaggaaatcaaatacaaattatttatatgcattaatttaagagcatctacttagaagaaaccaaatagtctatcgccctcatatcatagtgttttttaacaaaatatttttttaagggaaagaaatgtttcaggagggataaagcttaccattaaagcttttgggtagaattctgaatccaatttcgtttagtcccaacactgtcctctttggctcttagaagatgtgggcaattcagacccttggccccacagtgccagtgtctcattaaaaaacactggcagttacctggtttcaaaaagaggagagctgcatcccgcaggtggatgcaccagtgagcaggtggctcttgccatttggcttgccagtcccaagccctaaatttctattcacccaatagcctcatcacaggttatgtcatgtcgacacatgtagtgttttctatttgatttttggagaatgccacaaaagactctgcaatgggaaggaggacaggagatagaaggagaaaccgggggcaatcttaactactcttgtgtgccaccttcctctgagatttgaatgcacagatctcagctggaggtatgaaattattacagaaaaagagacaaaaaaatccttatatcgtgtcactaaaatcatgctaatagaaatgtttttccttgagattgtttagaggctctggaggagcgtttctcagtttttgtgtgcctgtgtgcacatgtgtgtgcgagcgtgtgtgtgtgtggacttgctcacgcgggcacatatgctgtaagcacatgtgttcattgtgcgtatgtgtgtgcatgtgtgcgcgtattacgcttgctaaaatttgttctgaaacatcagggaatctactattcagaaaaattatttccctcttagatcttttcactttaaatttttccattaagtataaagttcagttagttcttaaatcaaggtcacttgcatggtggggtcgtataaaactcttgacactgtctagaccattttctgatgtgaatacttttgagaggatcaactattggctcattaatgatatcagtatcataaggtgagttcatcaaggatgtgtgtttattttgaatcatgcctacttaaattattaatacaagacaattaacaaattgacagttaccatttgctttctcatcatcctcattaccatttattttatagcaagtctgctatgtgtggaccaaggcttcggcttctgtggttagtatgggaagaataaattgttgaaataaaaatacccagactattcagttcacaagaagccccccaaaagaacagtaaattgtgttgtatgttcatttggaataaagcaatatttttaccactgctaaggtgaactgaaacctctcctgaagatttgtctgtttatttaccctcactttcatgggacatatgaggaaattagtgttcacatatccagtctttttccaattattggtggtgttgagttgttatgtttacactgttttaaataaaaaggcaccgtatttgaaagcat

SEQ ID NO: 158559 - DNA, 1581 bp, Homo sapiens
  Payload ID: 11031
  Gene Symbol: NRG3
  Gene Name: neuregulin 3
  ENST ID: ENST00000556918
  CDS Start-End: 1-1581
atggagtgtggtatacctccaacccttgtatgcgttgggagaggagggggactacacacggtaggggtatttcatgttctttctcaattgatttccttgtgtaccattccggaggtctttaaagaaaagcccaagatcaatataatcatctggtattattttccttctgcctggaggacttgctttaacatttcaagtagtgtgggtctgctgctgacgaattcatacaaattttgtcctagagacaggaggcatgccatacatggcaacatggggaagaccagagtggtcaggaggcagaaacaggagcaagatacgacgacatattccacagagcgatccgagcacttcaaaccctgccgagacaaggaccttgcatactgtctcaatgatggcgagtgctttgtgatcgaaaccctgaccggatcccataaacactgtcggtgcaaagaaggctaccaaggagtccgttgtgatcaatttctgccgaaaactgattccatcttatcggatccaacagaccacttggggattgaattcatggagagtgaagaagtttatcaaaggcaggtgctgtcaatttcatgtatcatctttggaattgtcatcgtgggcatgttctgtgcagcattctacttcaaaagcaagaaacaagctaaacaaatccaagagcagctgaaagtgccacaaaatggtaaaagctacagtctcaaagcatccagcacaatggcaaagtcagagaacttggtgaagagccatgtccagctgcaaaattattcaaaggtggaaaggcatcctgtgactgcattggagaaaatgatggagtcaagttttgtcggcccccagtcattccctgaggtcccttctcctgacagaggaagccagtctgtcaaacaccacaggagtctatcctcttgctgcagcccagggcaaagaagtggcatgctccataggaatgccttcagaaggacacccccgtcaccccgaagtaggctaggtggaattgtgggaccagcatatcagcaactcgaagaatcaaggatcccagaccaggatacgataccttgccaagggtattcatccagtggtttaaaaacccaacgaaatacatcaataaatatgcaactgccttcaagagagacaaacccctattttaatagcttggagcaaaaggacctggtgggctattcatccacaagggccagttctgtgcccatcatcccttcagtgggtttagaggaaacctgcctgcaaatgccagggatttctgaagtcaaaagcatcaaatggtgcaaaaactcctattcagctgacgttgtcaatgtgagtattccagtcagcgattgtcttatagcagaacaacaagaagtgaaaatattgctagaaactgtccaggagcagatccgaattctgactgatgccagacggtcagaagactacgaactggccagcgtagaaaccgaggacagtgcaagcgaaaacacagcctttctccccctgagtcccacagccaaatcagaacgagaggcgcaatttgtcttaagaaatgaaatacaaagagactctgcattgaccaagtga

SEQ ID NO: 158560 - DNA, 1606 bp, Homo sapiens
  Payload ID: 11031
  Gene Symbol: NRG3
  Gene Name: neuregulin 3
  ENST ID: ENST00000555784
  CDS Start-End: 1-231
atggagtgtggtatacctccaacccttgtatgcgttgggagaggagggggactacacacggtaggggtatttcatgttctttctcaattgatttccttgtgtaccattccggaggtctttaaagaaaagcccaagatacgacgacatattccacagagcgatccgagcacttcaaaccctgccgagacaaggaccttgcatactgtctcaatgatggcgagtgctttgtgatcgaaaccctgaccggatcccataaacactgtcggtgcaaagaaggctaccaaggagtccgttgtgatcaatttctgccgaaaactgattccatcttatcggatccaaagacggggtttcaccgtgttaaccaggatggtctcaatttcctgacctcgtgatccgcctacctcggcctcccaaagtgctgggattacagaccacttggggattgaattcatggagagtgaagaagtttatcaaaggcaggtgctgtcaatttcatgtatcatctttggaattgtcatcgtgggcatgttctgtgcagcattctacttcaaaagcaaaaggaatattacagcaaattctgtgtctgaggaaagatggaaggaaacaagctaaacaaatccaagagcagctgaaagtgccacaaaatggtaaaagctacagtctcaaagcatccagcacaatggcaaagtcagagaacttggtgaagagccatgtccagctgcaaaattattcaaaggtggaaaggcatcctgtgactgcattggagaaaatgatggagtcaagttttgtcggcccccagtcattccctgaggtcccttctcctgacagaggaagccagtctgtcaaacaccacaggagtctatcctcttgctgcagcccagggcaaagaagtggcatgctccataggaatgccttcagaaggacacccccgtcaccccgaagtaggctaggtggaattgtgggaccagcatatcagcaactcgaagaatcaaggatcccagaccaggatacgataccttgccaagggatagaggtcaggaagactatatcccacctgcctatacagctgtggtgtgttgaaagacccctggacttaaagtattcatccagtggtttaaaaacccaacgaaatacatcaataaatatgcaactgccttcaagagagacaaacccctattttaatagcttggagcaaaaggacctggtgggctattcatccacaagggccagttctgtgcccatcatcccttcagtgggtttagaggaaacctgcctgcaaatgccagggatttctgaagtcaaaagcatcaaatggtgcaaaaactcctattcagctgacgttgtcaatgtgagtattccagtcagcgattgtcttatagcagaacaacaagaagtgaaaatattgctagaaactgtccaggagcagatccgaattctgactgatgccagacggtcagaagactacgaactggccagcgtagaaaccgaggacagtgcaagcgaaaacacagcctttctccccctgagtcccacagccaaatcagaacgagaggcgcaatttgtcttaagaaatgaaatacaaagagactctgcattgaccaagtga

SEQ ID NO: 158561 - DNA, 3530 bp, Homo sapiens
  Payload ID: 11031
  Gene Symbol: NRG3
  Gene Name: neuregulin 3
  ENST ID: ENST00000602794
  CDS Start-End: 65-229
aaaatgagtctaccctgaagaccccagatttttgatctgctcttttgatgcagttgatagaataatggagtgtggtatacctccaacccttgtatgcgttgggagaggagggggactacacacggtttttcagaggcaaaaactcctttatgaattgattgccacatcacccttctggttccatctgaggtcttctttgcagaagccactcagcaccttttggaattgaatgctgacatcgcatcagattcaaaaggaatgctgctgttgattcctttctgtactcatcacatggtgaggaatatgctgggagtctgtataagatgaggctcttgcacggcctgccagagagtgcctgtcatggactggagaactgcatccgttcatttacatatcggcagctaaaattagtggagtcacccacgtttttcaccctaaagaagaaccttcagataagaatccagttcatcactctcgcctgctcaggcttacttggttgctccttgttaccagacagaggggctatagcgctgtgtaagagcaaatgttaaattagtattaatagccaatggcatctctcttctatttttcactgatcagatacgacgacatattccacagagcgatccgagcacttcaaaccctgccgagacaaggaccttgcatactgtctcaatgatggcgagtgctttgtgatcgaaaccctgaccggatcccataaacactgtcggtgcaaagaaggctaccaaggagtccgttgtgatcaatttctgccgaaaactgattccatcttatcggatccaaagacggggtttcaccgtgttaaccaggatggtctcaatttcctgacctcgtgatccgcctacctcggcctcccaaagtgctgggattacagaccacttggggattgaattcatggagagtgaagaagtttatcaaaggcaggtgctgtcaatttcatgtatcatctttggaattgtcatcgtgggcatgttctgtgcagcattctacttcaaaagcaagaaacaagctaaacaaatccaagagcagctgaaagtgccacaaaatggtaaaagctacagtctcaaagcatccagcacaatggcaaagtcagagaacttggtgaagagccatgtccagctgcaaaattattcaaaggtggaaaggcatcctgtgactgcattggagaaaatgatggagtcaagttttgtcggcccccagtcattccctgaggtcccttctcctgacagaggaagccagtctgtcaaacaccacaggagtctatcctcttgctgcagcccagggcaaagaagtggcatgctccataggaatgccttcagaaggacacccccgtcaccccgaagtaggctaggtggaattgtgggaccagcatatcagcaactcgaagaatcaaggatcccagaccaggatacgataccttgccaagggtattcatccagtggtttaaaaacccaacgaaatacatcaataaatatgcaactgccttcaagagagacaaacccctattttaatagcttggagcaaaaggacctggtgggctattcatccacaagggccagttctgtgcccatcatcccttcagtgggtttagaggaaacctgcctgcaaatgccagggatttctgaagtcaaaagcatcaaatggtgcaaaaactcctattcagctgacgttgtcaatgtgagtattccagtcagcgattgtcttatagcagaacaacaagaagtgaaaatattgctagaaactgtccaggagcagatccgaattctgactgatgccagacggtcagaagactacgaactggccagcgtagaaaccgaggacagtgcaagcgaaaacacagcctttctccccctgagtcccacagccaaatcagaacgagaggcgcaatttgtcttaagaaatgaaatacaaagagactctgcattgaccaagtgacttgagatgtaggaatctgtgcattctatgctttgctcaacaggaaagagaggaaatcaaatacaaattatttatatgcattaatttaagagcatctacttagaagaaaccaaatagtctatcgccctcatatcatagtgttttttaacaaaatatttttttaagggaaagaaatgtttcaggagggataaagcttaccattaaagcttttgggtagaattctgaatccaatttcgtttagtcccaacactgtcctctttggctcttagaagatgtgggcaattcagacccttggccccacagtgccagtgtctcattaaaaaacactggcagttacctggtttcaaaaagaggagagctgcatcccgcaggtggatgcaccagtgagcaggtggctcttgccatttggcttgccagtcccaagccctaaatttctattcacccaatagcctcatcacaggttatgtcatgtcgacacatgtagtgttttctatttgatttttggagaatgccacaaaagactctgcaatgggaaggaggacaggagatagaaggagaaaccgggggcaatcttaactactcttgtgtgccaccttcctctgagatttgaatgcacagatctcagctggaggtatgaaattattacagaaaaagagacaaaaaaatccttatatcgtgtcactaaaatcatgctaatagaaatgtttttccttgagattgtttagaggctctggaggagcgtttctcagtttttgtgtgcctgtgtgcacatgtgtgtgcgagcgtgtgtgtgtgtggacttgctcacgcgggcacatatgctgtaagcacatgtgttcattgtgcgtatgtgtgtgcatgtgtgcgcgtattacgcttgctaaaatttgttctgaaacatcagggaatctactattcagaaaaattatttccctcttagatcttttcactttaaatttttccattaagtataaagttcagttagttcttaaatcaaggtcacttgcatggtggggtcgtataaaactcttgacactgtctagaccattttctgatgtgaatacttttgagaggatcaactattggctcattaatgatatcagtatcataaggtgagttcatcaaggatgtgtgtttattttgaatcatgcctacttaaattattaatacaagacaattaacaaattgacagttaccatttgctttctcatcatcctcattaccatttattttatagcaagtctgctatgtgtggaccaaggcttcggcttctgtggttagtatgggaagaataaattgttgaaataaaaatacccagactattcagttcacaagaagccccccaaaagaacagtaaattgtgttgtatgttcatttggaataaagcaatatttttaccactgctaaggtgaactgaaacctctcctgaagatttgtctgtttatttaccctcactttcatgggacatatgaggaaattagtgttcacatatccagtctttttccaattattggtggtgttgagttgttatgtttacactgttttaaataaaaaggcaccgtatttgaaagcat

SEQ ID NO: 158562 - DNA, 1159 bp, Homo sapiens
  Payload ID: 11032
  Gene Symbol: NRG4
  Gene Name: neuregulin 4
  Uniprot ID: Q8WWG1
  ENST ID: ENST00000394907
  CDS Start-End: 183-530
acactgcagccatataaatcagatttttgacatgttataaaatgcaagtcacagctgctgttgtctgcggtattcaaaaacttttgaaacactgcatgtccaacaaaatttattttttgtgtgaatgtactgtttttcaaccctactctcttgaccaagaatgaaactatttacaaattaagatgccaacagatcacgaagagccctgtggtcccagtcacaagtcgttttgcctgaatggggggctttgttatgtgatacctactattcccagcccattttgtaggtgcgttgaaaactatacaggagctcgttgtgaagaggtttttctcccaggctccagcatccaaactaaaagtaacctgtttgaagcttttgtggcattggcggtcctagtaacacttatcattggagccttctacttcctttgcaggaaaggccactttcagagagccagttcagtccagtatgatatcaacctggtagagacgagcagtaccagtgcccaccacagtcatgaacaacactgaagaaacgtcaaagtgaaccaaatcattgtttttattttacaaaggcagaaaatgaaacaccactaggtaaaagaattaaaaatctaatcctttatttcttaaataaaacgcttgtgtaactcgtatcatgaaccataatccattctgctgcaaggtgtgtgtgcttctgtaatgtgcatcagtccatcggcaactgctaagtagggggtgataccagtataattcgaagtcacattggttcaacatgactctccccagaaagctgatgtgctgaagcaaccagaggcaaatgttcacacacctagagagaaaccctaagggatatatgaagatcttatgaaaaaggatgaaaaccctttaaatgcaaggagtagctggcttagtggcttcaaaaccacctcattcctgctgttatctgagaagctgcaagtactgatgaaaaaactgagaagacatttcacctggcaattagaaaaaagcgctgactgatagatacctctgtatcattctttcaatattgatgaaaatgctttctactagaagtgactgatttcaaggatctgtctctcaaaggaagaaacaaaaacccaaaattttgactgcaaaagattgactaattctaggtgcaa

SEQ ID NO: 158563 - DNA, 3406 bp, Homo sapiens
  Payload ID: 11032
  Gene Symbol: NRG4
  Gene Name: neuregulin 4
  ENST ID: ENST00000461391
  CDS Start-End: 178-285
atttttgacatgttataaaatgcaagtcacagctgctgttgtctgcggtattcaaaaacttttgaaacactgcatgtccaacaaaatttattttttgtgtgaatgtaagtttttattgagggtactgtttttcaaccctactctcttgaccaagaatgaaactatttacaaattaagatgccaacagatcacgaagagccctgtggtcccagtcacaagtcgttttgcctgaatggggggctttgttatgtgatacctactattcccagcccattttgtagttaatgaggaactgattaatgagggaaccaatagatgtcacaactggcttaaaggagaattcaaaccacacacatatgtacaggaagtgaactgatgctggcttctctttgtcttattccaagttgggcatgagattttccctgcattagaaggttgttgagacctgaagcctgggaaggtgcgttgaaaactatacaggagctcgttgtgaagaggtttttctcccaggctccagcatccaaactaaaagtaacctgtttgaagcttttgtggcattggcggtcctagtaacacttatcattggagccttctacttcctttgcaggaaaggccactttcagagagccagttcagtccagtatgatatcaacctggtagagacgagcagtaccagtgcccaccacagtcatgaacaacactgaagaaacgtcaaagtgaaccaaatcattgtttttattttacaaaggcagaaaatgaaacaccactaggtaaaagaattaaaaatctaatcctttatttcttaaataaaacgcttgtgtaactcgtatcatgaaccataatccattctgctgcaaggtgtgtgtgcttctgtaatgtgcatcagtccatcggcaactgctaagtagggggtgataccagtataattcgaagtcacattggttcaacatgactctccccagaaagctgatgtgctgaagcaaccagaggcaaatgttcacacacctagagagaaaccctaagggatatatgaagatcttatgaaaaaggatgaaaaccctttaaatgcaaggagtagctggcttagtggcttcaaaaccacctcattcctgctgttatctgagaagctgcaagtactgatgaaaaaactgagaagacatttcacctggcaattagaaaaaagcgctgactgatagatacctctgtatcattctttcaatattgatgaaaatgctttctactagaagtgactgatttcaaggatctgtctctcaaaggaagaaacaaaaacccaaaattttgactgcaaaagattgactaattctaggtgcaagtaactggaaatttaggattgttattgtactacacaggtcacaaagttccaaacctatttcccttgtaatttttagtgcatgatttttcagaatgcagtttctatctttttaggtgcaatattaagaactgattaggtcagaacaatttagtttctccagttttttctacctaagttacatgggggaaaaaaaagcaatagtaactttaaggaagtatgaaaataaagtcttggagcagtggaaaggtctggggctggtaaatggcttaggcagaagggcatgcaccggccaaacctaacagcctgtctctgaactatgtcctcgtcaaggctgggatgcacgctggcttctctacacagtctggcccagtgtaagtgctgtgaattcagtgggtcactagtgtcaccaattcattcatcacccatcattcactcatttcacaaacacatgagggtaagacattgagacagagtacacaaaatgaaaagctctcacataattttaatagactttattagaagttttagattttcagaaaaactgagcagatagtatagagttcccctatgcttccccccaccccaggcctttattattaacatcttgcactagtgtggtatatttgtttaaccaatattgacacatttttactttactttttgagacaaagtctcactctgtcatccaggctagctgaagcctgtaatttacatgaagggtcctctttttgttgtatgtctttatggattttgaccaatatataatgtcatgtatccactattatagtattgtatacagtagtttcaccaccctaaaaatctctactccatgtatttacccctccctctctcccactgaacctctggcaaccagtctttactaactttgctttctccagaatgtcatatatttgaaatcatgtagtatgtagcctttcagactaacttctttcacttagcaatatacacttaaagttcctctatgtcttgtgactaaataccccaccccctgccctttttaaaaaaaaaaaaaaaagctaggccatatttttttttttttttttttttggtggtttaaaaatttactgtggcaaaatgtacgtaagatttaaattttaaccattttgaagttacagtttaaaggcattaaatacattcgttgtatgtaccagtcaccactatgcacctccggaactttttcatgatcccacactaatctctgtgccccttaaacaataaattcccattccctcctgctccctgtgacaaaacgtaatctttgttctactttgtctctatgaatctcactagtctaggtacctcacatcagtggattcatatagtattgtccttttgtgatttacttaatgtctgaaaggttcatccatgatgtagtatgtagaaggatttcctttttatggctgaataatattccattgtatggatataacacattttgtctatccattcatctgttgggtatttgggttgtttctaccttttgactacggtgaataatgctgcagtgaacactggtatacaaatataccctcaagcctccgctttcaattattttgtgtatatacccagaaatgcaattgctgaatcaaatgacaattctatatttaattggaaaatcaccatactgttttctacagcagctgcataccactatatttccatcagtaataagagttccaatttctccacatccttgccaacacttgtgtgtttttttaattttaataagagctatcccagtgggtatgaagtggtatctcaatgtggttttgatttgcatttccttactgtttagtgatgctaagcattttttcctgtgctcactggctatctgcatgtcctctctggagatctatccaaatcctttgccattttttaaatcaggtttttacactgttgttgcattttgggagttttgtatgtattctggatgtttaatccttattaggtacgtgaactgcatattatttcctcccactccataggtaatctttttactctgttgatagtgttctttgatgcacaaaattttaatgaagtataatttgccta

SEQ ID NO: 158564 - DNA, 2368 bp, Homo sapiens
  Payload ID: 11032
  Gene Symbol: NRG4
  Gene Name: neuregulin 4
  ENST ID: ENST00000472094
  CDS Start-End: 260-370
ctgcctgttctcgctcgtgtgtgtttctctcgattgcttgctcgctttctctgcctctctgcttgtctaagaaagagctgttggctttgagagaagaccttggtattacaactgtgttagtagattgagatttctgttagagtctttctgtttaggtcagaagtgttctttatagaacagaactgggagcttgtaatcataatgtactgtttttcaaccctactctcttgaccaagaatgaaactatttacaaattaagatgccaacagatcacgaagagccctgtggtcccagtcacaagtcgttttgcctgaatggggggctttgttatgtgatacctactattcccagcccattttgtaggaagtgaactgatgctggcttctctttgtcttattccaagttgggcatgagattttccctgcattagaaggttgttgagacctgaagcctgggaaggtgcgttgaaaactatacaggagctcgttgtgaagaggtttttctcccaggctccagcatccaaactaaaagtaacctgtttgaagcttttgtggcattggcggtcctagtaacacttatcattggagccttctacttcctttgcaggaaaggccactttcagagagccagttcagtccagtatgatatcaacctggtagagacgagcagtaccagtgcccaccacagtcatgaacaacactgaagaaacgtcaaagtgaaccaaatcattgtttttattttacaaaggcagaaaatgaaacaccactaggtaaaagaattaaaaatctaatcctttatttcttaaataaaacgcttgtgtaactcgtatcatgaaccataatccattctgctgcaaggtgtgtgtgcttctgtaatgtgcatcagtccatcggcaactgctaagtagggggtgataccagtataattcgaagtcacattggttcaacatgactctccccagaaagctgatgtgctgaagcaaccagaggcaaatgttcacacacctagagagaaaccctaagggatatatgaagatcttatgaaaaaggatgaaaaccctttaaatgcaaggagtagctggcttagtggcttcaaaaccacctcattcctgctgttatctgagaagctgcaagtactgatgaaaaaactgagaagacatttcacctggcaattagaaaaaagcgctgactgatagatacctctgtatcattctttcaatattgatgaaaatgctttctactagaagtgactgatttcaaggatctgtctctcaaaggaagaaacaaaaacccaaaattttgactgcaaaagattgactaattctaggtgcaagtaactggaaatttaggattgttattgtactacacaggtcacaaagttccaaacctatttcccttgtaatttttagtgcatgatttttcagaatgcagtttctatctttttaggtgcaatattaagaactgattaggtcagaacaatttagtttctccagttttttctacctaagttacatgggggaaaaaaaagcaatagtaactttaaggaagtatgaaaataaagtcttggagcagtggaaaggtctggggctggtaaatggcttaggcagaagggcatgcaccggccaaacctaacagcctgtctctgaactatgtcctcgtcaaggctgggatgcacgctggcttctctacacagtctggcccagtgtaagtgctgtgaattcagtgggtcactagtgtcaccaattcattcatcacccatcattcactcatttcacaaacacatgagggtaagacattgagacagagtacacaaaatgaaaagctctcacataattttaatagactttattagaagttttagattttcagaaaaactgagcagatagtatagagttcccctatgcttccccccaccccaggcctttattattaacatcttgcactagtgtggtatatttgtttaaccaatattgacacatttttactttactttttgagacaaagtctcactctgtcatccaggctagctgaagcctgtaatttacatgaagggtcctctttttgttgtatgtctttatggattttgaccaatatataatgtcatgtatccactattatagtattgtatacagtagtttcaccaccctaaaaatctctactccatgtatttacccctccctctctcccactgaacctctggcaaccagtctttactaactttgctttctccagaatgtcatatatttgaaatcatgtagtatgtagcctttcagactaacttctttcacttagcaatatacacttaaagttcctctatgtcttgtgactaaataccccaccccctgccctttttaaaaaaaaaaaaaaaa

SEQ ID NO: 158565 - DNA, 529 bp, Homo sapiens
  Payload ID: 11032
  Gene Symbol: NRG4
  Gene Name: neuregulin 4
  ENST ID: ENST00000498750
  CDS Start-End: 116-226
tttctgtttaggtcagaagtgttctttatagaacagaactgggagcttgtaatcataatgtactgtttttcaaccctactctcttgaccaagaatgaaactatttacaaattaagatgccaacagatcacgaagagccctgtggtcccagtcacaagtcgttttgcctgaatggggggctttgttatgtgatacctactattcccagcccattttgtaggaagtgaactgatgctggcttctctttgtcttattccaagttgggcatgagattttccctgcattagaaggttgttgagacctgaagcctgggaaggtgcgttgaaaactatacaggagctcgttgtgaagaggtttttctcccaggctccagcatccaaactaaaagtaacctgtttgaagcttttgtggcattggcggtcctagtaacacttatcattggagccttctacttcctttgcaggtgtggtaacacatgcatgtagtcctagctgcttgggaggctgagatgggaagatcgcttgagccca

SEQ ID NO: 158566 - DNA, 1036 bp, Homo sapiens
  Payload ID: 11032
  Gene Symbol: NRG4
  Gene Name: neuregulin 4
  ENST ID: ENST00000562114
  CDS Start-End: 189-299
atataaatcagatttttgacatgttataaaatgcaagtcacagctgctgttgtctgcggtattcaaaaacttttgaaacactgcatgtccaacaaaatttattttttgtgtgaatgtaagtttttattgagggtactgtttttcaaccctactctcttgaccaagaatgaaactatttacaaattaagatgccaacagatcacgaagagccctgtggtcccagtcacaagtcgttttgcctgaatggggggctttgttatgtgatacctactattcccagcccattttgtaggaagtgaactgatgctggcttctctttgtcttattccaagttgggcatgagattttccctgcattagaaggttgttgagacctgaagcctgggaaggtgcgttgaaaactatacaggagctcgttgtgaagaggtttttctcccaggctccagcatccaaactaaaagtaacctgtttgaagcttttgtggcattggcggtcctagtaacacttatcattggagccttctacttcctttgcaggaaaggccactttcagagagccagttcagtccagtatgatatcaacctggtagagacgagcagtaccagtgcccaccacagtcatgaacaacactgaagaaacgtcaaagtgaaccaaatcattgtttttattttacaaaggcagaaaatgaaacaccactaggtaaaagaattaaaaatctaatcctttatttcttaaataaaacgcttgtgtaactcgtatcatgaaccataatccattctgctgcaaggtgtgtgtgcttctgtaatgtgcatcagtccatcggcaactgctaagtagggggtgataccagtataattcgaagtcacattggttcaacatgactctccccagaaagctgatgtgctgaagcaaccagaggcaaatgttcacacacctagagagaaaccctaagggatatatgaagatcttatgaaaaaggatgaaaaccctttaaatgcaaggagtagctggcttagtggcttcaaaaccacctcatt

SEQ ID NO: 158567 - DNA, 799 bp, Homo sapiens
  Payload ID: 11032
  Gene Symbol: NRG4
  Gene Name: neuregulin 4
  ENST ID: ENST00000563910
  CDS Start-End: 469-799
gaggctgcggaacggcggcgcggctgtctaggaaaccgcggcgtcggctggcaggggctggcggcctgagctgggcagggggcggaggcgggggctcggctgtctccggggctgccacgcagagcgggcttcgtggcgtggacataactgttcgtttctaacgtggctgtagttggcattctctctcataccaagataccttttgagactaaaagtgaatcagaaaaataaagaaccagcatcaaatttgaagtggccacaaattctattaaagcagaagaaatagtggtgaaccataaaagagaaccagtttcctctctattctgcaatttagaggaaaaattttcatccaaggacagatcaggtggtggacctagatgggaaacccaaattataatcaagagatttcttggtactgtttttcaaccctactctcttgaccaagaatgaaactatttacaaattaagatgccaacagatcacgaagagccctgtggtcccagtcacaagtcgttttgcctgaatggggggctttgttatgtgatacctactattcccagcccattttgtaggtgcgttgaaaactatacaggagctcgttgtgaagaggtttttctcccaggctccagcatccaaactaaaagtaacctgtttgaagcttttgtggcattggcggtcctagtaacacttatcattggagccttctacttcctttgcaggaaaggccactttcagagagccagttcagtccagtatgatatcaacctggtagagacgagcagtaccagtgcccaccaca

SEQ ID NO: 158568 - DNA, 610 bp, Homo sapiens
  Payload ID: 11032
  Gene Symbol: NRG4
  Gene Name: neuregulin 4
  ENST ID: ENST00000563204
  CDS Start-End: 161-433
atttttgacatgttataaaatgcaagtcacagctgctgttgtctgcggtattcaaaaacttttgaaacactgcatgtccaacaaaatttattttttgtgtgaatgtactgtttttcaaccctactctcttgaccaagaatgaaactatttacaaattaagatgccaacagatcacgaagagccctgtggtcccagtcacaagtcgttttgcctgaatggggggctttgttatgtgatacctactattcccagcccattttgtaggtgcgttgaaaactatacaggagctcgttgtgaagaggtttttctcccaggctccagcatccaaactaaaagtaacctgtttgaagcttttgtggcattggcggtcctagtaacacttatcattggagccttctacttcctttgcaggtgtggtaacacatgcatgtagtcctagctgcttgggaggctgagatgggaagatcgcttgagcccaggaatgagaggctgcagttaagccatgactgcactactgcactcctgcctgggaaaggccactttcagagagccagttcagtccagtatgatatcaacctggtagagacgagcagtaccagtgcccaccaca

SEQ ID NO: 158569 - DNA, 559 bp, Homo sapiens
  Payload ID: 11032
  Gene Symbol: NRG4
  Gene Name: neuregulin 4
  ENST ID: ENST00000567936
  CDS Start-End: 133-243
acagctgctgttgtctgcggtattcaaaaacttttgaaacactgcatgtccaacaaaatttattttttgtgtgaatgtactgtttttcaaccctactctcttgaccaagaatgaaactatttacaaattaagatgccaacagatcacgaagagccctgtggtcccagtcacaagtcgttttgcctgaatggggggctttgttatgtgatacctactattcccagcccattttgtaggaagtgaactgatgctggcttctctttgtcttattccaagttgggcatgagattttccctgcattagaaggttgttgagacctgaagcctgggaaggtgcgttgaaaactatacaggagctcgttgtgaagaggtttttctcccaggctccagcatccaaactaaaagtaacctgtttgaagcttttgtggcattggcggtcctagtaacacttatcattggagccttctacttcctttgcaggaaaggccactttcagagagccagttcagtccagtatgatatcaacctggtagagacgagcagtaccagtgcccaccaca

SEQ ID NO: 158570 - DNA, 1007 bp, Homo sapiens
  Payload ID: 11032
  Gene Symbol: NRG4
  Gene Name: neuregulin 4
  ENST ID: ENST00000568073
  CDS Start-End: 58-168
ggtactgtttttcaaccctactctcttgaccaagaatgaaactatttacaaattaagatgccaacagatcacgaagagccctgtggtcccagtcacaagtcgttttgcctgaatggggggctttgttatgtgatacctactattcccagcccattttgtaggaagtgaactgatgctggcttctctttgtcttattccaagttgggcatgagattttccctgcattagaaggttgttgagacctgaagcctgggaaggtgcgttgaaaactatacaggagctcgttgtgaagaggtttttctcccaggctccagcatccaaactaaaagtaacctgtttgaagcttttgtggcattggcggtcctagtaacacttatcattggagccttctacttcctttgcaggaaaggccactttcagagagccagttcagtccagtatgatatcaacctggtagagacgagcagtaccagtgcccaccacagtcatgaacaacactgaagaaacgtcaaagtgaaccaaatcattgtttttattttacaaaggcagaaaatgaaacaccactaggtgtgtgtgcttctgtaatgtgcatcagtccatcggcaactgctaagtagggggtgataccagtataattcgaagtcacattggttcaacatgactctccccagaaagctgatgtgctgaagcaaccagaggcaaatgttcacacacctagagagaaaccctaagggatatatgaagatcttatgaaaaaggatgaaaaccctttaaatgcaaggagtagctggcttagtggcttcaaaaccacctcattcctgctgttatctgagaagctgcaagtactgatgaaaaaactgagaagacatttcacctggcaattagaaaaaagcgctgactgatagatacctctgtatcattctttcaatattgatgaaaatgctttctactagaagtgactgatttcaaggatctgtctctcaaaggaagaaacaaaaacccaaaat

SEQ ID NO: 158571 - DNA, 581 bp, Homo sapiens
  Payload ID: 11032
  Gene Symbol: NRG4
  Gene Name: neuregulin 4
  Uniprot ID: Q8WWG1
  ENST ID: ENST00000566417
  CDS Start-End: 121-468
ataactgttcgtttctaacgtggctgtagttggcattctctctcataccaagataccttttgaggtactgtttttcaaccctactctcttgaccaagaatgaaactatttacaaattaagatgccaacagatcacgaagagccctgtggtcccagtcacaagtcgttttgcctgaatggggggctttgttatgtgatacctactattcccagcccattttgtaggtgcgttgaaaactatacaggagctcgttgtgaagaggtttttctcccaggctccagcatccaaactaaaagtaacctgtttgaagcttttgtggcattggcggtcctagtaacacttatcattggagccttctacttcctttgcaggaaaggccactttcagagagccagttcagtccagtatgatatcaacctggtagagacgagcagtaccagtgcccaccacagtcatgaacaacactgaagaaacgtcaaagtgaaccaaatcattgtttttattttacaaaggcagaaaatgaaacaccactaggattttcattaagccaactcatacccagtttctacaaatgaaaacca

SEQ ID NO: 158572 - DNA, 716 bp, Homo sapiens
  Payload ID: 11032
  Gene Symbol: NRG4
  Gene Name: neuregulin 4
  ENST ID: ENST00000567126
  CDS Start-End: 472-582
ggcctgagctgggcagggggcggaggcgggggctcggctgtctccggggctgccacgcagagcgggcttcgtggcgtggatgaagaaactgaggcacagagggattaagtagcctgctcaagatcacacagctagtaaggaaccaagattcaaacttgggcagtgtgattcagagactttaaattcaacgctggtgcctcactgcctcacactaaaagtgaatcagaaaaataaagaaccagcatcaaatttgaagtggccacaaattctattaaagcagaagaaatagtggtgaaccataaaagagaaccagtttcctctctattctgcaatttagaggaaaaattttcatccaaggacagatcaggtggtggacctagatgggaaacccaaattataatcaagagatttcttggtactgtttttcaaccctactctcttgaccaagaatgaaactatttacaaattaagatgccaacagatcacgaagagccctgtggtcccagtcacaagtcgttttgcctgaatggggggctttgttatgtgatacctactattcccagcccattttgtaggaagtgaactgatgctggcttctctttgtcttattccaagttgggcatgagattttccctgcattagaaggttgttgagacctgaagcctgggaaggtgcgttgaaaactatacaggagctcgttgtgaagaggtttttct

SEQ ID NO: 158573 - DNA, 1453 bp, Homo sapiens
  Payload ID: 11032
  Gene Symbol: NRG4
  Gene Name: neuregulin 4
  ENST ID: ENST00000565661
  CDS Start-End: 336-443
gagctgggcagggggcggaggcgggggctcggctgtctccggggctgccacgcagagcgggcttcgtggcgtggactaaaagtgaatcagaaaaataaagaaccagcatcaaatttgaagtggccacaaattctattaaagcagaagaaatagtggtgaaccataaaagagaaccagtttcctctctattctgcaatttagaggaaaaattttcatccaaggacagatcaggtggtggacctagatgggaaacccaaattataatcaagagatttcttggtactgtttttcaaccctactctcttgaccaagaatgaaactatttacaaattaagatgccaacagatcacgaagagccctgtggtcccagtcacaagtcgttttgcctgaatggggggctttgttatgtgatacctactattcccagcccattttgtagttaatgaggaactgattaatgagggaaccaatagatgtcacaactggcttaaaggagaattcaaaccacacacatatgtacaggaagtgaactgatgctggcttctctttgtcttattccaagttgggcatgagattttccctgcattagaaggttgttgagacctgaagcctgggaaggtgcgttgaaaactatacaggagctcgttgtgaagaggtttttctcccaggctccagcatccaaactaaaagtaacctgtttgaagcttttgtggcattggcggtcctagtaacacttatcattggagccttctacttcctttgcaggtgtggtaacacatgcatgtagtcctagctgcttgggaggctgagatgggaagatcgcttgagcccaggaatgagaggctgcagttaagccatgactgcactactgcactcctgcctgggaaaggccactttcagagagccagttcagtccagtatgatatcaacctggtagagacgagcagtaccagtgcccaccacagtcatgaacaacactgaagaaacgtcaaagtgaaccaaatcattgtttttattttacaaaggcagaaaatgaaacaccactaggtaaaagaattaaaaatctaatcctttatttcttaaataaaacgcttgtgtaactcgtatcatgaaccataatccattctgctgcaaggtgtgtgtgcttctgtaatgtgcatcagtccatcggcaactgctaagtagggggtgataccagtataattcgaagtcacattggttcaacatgactctccccagaaagctgatgtgctgaagcaaccagaggcaaatgttcacacacctagagagaaaccctaagggatatatgaagatcttatgaaaaaggatgaaaaccctttaaatgcaaggagtagctggcttagtggcttcaaaaccacctcattcctgctgttatctgagaagctgcaagtactgatgaaaaaactgagaagacatttcacctggcaattag

SEQ ID NO: 158574 - DNA, 800 bp, Homo sapiens
  Payload ID: 11033
  Gene Symbol: NRSN1
  Gene Name: neurensin 1
  ENST ID: ENST00000378475
  CDS Start-End: 12-452
agctgggaaggatgagttcttgcagcaacgtctgtgggtccaggcaggcacaggctgcagctgagggtggttaccagcgctatggagtccggtcctacctgcaccagttttatgaggactgtacagcctcaatttgggagtatgaggatgatttccagatccaaagatcacctaacaggtggagctcagtattctggaagcaggaactgggttttcacacatcctcccacagccaagagtggaatcggaagttacagcacaaaaactgtcctcgctgctgtttcgggagtttgtcaccacctggagaggcccttctctgtcgccattgggattggccttaccaccctaaggccccaggttgctctgctgagcctggaggaggacccttccaaagcattccaactcttctgtgtggccctaaacgaggctgctttgcttcctcagaactttaaacaacctctgcattgcaattttttgactctttccatttgggagtcctctttctgttagacctgggaccaattcgactttgaactgtgtccagagataatttttatgatactgtatggaattgctccctcaatttttatcctttccagtactcagcatggtaccaagactaagctgatgagtcccaactgctctcctcacctcccatatgctactcatgagactccttcgtacctatcatcccacgctctccctcccatgttttaacatgtctggaattccccaatgggtgcatctctcagagattctcattaaagactggcattaacagccccttcagaagccttgaa

SEQ ID NO: 158575 - DNA, 701 bp, Homo sapiens
  Payload ID: 11033
  Gene Symbol: NRSN1
  Gene Name: neurensin 1
  ENST ID: ENST00000378477
  CDS Start-End: 184-701
acgaggcggagcggcggcggtggcgacggcgatgggaccccagcgagagatctgcagctaggctggctgcacttgctccacgggtcaggggatcggagggggattgaagaatgcgccattaaaaggaaagatcaaggagtaaaccagaagaagaagaaaaagaggacttcaaagctgggaaggatgagttcttgcagcaacgtctgtgggtccaggcaggcacaggctgcagctgagggtggttaccagcgctatggagtccggtcctacctgcaccagttttatgaggactgtacagcctcaatttgggagtatgaggatgatttccagatccaaagatcacctaacaggtggagctcagtattctggaaggttggactcatctcaggtacagtttttgtgatcctcggattgactgttctggcagtgggctttcttgtgccccccaaaatcgaagcatttggcgaagccgattttgtggtggtcgacacacatgctgtccagtttaacagtgctctggacatgtacaagctggcaggagctgttctcttctgcattggaggcacgtccatggcagggtgcctgctgatgtcggtgtttgtaaagagctactccaaagaagaaaaattcctccagcagaagtttaaagaacgaatcgcagacatcaaagcccacacccagccggttacaaaagctccagg

SEQ ID NO: 158576 - DNA, 2408 bp, Homo sapiens
  Payload ID: 11033
  Gene Symbol: NRSN1
  Gene Name: neurensin 1
  Uniprot ID: Q8IZ57
  ENST ID: ENST00000378478
  CDS Start-End: 238-825
gggtgcgcgggcacgcgggactcccagctgtcaatcaggcgcgggctgagctctacgaggcggagcggcggcggtggcgacggcgatgggaccccagcgagagatctgcagctaggctggctgcacttgctccacgggtcaggggatcggagggggattgaagaatgcgccattaaaaggaaagatcaaggagtaaaccagaagaagaagaaaaagaggacttcaaagctgggaaggatgagttcttgcagcaacgtctgtgggtccaggcaggcacaggctgcagctgagggtggttaccagcgctatggagtccggtcctacctgcaccagttttatgaggactgtacagcctcaatttgggagtatgaggatgatttccagatccaaagatcacctaacaggtggagctcagtattctggaaggttggactcatctcaggtacagtttttgtgatcctcggattgactgttctggcagtgggctttcttgtgccccccaaaatcgaagcatttggcgaagccgattttgtggtggtcgacacacatgctgtccagtttaacagtgctctggacatgtacaagctggcaggagctgttctcttctgcattggaggcacgtccatggcagggtgcctgctgatgtcggtgtttgtaaagagctactccaaagaagaaaaattcctccagcagaagtttaaagaacgaatcgcagacatcaaagcccacacccagccggttacaaaagctccagggccaggggaaacaaagattccagtcactttgtccagggttcaaaatgtccagcctctactggcaacctgaaacctttcccaccccagttcttcttgtctgatttatgcccgtggttaaaaagagcaggccagttttcgagataaagaagatttggcgttgactgccctagggctgtgttcagctgtgggcaatataatgggtggactcacacttgctcagttcaggcagctctgctggagggcggtgccatgcctaagcctgtgcacatgcatccagctgcttaagatgggtgcttccttgtacccggccaccagaaaacccctggaactcctctttcatagatcgtgactttgtgttattttccgtgttgtttgaaagtgccgaacagtttagaccagctcaccaatggctaatgtggtccattttattttctaatattggtttatctaatgttttctgcgtggtgctgtcttccattcctgtctcactatgtgtaagattttgtcatatgtgttcatagaaacatggaattctctgattttgagccgaacatgagtttttagactgtatcttgacatgaggttcctgacattggatacaaagttatcagcattcacaaatctttttgttttctccattttttttccctttgagatgaagtgctgttcttttgcctaggttggagtacagcggtgaaatcatagcgcactgcagccttgaactcctgggctcaagcgatcctcccacctcagcctcccaagtagctgggactacaggcacctgccaccacccccagttaatattttttttaattttttttagaggcaggatcttgctgtccaattttttttaaaaagctaaaattgccaactttagaatcttgaccaaaaaaaattaattttaggagcatctatttatgcagtgttcaaaagtactgaattagaaaccaggaagttttagttccttctactacctgtgtgatcttggggaaattatttaacctctcagtcctaattttccccttctgtataatgggagttctggatcacaatatgtctgggctctcattacccaaacatctgagattccatttttgccatgtgtcatcgagtcgctccccaacagatgtttgtgatgtttttgtggctgtcaccatggtgggattctttcagaatgagactcctggaaattcactgagtcagcagccttcacaccatctacccttaaatatccaaccccagcaatttatacaacgctgtcatatttttaaaaaaacaaaagtaagccatcctcaaataaggaaccccttggtagatattaaccttaaaaagggttttcattctcaaacaagatgctttgttctccaacaagatgttcatctcatcacttgcacttttgttttaatgtatggattcagattagactgagaaaaatggatggtattttcttaaaattgtgccaccttagagcccccccccttttttttttcttccttcactggataaataaaatatgtgaacaagtggaacctgaattgcattgtcattccttcagtgtggttattttctctccaacatgtaattttccattctgagactgaataagctctgatgtttccccggctaaatggaagaataaatgaagcaattagt

SEQ ID NO: 158577 - DNA, 2354 bp, Homo sapiens
  Payload ID: 11033
  Gene Symbol: NRSN1
  Gene Name: neurensin 1
  Uniprot ID: Q8IZ57
  ENST ID: ENST00000378491
  CDS Start-End: 302-889
aaagctggaaccctgcccctttggagggggaggcggcggcggcggcggcggctgcgcgggcctcgggtgcgcgggcacgcgggactcccagctgtcaatcaggcgcgggctgagctctacgaggcggagcggcggcggtggcgacggcgatgggaccccagcgagagatctgcagctaggctggctgcacttgctccacgggtcaggggatcggagggggattgaagaatgcgccattaaaaggaaagatcaaggagtaaaccagaagaagaagaaaaagaggacttcaaagctgggaaggatgagttcttgcagcaacgtctgtgggtccaggcaggcacaggctgcagctgagggtggttaccagcgctatggagtccggtcctacctgcaccagttttatgaggactgtacagcctcaatttgggagtatgaggatgatttccagatccaaagatcacctaacaggtggagctcagtattctggaaggttggactcatctcaggtacagtttttgtgatcctcggattgactgttctggcagtgggctttcttgtgccccccaaaatcgaagcatttggcgaagccgattttgtggtggtcgacacacatgctgtccagtttaacagtgctctggacatgtacaagctggcaggagctgttctcttctgcattggaggcacgtccatggcagggtgcctgctgatgtcggtgtttgtaaagagctactccaaagaagaaaaattcctccagcagaagtttaaagaacgaatcgcagacatcaaagcccacacccagccggttacaaaagctccagggccaggggaaacaaagattccagtcactttgtccagggttcaaaatgtccagcctctactggcaacctgaaacctttcccaccccagttcttcttgtctgatttatgcccgtggttaaaaagagcaggccagttttcgagataaagaagatttggcgttgactgccctagggctgtgttcagctgtgggcaatataatgggtggactcacacttgctcagttcaggcagctctgctggagggcggtgccatgcctaagcctgtgcacatgcatccagctgcttaagatgggtgcttccttgtacccggccaccagaaaacccctggaactcctctttcatagatcgtgactttgtgttattttccgtgttgtttgaaagtgccgaacagtttagaccagctcaccaatggctaatgtggtccattttattttctaatattggtttatctaatgttttctgcgtggtgctgtcttccattcctgtctcactatgtgtaagattttgtcatatgtgttcatagaaacatggaattctctgattttgagccgaacatgagtttttagactgtatcttgacatgaggttcctgacattggatacaaagttatcagcattcacaaatctttttgttttctccattttttttccctttgagatgaagtgctgttcttttgcctaggttggagtacagcggtgaaatcatagcgcactgcagccttgaactcctgggctcaagcgatcctcccacctcagcctcccaagtagctgggactacaggcacctgccaccacccccagttaatattttttttaattttttttagaggcaggatcttgctgtccaattttttttaaaaagctaaaattgccaactttagaatcttgaccaaaaaaaattaattttaggagcatctatttatgcagtgttcaaaagtactgaattagaaaccaggaagttttagttccttctactacctgtgtgatcttggggaaattatttaacctctcagtcctaattttccccttctgtataatgggagttctggatcacaatatgtctgggctctcattacccaaacatctgagattccatttttgccatgtgtcatcgagtcgctccccaacagatgtttgtgatgtttttgtggctgtcaccatggtgggattctttcagaatgagactcctggaaattcactgagtcagcagccttcacaccatctacccttaaatatccaaccccagcaatttatacaacgctgtcatatttttaaaaaaacaaaagtaagccatcctcaaataaggaaccccttggtagatattaaccttaaaaagggttttcattctcaaacaagatgctttgttctccaacaagatgttcatctcatcacttgcacttttgttttaatgtatggattcagattagactgagaaaaatggatggtattttcttaaaattgtgccaccttagagcccccccccttttttttttcttccttcactggataaataaaatatgtgaacaagtggaacctgaa

SEQ ID NO: 158578 - DNA, 1047 bp, Homo sapiens
  Payload ID: 11034
  Gene Symbol: NRSN2
  Gene Name: neurensin 2
  Uniprot ID: Q9GZP1
  ENST ID: ENST00000382285
  CDS Start-End: 239-853
ggacccgcctttgctcggcggagacagcaggcagagagtttctctctagggaaaaggacgcagttggtgtggagcagggcatcggtggtcctgtcaggaagagtggcgcgggtgccgatgaggaaactgagacccagaaaggtggaagcacttgtctaaggtcacgcctccaggaagcagtgtgtccacgactccagtccaagtggtcaggctccagagcccacagtcccaggggtccatgatgccgagctgcaatcgttcctgcagctgcagccgcggccccagcgtggaggatggcaagtggtatggggtccgctcctacctgcacctcttctatgaggactgtgcaggcactgctctcagcgacgaccctgagggacctccggtcctgtgcccccgccggccctggccctcactgtgttggaagatcagcctgtcctcggggaccctgcttctgctgctgggtgtggcggctctgaccactggctatgcagtgccccccaagctggagggcatcggtgagggtgagttcctggtgttggatcagcgggcagccgactacaaccaggccctgggcacctgtcgcctggcaggcacagcgctctgtgtggcagctggagttctgctcgccatctgcctcttctgggccatgataggctggctgagccaggacaccaaggcagagcccttggaccccgaagccgacagccacgtggaggtcttcggggatgagccagagcagcagttgtcacccattttccgcaatgccagtggccagtcatggttctcgccacccgccagcccctttgggcaatcttctgtgcagactatccagcccaagagggactcctgagctgcccacatggcctaagatgtgggtcctggatccttccccccttctcaccataaccccctctcagtgtttccccaacttctcccttttagcagggtccctttagagcccaactccaggtcaaatctggagctcaaatcccagtgctccctccccaggagtggggccccaactcttccaagataccagcattc

SEQ ID NO: 158579 - DNA, 2088 bp, Homo sapiens
  Payload ID: 11034
  Gene Symbol: NRSN2
  Gene Name: neurensin 2
  Uniprot ID: Q9GZP1
  ENST ID: ENST00000382291
  CDS Start-End: 241-855
gcggccgccgtctgcagagccaggccctgaggcgggccggcgccccctcccccgccccgaactgcggcgcaggcgcgaaccggacccgcctttgctcggcggagacagcaggcagagagatgaggaaactgagacccagaaaggtggaagcacttgtctaaggtcacgcctccaggaagcagtgtgtccacgactccagtccaagtggtcaggctccagagcccacagtcccaggggtccatgatgccgagctgcaatcgttcctgcagctgcagccgcggccccagcgtggaggatggcaagtggtatggggtccgctcctacctgcacctcttctatgaggactgtgcaggcactgctctcagcgacgaccctgagggacctccggtcctgtgcccccgccggccctggccctcactgtgttggaagatcagcctgtcctcggggaccctgcttctgctgctgggtgtggcggctctgaccactggctatgcagtgccccccaagctggagggcatcggtgagggtgagttcctggtgttggatcagcgggcagccgactacaaccaggccctgggcacctgtcgcctggcaggcacagcgctctgtgtggcagctggagttctgctcgccatctgcctcttctgggccatgataggctggctgagccaggacaccaaggcagagcccttggaccccgaagccgacagccacgtggaggtcttcggggatgagccagagcagcagttgtcacccattttccgcaatgccagtggccagtcatggttctcgccacccgccagcccctttgggcaatcttctgtgcagactatccagcccaagagggactcctgagctgcccacatggcctaagatgtgggtcctggatccttccccccttctcaccataaccccctctcagtgtttccccaacttctcccttttagcagggtccctttagagcccaactccaggtcaaatctggagctcaaatcccagtgctccctccccaggagtggggccccaactcttccaagataccagcattcctcaagtcctcccaaaacttcctacccacaccctcttcccaaggccctcaggggcagaaaacatctccttcaacccgtccccactccttcctctgcatgaccttgggcaaacccttgccctttcaagccatcagctcctgcctctctgccatgagggctttggatcagattcctcttctcgccaggatgaggacacgcactgccctccatagacacagatgaaggggtgggggtcattcagctcgaatgggtcccagatgctcacttggcctttccctgcaggatgagtgaagacgtttgcctctcacagtgtgtcttctacctgcattttggcatcagagccccccagcccacccaccacaggcaattactagccctagttgataggtgaggtgggtgaagaaggctggaggtgacatgtccgaggtcacacaacaaagcagcatgcaggaactagaaacacatcttcagcctcctcctgggccagctcttgtgctacaggtggggcggagccagcccctcaccttcctggttccctgagggtcctcagggtggaggacaggtttggcccagaaagactagccagaggcctgatggtcccaggtggctctggatatactttggatatggatttaaatggtctctaagagccgggggtagggggcaggaaaagtgggttgtctttgcccctcaaagtccacctacctagaaaccaagcccacggtcttggccgtgaccctgataataaatgggctctctcagaggcgccagcccctccctccccagccggaggcgtcatctctcttctgtaccactagagggagctctgatgcagctggagagcagcgctcaaggctctcgcccctcccctccctaacccttaccttcagtctccaccagcctgaagggcctcctaggggatcctcaggcggcccccaccagggcacaccctactgtccttgtgcctcacgccccctcctcatcctgcaccccttccatcccaccttccctttcaataaacagctgggatggatactga

SEQ ID NO: 158580 - DNA, 941 bp, Homo sapiens
  Payload ID: 11034
  Gene Symbol: NRSN2
  Gene Name: neurensin 2
  ENST ID: ENST00000608875
  CDS Start-End: 1-209
acctgcacctcttctatgaggactgtgcaggcactgctctcagcgacgaccctgagggacctccggtcctgtgcccccgccggccctggccctcactgtgttggaagatcagcctgtcctcggggaccctgcttctgctgctgggtgtggcggctctgaccactggctatgcagtgccccccaagctggagggcatcggtgagggatgagtgaagacgtttgcctctcacagtgtgtcttctacctgcattttggcatcagagccccccagcccacccaccacaggcaattactagccctagttgataggtgaggtgggtgaagaaggctggaggtgacatgtccgaggtcacacaacaaagcagcatgcaggaactagaaacacatcttcagcctcctcctgggccagctcttgtgctacaggtggggcggagccagcccctcaccttcctggttccctgagggtcctcagggtggaggacaggtttggcccagaaagactagccagaggcctgatggtcccaggtggctctggatatactttggatatggatttaaatggtctctaagagccgggggtagggggcaggaaaagtgggttgtctttgcccctcaaagtccacctacctagaaaccaagcccacggtcttggccgtgaccctgataataaatgggctctctcagaggcgccagcccctccctccccagccggaggcgtcatctctcttctgtaccactagagggagctctgatgcagctggagagcagcgctcaaggctctcgcccctcccctccctaacccttaccttcagtctccaccagcctgaagggcctcctaggggatcctcaggcggcccccaccagggcacaccctactgtccttgtgcctcacgccccctcctcatcctgcaccccttccatcccaccttccctttcaataa

SEQ ID NO: 158581 - DNA, 697 bp, Homo sapiens
  Payload ID: 11034
  Gene Symbol: NRSN2
  Gene Name: neurensin 2
  ENST ID: ENST00000470439
  CDS Start-End: 215-697
gctttcagtctctgccttttcccgttctctgtcgtggcttttgttgttgttgtttttcctcctttccttccccgctcttcttttccctgaattatgaggaaactgagacccagaaaggtggaagcacttgtctaaggtcacgcctccaggaagcagtgtgtccacgactccagtccaagtggtcaggctccagagcccacagtcccaggggtccatgatgccgagctgcaatcgttcctgcagctgcagccgcggccccagcgtggaggatggcaagtggtatggggtccgctcctacctgcacctcttctatgaggactgtgcaggcactgctctcagcgacgaccctgagggacctccggtcctgtgcccccgccggccctggccctcactgtgttggaagatcagcctgtcctcggggaccctgcttctgctgctgggtgtggcggctctgaccactggctatgcagtgccccccaagctggagggcatcggtgagggtgagttcctggtgttggatcagcgggcagccgactacaaccaggccctgggcacctgtcgcctggcaggcacagcgctctgtgtggcagctggagttctgctcgccatctgcctcttctgggccatgataggctggctgagccaggacaccaaggcagagcccttggaccccgaagccgacagccacgtggaggtc

SEQ ID NO: 158582 - DNA, 578 bp, Homo sapiens
  Payload ID: 11034
  Gene Symbol: NRSN2
  Gene Name: neurensin 2
  ENST ID: ENST00000609179
  CDS Start-End: 238-578
gagggggatggagacctggaaaagggactgacggtgcagcgaggagaggaaggctcggttaagggatgggtcttccacgggaggggtggggaactgcgggagtgacggcagcttcgatgaggaaactgagacccagaaaggtggaagcacttgtctaaggtcacgcctccaggaagcagtgtgtccacgactccagtccaagtggtcaggctccagagcccacagtcccaggggtccatgatgccgagctgcaatcgttcctgcagctgcagccgcggccccagcgtggaggatggcaagtggtatggggtccgctcctacctgcacctcttctatgaggactgtgcaggcactgctctcagcgacgaccctgagggacctccggtcctgtgcccccgccggccctggccctcactgtgttggaagatcagcctgtcctcggggaccctgcttctgctgctgggtgtggcggctctgaccactggctatgcagtgccccccaagctggagggcatcggtgagggctggctgagccaggacaccaaggcagagcccttggaccccgaagccgacagcca

SEQ ID NO: 158583 - DNA, 712 bp, Homo sapiens
  Payload ID: 11034
  Gene Symbol: NRSN2
  Gene Name: neurensin 2
  ENST ID: ENST00000608736
  CDS Start-End: 122-370
atgaggaaactgagacccagaaaggtggaagcacttgtctaaggtcacgcctccaggaagcagtgtgtccacgactccagtccaagtggtcaggctccagagcccacagtcccaggggtccatgatgccgagctgcaatcgttcctgcagctgcagccgcggccccagcgtggaggatggcaagtggtatggggtccgctcctacctgcacctcttctatgaggactgtgcaggcactgctctcagcgacgaccctgagggacctccggtcctgtgcccccgccggccctggccctcactgtgttggaaggaaatggagcttaatttttctcctcttgagtgtgggctggactcagcaacttgcttctaacaagtagaatgtggaaaggcaaaaacagtgacttcacagtggaaaaatctggcagacaccaccttaaccaaatgaaggctggcaccaccagtcaaaagtcttgttgatatcacagcctctgaaatgatgtggtgagaagggcacttggcctgagtggcattcttcccccaaatccgtaacgtcagcctaatcatgagaagacccattctacaaaagatctgaccagcactcttcaaatgtgtccaggtcacgaaagacaaggaaaggacaagaaacggtctcaggttggaggagactaaggagacgtggctgaaggatacacaggatctccctgtactgtcc

SEQ ID NO: 158584 - DNA, 582 bp, Homo sapiens
  Payload ID: 11034
  Gene Symbol: NRSN2
  Gene Name: neurensin 2
  ENST ID: ENST00000609504
  CDS Start-End: 233-582
ggacccgcctttgctcggcggagacagcaggcagagagtttctctctagggaaaaggacgcagttggtgtggagcagggcatcggtggtcctgtcaggaagagtggcgcggatgaggaaactgagacccagaaaggtggaagcacttgtctaaggtcacgcctccaggaagcagtgtgtccacgactccagtccaagtggtcaggctccagagcccacagtcccaggggtccatgatgccgagctgcaatcgttcctgcagctgcagccgcggccccagcgtggaggatggcaagtggtatggggtccgctcctacctgcacctcttctatgaggactgtgcaggcactgctctcagcgacgaccctgagggacctccggtcctgtgcccccgccggccctggccctcactgtgttggaagatcagcctgtcctcggggaccctgcttctgctgctgggtgtggcggctctgaccactggctatgcagtgccccccaagctggagggcatcggtgagggctggctgagccaggacaccaaggcagagcccttggaccccgaagccgacagccacgtggaggt

SEQ ID NO: 158585 - DNA, 504 bp, Homo sapiens
  Payload ID: 11034
  Gene Symbol: NRSN2
  Gene Name: neurensin 2
  ENST ID: ENST00000608467
  CDS Start-End: 145-342
cggcggagacagcaggcagagagatgaggaaactgagacccagaaaggtggaagcacttgtctaaggtcacgcctccaggaagcagtgtgtccacgactccagtccaagtggtcaggctccagagcccacagtcccaggggtccatgatgccgagctgcaatcgttcctgcagctgcagccgcggccccagcgtggaggatggcaagtggtatggggtccgctcctacctgcacctcttctatgaggactgtgcaggcactgctctcagcgacgaccctgagggacctccggtcctgtgcccccgccggccctggccctcactgtgttggaagatgcggtaactgatgatcagagaggaaatggagcttaatttttctcctcttgagtgtgggctggactcagcaacttgcttctaacaagtagaatgtggaaaggcaaaaacagtgacttcacagtggaaaaatctggcagacaccaccttaaccaaatgaaggctggcacca

SEQ ID NO: 158586 - DNA, 1852 bp, Homo sapiens
  Payload ID: 11034
  Gene Symbol: NRSN2
  Gene Name: neurensin 2
  Uniprot ID: Q9GZP1
  ENST ID: ENST00000621012
  CDS Start-End: 12-626
cccaggggtccatgatgccgagctgcaatcgttcctgcagctgcagccgcggccccagcgtggaggatggcaagtggtatggggtccgctcctacctgcacctcttctatgaggactgtgcaggcactgctctcagcgacgaccctgagggacctccggtcctgtgcccccgccggccctggccctcactgtgttggaagatcagcctgtcctcggggaccctgcttctgctgctgggtgtggcggctctgaccactggctatgcagtgccccccaagctggagggcatcggtgagggtgagttcctggtgttggatcagcgggcagccgactacaaccaggccctgggcacctgtcgcctggcaggcacagcgctctgtgtggcagctggagttctgctcgccatctgcctcttctgggccatgataggctggctgagccaggacaccaaggcagagcccttggaccccgaagccgacagccacgtggaggtcttcggggatgagccagagcagcagttgtcacccattttccgcaatgccagtggccagtcatggttctcgccacccgccagcccctttgggcaatcttctgtgcagactatccagcccaagagggactcctgagctgcccacatggcctaagatgtgggtcctggatccttccccccttctcaccataaccccctctcagtgtttccccaacttctcccttttagcagggtccctttagagcccaactccaggtcaaatctggagctcaaatcccagtgctccctccccaggagtggggccccaactcttccaagataccagcattcctcaagtcctcccaaaacttcctacccacaccctcttcccaaggccctcaggggcagaaaacatctccttcaacccgtccccactccttcctctgcatgaccttgggcaaacccttgccctttcaagccatcagctcctgcctctctgccatgagggctttggatcagattcctcttctcgccaggatgaggacacgcactgccctccatagacacagatgaaggggtgggggtcattcagctcgaatgggtcccagatgctcacttggcctttccctgcaggatgagtgaagacgtttgcctctcacagtgtgtcttctacctgcattttggcatcagagccccccagcccacccaccacaggcaattactagccctagttgataggtgaggtgggtgaagaaggctggaggtgacatgtccgaggtcacacaacaaagcagcatgcaggaactagaaacacatcttcagcctcctcctgggccagctcttgtgctacaggtggggcggagccagcccctcaccttcctggttccctgagggtcctcagggtggaggacaggtttggcccagaaagactagccagaggcctgatggtcccaggtggctctggatatactttggatatggatttaaatggtctctaagagccgggggtagggggcaggaaaagtgggttgtctttgcccctcaaagtccacctacctagaaaccaagcccacggtcttggccgtgaccctgataataaatgggctctctcagaggcgccagcccctccctccccagccggaggcgtcatctctcttctgtaccactagagggagctctgatgcagctggagagcagcgctcaaggctctcgcccctcccctccctaacccttaccttcagtctccaccagcctgaagggcctcctaggggatcctcaggcggcccccaccagggcacaccctactgtccttgtgcctcacgccccctcctcatcctgcaccccttccatcccaccttccctttcaataaacagctgggatgg

SEQ ID NO: 158587 - DNA, 3315 bp, Homo sapiens
  Payload ID: 11035
  Gene Symbol: NRXN1
  Gene Name: neurexin 1
  Uniprot ID: P58400
  ENST ID: ENST00000342183
  CDS Start-End: 806-2134
ttttttctttttctttttctttttctgtttctctcccttactccttcgtctgcatcttcttctcagctgcctttccgccgttcgattcccacttccttcagaagggcgcactcttccctctgaacccctcgccgggcgtaagtgtcaggaggcggcggacgcggagattgcctcgggagcaggcgatgcgcgccgctgctccgcgcgctgcccgggggaggctggcgctagcgggcgagccggccggggctgaatggagggaaggggcgcctggattccatggggtctgcttctgtcttgaaaggaggttgggccggcgaagtggcctccctagtccccgcacacaaagctaaatggatttacctagtggattcgcggtggatgtctgtcatgtagaagtgaggaccttccaggaggagctttaaacaatttctcggccccccacccgccggcacgcactctcgcccgaaactctttgggagtatctctcgagaacctggagccctggaaatctgggagcagccacccgctccgcgcttgctgttcccggggctgcctttccggacaagcccctctccagctgcattcgcctcggctatgtttcggattgtttggggtgctaggcacggcggactccaggaccccgagaagactgtccgaaggagggagaggatgggtgccctggcgcggtgaggcggccggcccctcagcccactccgcgccgcccgctcccctgcgccctctcctctccccgcgccccaaactttgcctcccgcggcggctgcccctcggcgggcgccccgccatgtaccagaggatgctccggtgcggcgccgagctgggctcgcccgggggcggcggcggcggcggcggcggcggcggcgcaggggggcgcctggccctgctttggatagtcccgctcaccctcagcggcctcctaggagtggcgtggggggcatccagtttgggagcgcaccacatccaccatttccatggcagcagcaagcatcattcagtgcctattgcaatctacaggtcaccggcatccttgcgaggcggacacgctgggacgacatatatctttagcaaaggtggtggacaaatcacgtataagtggcctcctaatgaccgacccagtacacgagcagacagactggccataggttttagcactgttcagaaagaagccgtattggtgcgagtggacagttcttcaggcttgggtgactacctagaactgcatatacaccagggaaaaattggagttaagtttaatgttgggacagatgacatcgccattgaagaatccaatgcaatcattaatgatgggaaataccatgtagttcgtttcacgaggagtggtggcaatgccacgttgcaggtggacagctggccagtgatcgagcgctaccctgcagggcgtcagctcacaatcttcaatagccaagcaaccataataattggcgggaaagagcagggccagcccttccagggccagctctctgggctgtactacaatggcttgaaagttctgaatatggcagccgaaaacgatgccaacatcgccatagtgggaaatgtgagactggttggtgaagtgccttcctctatgacaactgagtcaacagccactgccatgcaatcagagatgtccacatcaattatggagactaccacgaccctggctactagcacagccagaagaggaaagcccccgacaaaagaacccattagccagaccacagatgacatccttgtggcctcagcagagtgtcccagcgatgatgaggacattgacccctgtgagccgagctcaggtgggttagccaacccaacccgagcaggcggcagagagccgtatccaggctcagcagaagtgatccgggagtccagcagcaccacgggtatggtcgttgggatagtagccgctgccgccctgtgcatccttatcctcctctatgccatgtacaagtacagaaaccgggatgaaggctcataccatgtggacgagagtcgaaactacatcagtaactcagcacagtccaatggggctgttgtaaaggagaaacaacccagcagtgcgaaaagctccaacaaaaataagaaaaacaaggataaagagtattatgtctgatcccaagatcttaaatggacacttgtatagaaatagtcttcattttatctgagacataatataaacttatttactttcctttttatgaagcacatacaaaagaagacagggaatgcaatcaggaaggaaagactttttaaaaaataaaaacaagtatctcatgctcttgtttctcaaaaaagaaaaacaaaaaacaaaaaacaggggccaataaattccctaacatccacagtgttttcatttactctgcttgtctttatgttgctggaacatttctaaaagacagtgatgaccgcacgcattcataaagcaaaggagtactacagcatcaaggcacaacacaaaaaccaacacaaaacataacacaaaaaagaagctacctatgatcctggatttagccaaagtgctagcgctttcctgagaagtcagtccaattgccagagaagactgtccttttgagtgactcaacctgcaaacctttaagagtttgccgcctggtgcaactggagcagtggttggaacttgcatttgaaacaaagtgctggcttttttgaagacttgtgtaggaacacattcaaaaagcccctttctggttgtgagagaggaaaaaaaagtatggaggccttattttcaaaaatgtgaaatataaggcacgttttcacacaaaatttcaaaacaaaaacaagagggcatagatgcaatcattgggaaattttcatgcacgcttattatgttattacatatgtttatataaaatccatctctgtgtgctttctggactgtgataagtgacgttttatagcctgttgtatagaaaatgcaaaatatatctctgctcttcagccatttttggtaaattcaatgttataagtgttgctaagtatagggagttttatgacatcagagcaacaattatttcagttgggtttttctttttttttgccaccattataaattgccacaattacttttattttttaaagaaattacagtgtagtgtttattctaaggaagatatgtatgaatgtatatacaaagactcagctacttcttttcttatatgtacagccttcattctgttgcaattaagttttagtacttgtatgaaaggtgtgaattagaaagtcacatatatacatatgtatcttataatcttttctccctgaaatactcacattccc

SEQ ID NO: 158588 - DNA, 1338 bp, Homo sapiens
  Payload ID: 11035
  Gene Symbol: NRXN1
  Gene Name: neurexin 1
  ENST ID: ENST00000378262
  CDS Start-End: 204-632
ttttctgtgtcttttctcgcccatctgtgtgcagggcactgataggccgggctgatgcgcaggcaatttatcatcttgatctcccactgagtcagggagctctcctgtcaccagtattgatttcagaggatggactaaatttcctaggatttccattaagaattaagaaaaaagctctaagcacgcagggtagccagacagacatggatatgagatggcactgtgaaaacttgcagaccacagatgacatccttgtggcctcagcagagtgtcccagcgatgatgaggacattgacccctgtgagccgagctcaggtgggttagccaacccaacccgagcaggcggcagagagccgtatccaggctcagcagaagtgatccgggagtccagcagcaccacgggtatggtcgttgggatagtagccgctgccgccctgtgcatccttatcctcctctatgccatgtacaagtacagaaaccgggatgaaggctcataccatgtggacgagagtcgaaactacatcagtaactcagcacagtccaatggggctgttgtaaaggagaaacaacccagcagtgcgaaaagctccaacaaaaataagaaaaacaaggataaagagtattatgtctgatcccaagatcttaaatggacacttgtatagaaatagtcttcattttatctgagacataatataaacttatttactttcctttttatgaagcacatacaaaagaagacagggaatgcaatcaggaaggaaagactttttaaaaaataaaaacaagtatctcatgctcttgtttctcaaaaaagaaaaacaaaaaacaaaaaacaggggccaataaattccctaacatccacagtgttttcatttactctgcttgtctttatgttgctggaacatttctaaaagacagtgatgaccgcacgcattcataaagcaaaggagtactacagcatcaaggcacaacacaaaaaccaacacaaaacataacacaaaaaagaagctacctatgatcctggatttagccaaagtgctagcgctttcctgagaagtcagtccaattgccagagaagactgtccttttgagtgactcaacctgcaaacctttaagagtttgccgcctggtgcaactggagcagtggttggaacttgcatttgaaacaaagtgctggcttttttgaagacttgtgtaggaacacattcaaaaagcccctttctggttgtgagagaggaaaaaaaagtatggaggccttattttcaaaaatgtgaaatataaggcacgttttcacacaaaatttcaaaacaaaaacaagagggcatagatgcaatcatt

SEQ ID NO: 158589 - DNA, 9375 bp, Homo sapiens
  Payload ID: 11035
  Gene Symbol: NRXN1
  Gene Name: neurexin 1
  Uniprot ID: Q9ULB1
  ENST ID: ENST00000406316
  CDS Start-End: 1503-5936
tcgttcgttctctctctctctctctctctctctctctctctctctctctctttctttctttccgatggggaagagagggtggtgacaagttagaagcgcttgcggaaggtccccgcccccaggatcaggctccccctgcaaggggacgatgcaaaggtaaaagcacctcgctccgcagcatccagacctggaggggctgcgaccacgggccgagcccacccattccccagccaaaggacgggcccgccgctctccatggtactgcggagagctcagctccgcccttctctttcagaaggacagcacccggcgtcacgtaacccagccttctcaggctccaccaccgccttttccttcccagctctttccctctcctccccctcctcctccttctcctcctcctcctcctcctgctcccctccgttgcctgttctcccctcccgcactcctggagatagacgctcaagcctgacgcctctgaaaaggcagcagcagtcgccttatccatagacctcaggaaattcgctttgaccgatgcatgcttcaggctctggctcgagctgaggggaataaccgggcagatgtctgagtccttaaaaaagacaagataaaaccaaaatgcatcaccaacacacaaccaattgatgtgctggcatcttagcttggccctgcagaggcagagagaaaagaagaggagctgttgcgatttccacatctaacagcttctggctatttcgcaactgctgggtttgagtcctactgttgccgtggctgaaaagagaagtaaaatccaacttgtgagaccacgcacaaggaattaggctttggctgcagcggtgctgaagcccatgctatgacagaagaagcaggcctttgaagctatcctcgggttaagaaatggtgccctaaagaggcaagcatccctttctccgttctgctgtaagacaccacatctgaaggagacagacttgaggcattcacaagcatccaaggatactggctcactgctggcttcctgtactttcttgagaaaagtgttttctttttactgactctcactgcttccttttggcctggtaccactggtggaacctggcagataatgggatttgaggagttaagtatctgttgacactgcagatactcttaaattagttaatcagactcaaatgggtcagtgctttcccttgatcttttgttgaagccttttccagaacgttgtctccaaagtgcatcctccctttggtctggaagttctgtggctaccctgtaccactggggtcaacgttttccagttggaagaggactacagggagagagggcggggttattggaagaagaagaagaaaaaaagaactagataaaggagggcacatccctctcactcccgcctttccccttacctttctgtctctcgggacccttatttcttcgtcacggtgtccaggaccattttgaccctgtcggccccggcacccccccgccgcaccccagccccgagcatggggacggcgctgctccagcgcgggggctgttttcttctgtgcctctcgctgctgctcctgggctgctgggcggagctgggcagcgggctggagtttccgggcgccgagggccaatggacgcgcttccccaagtggaacgcctgctgcgagagcgagatgagcttccagctcaagactcgcagcgcccgcggcctcgtgctctacttcgacgacgagggcttctgcgacttcctggagctgattctgacgcgcggcggccgcctgcagctcagcttctccatcttctgcgctgagcctgcgacgctcctggccgacacgccggttaacgacggcgcctggcacagcgtgcgcatccgccgccagttccgcaacaccacgctcttcatcgaccaggtggaggccaagtgggtggaggtcaagtccaagcgcagggacatgacggtgttcagcggccttttcgtcggggggctgcccccggaactgcgcgccgcggcgctcaagctcaccctggcctcggtgagggagcgggagcccttcaaggggtggattcgtgacgtgagggtcaactcctcgcaggtcctgcccgtggacagcggcgaggtgaagctggacgatgagccgcccaacagcggcgggggaagcccgtgcgaggcgggcgaggagggcgagggcggggtgtgcctcaacggaggtgtgtgctccgtggtggacgaccaggccgtgtgcgactgctcgcgaaccggcttccgcggcaaggactgcagccaagaagacaacaatgtggaaggtctggcgcacctgatgatgggcgaccaaggtaaaagtaaaggaaaagaagaatatattgccacgttcaaaggatctgaatacttctgctacgacttgtctcaaaaccccattcaaagcagcagtgatgaaataactctgtcatttaaaacccttcagaggaatggactgatgcttcacactgggaaatcggctgattatgtcaatcttgccctgaaaaatggagctgtctctctggtcattaatttgggatcaggggcctttgaagcactagtggagcctgtgaatggaaagtttaatgataatgcctggcatgatgtgaaagtcaccaggaatctgcgtcagcactcaggcattggacacgctatggtgacaatatcagtggatgggattcttaccacaacgggctacacgcaagaagattataccatgctggggtctgatgactttttctatgttggaggcagtcccagcacagccgaccttccagggtcaccagtcagtaacaactttatgggctgtctcaaagaggttgtatataaaaataatgatgtgaggctggaattatctcgacttgccaagcaaggagatcctaagatgaagatccatggagtggtggcatttaaatgtgagaatgttgcaactttagacccaatcacctttgaaaccccagagtctttcatctctttgcctaaatggaatgcaaagaaaactggctccatatcatttgatttccgtacaacagagccaaatggcctcatcttatttagccatggcaagccaagacatcagaaagatgccaagcacccacagatgataaaggtggacttctttgctattgagatgctagatggccacctctacctcctcctggacatggggtcaggtactataaaaataaaagccctgttgaagaaagtgaatgatggagaatggtatcatgtggacttccagagagacggacggtcaggtaccatttctgtcaacacgttgcgtactccctacactgctcctggtgagagtgagattctggacctggatgatgagttgtacctgggggggctgccagaaaataaagctggccttgtcttccccaccgaggtgtggactgctctgctcaactatggctacgtgggctgcatcagggatttgttcatcgatggccaaagcaaagatatccggcaaatggctgaagttcaaagtactgctggagtgaagccttcctgctcaaaggaaacagcaaaaccgtgccttagcaacccttgcaaaaacaatggcatgtgcagggatgggtggaacagatatgtctgtgattgttccggaacaggctatcttggcaggtcctgtgagagagaggcaacggttttgagctatgatgggagcatgtttatgaaaattcagctccccgtagtcatgcatacggaggctgaggatgtttccttacggttccgatcccagcgtgcatatggcattctgatggcaaccacttctagagactctgctgacaccctccgcctggagctagacgcaggacgtgtgaaactgacggtcaatctagattgtatcaggattaactgtaattccagcaaaggtcccgagactctttttgctggctataacctcaatgataacgagtggcacacagtgcgtgtagttcggcgtggaaaaagtttaaagttaacagtggatgaccaacaggccatgacaggtcaaatggcaggtgatcatactaggctggagttccataacatagagactggcatcatcacagaacgacggtatctttcttctgtcccctccaacttcattggacacctgcagagcttgacatttaatggaatggcatacattgacctgtgtaaaaatggcgacatagattactgtgagcttaatgccagatttggcttcaggaacatcatagcagatcctgtcaccttcaagaccaaatcgagctatgttgccttagctaccttgcaagcctacacttctatgcatctttttttccagttcaagacaacatccctagatggattaattctatataacagtggggatggaaatgactttattgtggttgaattagttaaagggtacttacattacgtgtttgatttgggaaatggtgctaacctcatcaaaggaagctcaaataaacctctcaatgacaatcagtggcacaacgtgatgatatcaagggacaccagcaacctccacactgtaaagattgacacaaaaatcacaacgcaaatcaccgccggagccaggaacttagacctcaagagtgacttatatataggaggagtagctaaagaaacatacaaatccttaccaaaacttgtacatgccaaagaaggctttcaaggctgcctggcatcagttgatttaaatggacggcttccggacctcatctccgatgctcttttctgcaacggacagatcgagagaggatgtgaagggcccagcacaacctgccaagaggactcatgttccaatcaaggtgtgtgcttgcaacaatgggatggcttcagctgtgactgtagtatgacttccttcagtggaccactctgcaatgaccctgggacgacatatatctttagcaaaggtggtggacaaatcacgtataagtggcctcctaatgaccgacccagtacacgagcagacagactggccataggttttagcactgttcagaaagaagccgtattggtgcgagtggacagttcttcaggcttgggtgactacctagaactgcatatacaccagggaaaaattggagttaagtttaatgttgggacagatgacatcgccattgaagaatccaatgcaatcattaatgatgggaaataccatgtagttcgtttcacgaggagtggtggcaatgccacgttgcaggtggacagctggccagtgatcgagcgctaccctgcagggcgtcagctcacaatcttcaatagccaagcaaccataataattggcgggaaagagcagggccagcccttccagggccagctctctgggctgtactacaatggcttgaaagttctgaatatggcagccgaaaacgatgccaacatcgccatagtgggaaatgtgagactggttggtgaagtgccttcctctatgacaactgagtcaacagccactgccatgcaatcagagatgtccacatcaattatggagactaccacgaccctggctactagcacagccagaagaggaaagcccccgacaaaagaacccattagccagaccacagatgacatccttgtggcctcagcagagtgtcccagcgatgatgaggacattgacccctgtgagccgagctcaggtgggttagccaacccaacccgagcaggcggcagagagccgtatccaggctcagcagaagtgatccgggagtccagcagcaccacgggtatggtcgttgggatagtagccgctgccgccctgtgcatccttatcctcctctatgccatgtacaagtacagaaaccgggatgaaggctcataccatgtggacgagagtcgaaactacatcagtaactcagcacagtccaatggggctgttgtaaaggagaaacaacccagcagtgcgaaaagctccaacaaaaataagaaaaacaaggataaagagtattatgtctgatcccaagatcttaaatggacacttgtatagaaatagtcttcattttatctgagacataatataaacttatttactttcctttttatgaagcacatacaaaagaagacagggaatgcaatcaggaaggaaagactttttaaaaaataaaaacaagtatctcatgctcttgtttctcaaaaaagaaaaacaaaaaacaaaaaacaggggccaataaattccctaacatccacagtgttttcatttactctgcttgtctttatgttgctggaacatttctaaaagacagtgatgaccgcacgcattcataaagcaaaggagtactacagcatcaaggcacaacacaaaaaccaacacaaaacataacacaaaaaagaagctacctatgatcctggatttagccaaagtgctagcgctttcctgagaagtcagtccaattgccagagaagactgtccttttgagtgactcaacctgcaaacctttaagagtttgccgcctggtgcaactggagcagtggttggaacttgcatttgaaacaaagtgctggcttttttgaagacttgtgtaggaacacattcaaaaagcccctttctggttgtgagagaggaaaaaaaagtatggaggccttattttcaaaaatgtgaaatataaggcacgttttcacacaaaatttcaaaacaaaaacaagagggcatagatgcaatcattgggaaattttcatgcacgcttattatgttattacatatgtttatataaaatccatctctgtgtgctttctggactgtgataagtgacgttttatagcctgttgtatagaaaatgcaaaatatatctctgctcttcagccatttttggtaaattcaatgttataagtgttgctaagtatagggagttttatgacatcagagcaacaattatttcagttgggtttttctttttttttgccaccattataaattgccacaattacttttattttttaaagaaattacagtgtagtgtttattctaaggaagatatgtatgaatgtatatacaaagactcagctacttcttttcttatatgtacagccttcattctgttgcaattaagttttagtacttgtatgaaaggtgtgaattagaaagtcacatatatacatatgtatcttataatcttttctccctgaaatactcacattcccacatacattcactattttcacacacacacacacacacacacacacacacacacacacacacacacgaatccacagcaatccatcagatatgctggaagatccaaacgtgcatacagtagcaaatatttattgacaaattgaaaagcaggaaggaagagggttgtgccaaggtattgatgacaaatggggtgatttgcttcattgagatcttgctcccaggtaaccttaagaagattttagtccctaaagaaatgaacctttccttatcaaatagaatatcactgatatactgctgcatgaataagaaccattatgtgggcaggttatggaagcaaaattggttaatctacaccttaactctggctgctgcaattgaaaactttctttctaataaaataatatatatatctctgaatctgatgtgcatgatgaacatttctggaaagtaaacactttctctcgactaagaaagtatttttcagtaatttttgattctgtattactacccacttaaaaaatcattctctgttaattattgactatgttttaacttttctggttttacatatatatcattaaatatagttttagtttaacacattaagtagtggaaaagtatagattatacacttgttttgcatattattcaatgatgttcacagcaataaattactaatatgagaaggtagtgcaaaaaatgcattattacattgcaagttgatgtttcaggaaaaattggttgcattacttgaataccttctaaaagaacgataaaaaattttgtagaagagaagaatatctttccaattagctttaatcagcaaaggcaaaaaatgcaaaacatcttttgtgatactttagttgatgaaaaaaaagccaagaagtggcctggatttcagacatacagcaccttagaaatatgtataattcatagcaaatcaccactatctatggttgccaagtaattgttgtgtacaaagaaatttagtggctttttatgacccagaaagtagaaggtataaaatgaaaatttaatatccattgcttcttttctagattttcattttttttaatttgccacattaaataattcacgagtcttttcttttcccccgtctcattcagtcttactcagggaaagccagttaaataagaagggaagtgtaaaactactaatttacagcttgaagggtttttttttttaagattgcttttctattttatctattaagcttgaaccagtttccatctggaaagattctaaaatataatagaaaataaattgaataatggtaattttaagcagtatatctatgaaatgtgttgtttgggattgatttcaatgtttctccccagcgtaaattttaaagttacatgcaatgattgatatagtttattatcagcaaaattatttctaatattattggcttacacaaactctagcaaaaattattttttcctcaatggaaaaagaaaagagaggaacagagttagaaagagaaaatgacttgaatcccaagtatcttcataccaaacatatcagggttccctgcatagtttgcagttgattgaggatttcacacgacttggcataaatttgattacatctctagactgtaacttttctgattgattatgcttcttttttatccatgtaatgtgttgccttttttaaaagaacaaatactacaataacgtgtgaagtggtcaatccctaagacatcaaagaaaggccacataaccctacccttctagtgctttgtgtgattgggtatcaaaggggttttcttcttctttttttgtttgtttgtttttctgttgcaaggccaatttatccattattggaaatgctaagcaagtggaatttactgttttgttaataaaatatttcttaatacaactgtgatttattgattttaaaaattatatgcggcaccatttcgtgcttaagtgggaaagtaaagaaggctgcatttgaagggaagacccatccttatattatagaggaagaatgttgactctcttttttctggatttaactagtcattaaagacctctatattcatacacttaaagatgtagccattaaatgtacttttgttatatttgttcatcttgatatgccagaaaccataaactcatacagtattagttgcaaacaatattaaaatactaatttcataaatatgctttttctctataaaagacaatggaatccaagttaagtaaacctgtgattaaattccaacactatcaca

SEQ ID NO: 158590 - DNA, 5870 bp, Homo sapiens
  Payload ID: 11035
  Gene Symbol: NRXN1
  Gene Name: neurexin 1
  ENST ID: ENST00000401669
  CDS Start-End: 1142-5665
ctctttccctctcctccccctcctcctccttctcctcctcctcctcctcctgctcccctccgttgcctgttctcccctcccgcactcctggagatagacgctcaagcctgacgcctctgaaaaggcagcagcagtcgccttatccatagacctcaggaaattcgctttgaccgatgcatgcttcaggctctggctcgagctgaggggaataaccgggcagatgtctgagtccttaaaaaagacaagataaaaccaaaatgcatcaccaacacacaaccaattgatgtgctggcatcttagcttggccctgcagaggcagagagaaaagaagaggagctgttgcgatttccacatctaacagcttctggctatttcgcaactgctgggtttgagtcctactgttgccgtggctgaaaagagaagtaaaatccaacttgtgagaccacgcacaaggaattaggctttggctgcagcggtgctgaagcccatgctatgacagaagaagcaggcctttgaagctatcctcgggttaagaaatggtgccctaaagaggcaagcatccctttctccgttctgctgtaagacaccacatctgaaggagacagacttgaggcattcacaagcatccaaggatactggctcactgctggcttcctgtactttcttgagaaaagtgttttctttttactgactctcactgcttccttttggcctggtaccactggtggaacctggcagataatgggatttgaggagttaagtatctgttgacactgcagatactcttaaattagttaatcagactcaaatgggtcagtgctttcccttgatcttttgttgaagccttttccagaacgttgtctccaaagtgcatcctccctttggtctggaagttctgtggctaccctgtaccactggggtcaacgttttccagttggaagaggactacagggagagagggcggggttattggaagaagaagaagaaaaaaagaactagataaaggagggcacatccctctcactcccgcctttccccttacctttctgtctctcgggacccttatttcttcgtcacggtgtccaggaccattttgaccctgtcggccccggcacccccccgccgcaccccagccccgagcatggggacggcgctgctccagcgcgggggctgttttcttctgtgcctctcgctgctgctcctgggctgctgggcggagctgggcagcgggctggagtttccgggcgccgagggccaatggacgcgcttccccaagtggaacgcctgctgcgagagcgagatgagcttccagctcaagactcgcagcgcccgcggcctcgtgctctacttcgacgacgagggcttctgcgacttcctggagctgattctgacgcgcggcggccgcctgcagctcagcttctccatcttctgcgctgagcctgcgacgctcctggccgacacgccggttaacgacggcgcctggcacagcgtgcgcatccgccgccagttccgcaacaccacgctcttcatcgaccaggtggaggccaagtgggtggaggtcaagtccaagcgcagggacatgacggtgttcagcggccttttcgtcggggggctgcccccggaactgcgcgccgcggcgctcaagctcaccctggcctcggtgagggagcgggagcccttcaaggggtggattcgtgacgtgagggtcaactcctcgcaggtcctgcccgtggacagcggcgaggtgaagctggacgatgagccgcccaacagcggcgggggaagcccgtgcgaggcgggcgaggagggcgagggcggggtgtgcctcaacggaggtgtgtgctccgtggtggacgaccaggccgtgtgcgactgctcgcgaaccggcttccgcggcaaggactgcagccaagaagacaacaatgtggaaggtctggcgcacctgatgatgggcgaccaaggtaaaagtaaaggaaaagaagaatatattgccacgttcaaaggatctgaatacttctgctacgacttgtctcaaaaccccattcaaagcagcagtgatgaaataactctgtcatttaaaacccttcagaggaatggactgatgcttcacactgggaaatcggctgattatgtcaatcttgccctgaaaaatggagctgtctctctggtcattaatttgggatcaggggcctttgaagcactagtggagcctgtgaatggaaagtttaatgataatgcctggcatgatgtgaaagtcaccaggaatctgcgtcagcactcaggcattggacacgctatggtgacaatatcagtggatgggattcttaccacaacgggctacacgcaagaagattataccatgctggggtctgatgactttttctatgttggaggcagtcccagcacagccgaccttccagggtcaccagtcagtaacaactttatgggctgtctcaaagaggttgtatataaaaataatgatgtgaggctggaattatctcgacttgccaagcaaggagatcctaagatgaagatccatggagtggtggcatttaaatgtgagaatgttgcaactttagacccaatcacctttgaaaccccagagtctttcatctctttgcctaaatggaatgcaaagaaaactggctccatatcatttgatttccgtacaacagagccaaatggcctcatcttatttagccatggcaagccaagacatcagaaagatgccaagcacccacagatgataaaggtggacttctttgctattgagatgctagatggccacctctacctcctcctggacatggggtcaggtactataaaaataaaagccctgttgaagaaagtgaatgatggagaatggtatcatgtggacttccagagagacggacggtcaggtaccatttctgtcaacacgttgcgtactccctacactgctcctggtgagagtgagattctggacctggatgatgagttgtacctgggggggctgccagaaaataaagctggccttgtcttccccaccgaggtgtggactgctctgctcaactatggctacgtgggctgcatcagggatttgttcatcgatggccaaagcaaagatatccggcaaatggctgaagttcaaagtactgctggagtgaagccttcctgctcaaaggaaacagcaaaaccgtgccttagcaacccttgcaaaaacaatggcatgtgcagggatgggtggaacagatatgtctgtgattgttccggaacaggctatcttggcaggtcctgtgagagagaggcaacggttttgagctatgatgggagcatgtttatgaaaattcagctccccgtagtcatgcatacggaggctgaggatgtttccttacggttccgatcccagcgtgcatatggcattctgatggcaaccacttctagagactctgctgacaccctccgcctggagctagacgcaggacgtgtgaaactgacggtcaatctagattgtatcaggattaactgtaattccagcaaaggtcccgagactctttttgctggctataacctcaatgataacgagtggcacacagtgcgtgtagttcggcgtggaaaaagtttaaagttaacagtggatgaccaacaggccatgacaggtcaaatggcaggtgatcatactaggctggagttccataacatagagactggcatcatcacagaacgacggtatctttcttctgtcccctccaacttcattggacacctgcagagcttgacatttaatggaatggcatacattgacctgtgtaaaaatggcgacatagattactgtgagcttaatgccagatttggcttcaggaacatcatagcagatcctgtcaccttcaagaccaaatcgagctatgttgccttagctaccttgcaagcctacacttctatgcatctttttttccagttcaagacaacatccctagatggattaattctatataacagtggggatggaaatgactttattgtggttgaattagttaaagggtacttacattacgtgtttgatttgggaaatggtgctaacctcatcaaaggaagctcaaataaacctctcaatgacaatcagtggcacaacgtgatgatatcaagggacaccagcaacctccacactgtaaagattgacacaaaaatcacaacgcaaatcaccgccggagccaggaacttagacctcaagagtgacttatatataggaggagtagctaaagaaacatacaaatccttaccaaaacttgtacatgccaaagaaggctttcaaggctgcctggcatcagttgatttaaatggacggcttccggacctcatctccgatgctcttttctgcaacggacagatcgagagaggatgtgaagggcccagcacaacctgccaagaggactcatgttccaatcaaggtgtgtgcttgcaacaatgggatggcttcagctgtgactgtagtatgacttccttcagtggaccactctgcaatgaccctgggacgacatatatctttagcaaaggtggtggacaaatcacgtataagtggcctcctaatgaccgacccagtacacgagcagacagactggccataggttttagcactgttcagaaagaagccgtattggtgcgagtggacagttcttcaggcttgggtgactacctagaactgcatatacaccagggaaaaattggagttaagtttaatgttgggacagatgacatcgccattgaagaatccaatgcaatcattaatgatgggaaataccatgtagttcgtttcacgaggagtggtggcaatgccacgttgcaggtggacagctggccagtgatcgagcgctaccctgcaggaaacaatgataacgagcgcctggcgattgctagacagcgaattccatatcgacttggtcgagtagttgatgaatggctactcgacaaagggcgtcagctcacaatcttcaatagccaagcaaccataataattggcgggaaagagcagggccagcccttccagggccagctctctgggctgtactacaatggcttgaaagttctgaatatggcagccgaaaacgatgccaacatcgccatagtgggaaatgtgagactggttggtgaagtgccttcctctatgacaactgagtcaacagccactgccatgcaatcagagatgtccacatcaattatggagactaccacgaccctggctactagcacagccagaagaggaaagcccccgacaaaagaacccattagccagaccacagatgacatccttgtggcctcagcagagtgtcccagcgatgatgaggacattgacccctgtgagccgagctcaggtgggttagccaacccaacccgagcaggcggcagagagccgtatccaggctcagcagaagtgatccgggagtccagcagcaccacgggtatggtcgttgggatagtagccgctgccgccctgtgcatccttatcctcctctatgccatgtacaagtacagaaaccgggatgaaggctcataccatgtggacgagagtcgaaactacatcagtaactcagcacagtccaatggggctgttgtaaaggagaaacaacccagcagtgcgaaaagctccaacaaaaataagaaaaacaaggataaagagtattatgtctgatcccaagatcttaaatggacacttgtatagaaatagtcttcattttatctgagacataatataaacttatttactttcctttttatgaagcacatacaaaagaagacagggaatgcaatcaggaaggaaagactttttaaaaaataaaaacaagtatctcatgctcttgtttctcaaaaaagaaaaacaaaaaacaaaaaacagg

SEQ ID NO: 158591 - DNA, 7578 bp, Homo sapiens
  Payload ID: 11035
  Gene Symbol: NRXN1
  Gene Name: neurexin 1
  Uniprot ID: Q9ULB1
  ENST ID: ENST00000404971
  CDS Start-End: 1341-5984
gcacctcgctccgcagcatccagacctggaggggctgcgaccacgggccgagcccacccattccccagccaaaggacgggcccgccgctctccatggtactgcggagagctcagctccgcccttctctttcagaaggacagcacccggcgtcacgtaacccagccttctcaggctccaccaccgccttttccttcccagctctttccctctcctccccctcctcctccttctcctcctcctcctcctcctgctcccctccgttgcctgttctcccctcccgcactcctggagatagacgctcaagcctgacgcctctgaaaaggcagcagcagtcgccttatccatagacctcaggaaattcgctttgaccgatgcatgcttcaggctctggctcgagctgaggggaataaccgggcagatgtctgagtccttaaaaaagacaagataaaaccaaaatgcatcaccaacacacaaccaattgatgtgctggcatcttagcttggccctgcagaggcagagagaaaagaagaggagctgttgcgatttccacatctaacagcttctggctatttcgcaactgctgggtttgagtcctactgttgccgtggctgaaaagagaagtaaaatccaacttgtgagaccacgcacaaggaattaggctttggctgcagcggtgctgaagcccatgctatgacagaagaagcaggcctttgaagctatcctcgggttaagaaatggtgccctaaagaggcaagcatccctttctccgttctgctgtaagacaccacatctgaaggagacagacttgaggcattcacaagcatccaaggatactggctcactgctggcttcctgtactttcttgagaaaagtgttttctttttactgactctcactgcttccttttggcctggtaccactggtggaacctggcagataatgggatttgaggagttaagtatctgttgacactgcagatactcttaaattagttaatcagactcaaatgggtcagtgctttcccttgatcttttgttgaagccttttccagaacgttgtctccaaagtgcatcctccctttggtctggaagttctgtggctaccctgtaccactggggtcaacgttttccagttggaagaggactacagggagagagggcggggttattggaagaagaagaagaaaaaaagaactagataaaggagggcacatccctctcactcccgcctttccccttacctttctgtctctcgggacccttatttcttcgtcacggtgtccaggaccattttgaccctgtcggccccggcacccccccgccgcaccccagccccgagcatggggacggcgctgctccagcgcgggggctgttttcttctgtgcctctcgctgctgctcctgggctgctgggcggagctgggcagcgggctggagtttccgggcgccgagggccaatggacgcgcttccccaagtggaacgcctgctgcgagagcgagatgagcttccagctcaagactcgcagcgcccgcggcctcgtgctctacttcgacgacgagggcttctgcgacttcctggagctgattctgacgcgcggcggccgcctgcagctcagcttctccatcttctgcgctgagcctgcgacgctcctggccgacacgccggttaacgacggcgcctggcacagcgtgcgcatccgccgccagttccgcaacaccacgctcttcatcgaccaggtggaggccaagtgggtggaggtcaagtccaagcgcagggacatgacggtgttcagcggccttttcgtcggggggctgcccccggaactgcgcgccgcggcgctcaagctcaccctggcctcggtgagggagcgggagcccttcaaggggtggattcgtgacgtgagggtcaactcctcgcaggtcctgcccgtggacagcggcgaggtgaagctggacgatgagccgcccaacagcggcgggggaagcccgtgcgaggcgggcgaggagggcgagggcggggtgtgcctcaacggaggtgtgtgctccgtggtggacgaccaggccgtgtgcgactgctcgcgaaccggcttccgcggcaaggactgcagccaagaaataaaattcggtcttcagtgtgttttgccggtgctgttacatgacaatgaccaaggaaaatactgttgtataaatacagcaaagcctctaacagaaaaagacaacaatgtggaaggtctggcgcacctgatgatgggcgaccaaggtaaaagtaaaggaaaagaagaatatattgccacgttcaaaggatctgaatacttctgctacgacttgtctcaaaaccccattcaaagcagcagtgatgaaataactctgtcatttaaaacccttcagaggaatggactgatgcttcacactgggaaatcggctgattatgtcaatcttgccctgaaaaatggagctgtctctctggtcattaatttgggatcaggggcctttgaagcactagtggagcctgtgaatggaaagtttaatgataatgcctggcatgatgtgaaagtcaccaggaatctgcgtcagcactcaggcattggacacgctatggtaaacaaactacattgttcggtgacaatatcagtggatgggattcttaccacaacgggctacacgcaagaagattataccatgctggggtctgatgactttttctatgttggaggcagtcccagcacagccgaccttccagggtcaccagtcagtaacaactttatgggctgtctcaaagaggttgtatataaaaataatgatgtgaggctggaattatctcgacttgccaagcaaggagatcctaagatgaagatccatggagtggtggcatttaaatgtgagaatgttgcaactttagacccaatcacctttgaaaccccagagtctttcatctctttgcctaaatggaatgcaaagaaaactggctccatatcatttgatttccgtacaacagagccaaatggcctcatcttatttagccatggcaagccaagacatcagaaagatgccaagcacccacagatgataaaggtggacttctttgctattgagatgctagatggccacctctacctcctcctggacatggggtcaggtactataaaaataaaagccctgttgaagaaagtgaatgatggagaatggtatcatgtggacttccagagagacggacggtcaggtaccatttctgtcaacacgttgcgtactccctacactgctcctggtgagagtgagattctggacctggatgatgagttgtacctgggggggctgccagaaaataaagctggccttgtcttccccaccgaggtgtggactgctctgctcaactatggctacgtgggctgcatcagggatttgttcatcgatggccaaagcaaagatatccggcaaatggctgaagttcaaagtactgctggagtgaagccttcctgctcaaaggaaacagcaaaaccgtgccttagcaacccttgcaaaaacaatggcatgtgcagggatgggtggaacagatatgtctgtgattgttccggaacaggctatcttggcaggtcctgtgagagagaggcaacggttttgagctatgatgggagcatgtttatgaaaattcagctccccgtagtcatgcatacggaggctgaggatgtttccttacggttccgatcccagcgtgcatatggcattctgatggcaaccacttctagagactctgctgacaccctccgcctggagctagacgcaggacgtgtgaaactgacggtcaatctagattgtatcaggattaactgtaattccagcaaaggtcccgagactctttttgctggctataacctcaatgataacgagtggcacacagtgcgtgtagttcggcgtggaaaaagtttaaagttaacagtggatgaccaacaggccatgacaggtcaaatggcaggtgatcatactaggctggagttccataacatagagactggcatcatcacagaacgacggtatctttcttctgtcccctccaacttcattggacacctgcagagcttgacatttaatggaatggcatacattgacctgtgtaaaaatggcgacatagattactgtgagcttaatgccagatttggcttcaggaacatcatagcagatcctgtcaccttcaagaccaaatcgagctatgttgccttagctaccttgcaagcctacacttctatgcatctttttttccagttcaagacaacatccctagatggattaattctatataacagtggggatggaaatgactttattgtggttgaattagttaaagggtacttacattacgtgtttgatttgggaaatggtgctaacctcatcaaaggaagctcaaataaacctctcaatgacaatcagtggcacaacgtgatgatatcaagggacaccagcaacctccacactgtaaagattgacacaaaaatcacaacgcaaatcaccgccggagccaggaacttagacctcaagagtgacttatatataggaggagtagctaaagaaacatacaaatccttaccaaaacttgtacatgccaaagaaggctttcaaggctgcctggcatcagttgatttaaatggacggcttccggacctcatctccgatgctcttttctgcaacggacagatcgagagaggatgtgaagggcccagcacaacctgccaagaggactcatgttccaatcaaggtgtgtgcttgcaacaatgggatggcttcagctgtgactgtagtatgacttccttcagtggaccactctgcaatgaccctgggacgacatatatctttagcaaaggtggtggacaaatcacgtataagtggcctcctaatgaccgacccagtacacgagcagacagactggccataggttttagcactgttcagaaagaagccgtattggtgcgagtggacagttcttcaggcttgggtgactacctagaactgcatatacaccagggaaaaattggagttaagtttaatgttgggacagatgacatcgccattgaagaatccaatgcaatcattaatgatgggaaataccatgtagttcgtttcacgaggagtggtggcaatgccacgttgcaggtggacagctggccagtgatcgagcgctaccctgcaggaaacaatgataacgagcgcctggcgattgctagacagcgaattccatatcgacttggtcgagtagttgatgaatggctactcgacaaagggcgtcagctcacaatcttcaatagccaagcaaccataataattggcgggaaagagcagggccagcccttccagggccagctctctgggctgtactacaatggcttgaaagttctgaatatggcagccgaaaacgatgccaacatcgccatagtgggaaatgtgagactggttggtgaagtgccttcctctatgacaactgagtcaacagccactgccatgcaatcagagatgtccacatcaattatggagactaccacgaccctggctactagcacagccagaagaggaaagcccccgacaaaagaacccattagccagaccacagatgacatccttgtggcctcagcagagtgtcccagcgatgatgaggacattgacccctgtgagccgagctcaggtgggttagccaacccaacccgagcaggcggcagagagccgtatccaggctcagcagaagtgatccgggagtccagcagcaccacgggtatggtcgttgggatagtagccgctgccgccctgtgcatccttatcctcctctatgccatgtacaagtacagaaaccgggatgaaggctcataccatgtggacgagagtcgaaactacatcagtaactcagcacagtccaatggggctgttgtaaaggagaaacaacccagcagtgcgaaaagctccaacaaaaataagaaaaacaaggataaagagtattatgtctgatcccaagatcttaaatggacacttgtatagaaatagtcttcattttatctgagacataatataaacttatttactttcctttttatgaagcacatacaaaagaagacagggaatgcaatcaggaaggaaagactttttaaaaaataaaaacaagtatctcatgctcttgtttctcaaaaaagaaaaacaaaaaacaaaaaacaggggccaataaattccctaacatccacagtgttttcatttactctgcttgtctttatgttgctggaacatttctaaaagacagtgatgaccgcacgcattcataaagcaaaggagtactacagcatcaaggcacaacacaaaaaccaacacaaaacataacacaaaaaagaagctacctatgatcctggatttagccaaagtgctagcgctttcctgagaagtcagtccaattgccagagaagactgtccttttgagtgactcaacctgcaaacctttaagagtttgccgcctggtgcaactggagcagtggttggaacttgcatttgaaacaaagtgctggcttttttgaagacttgtgtaggaacacattcaaaaagcccctttctggttgtgagagaggaaaaaaaagtatggaggccttattttcaaaaatgtgaaatataaggcacgttttcacacaaaatttcaaaacaaaaacaagagggcatagatgcaatcattgggaaattttcatgcacgcttattatgttattacatatgtttatataaaatccatctctgtgtgctttctggactgtgataagtgacgttttatagcctgttgtatagaaaatgcaaaatatatctctgctcttcagccatttttggtaaattcaatgttataagtgttgctaagtatagggagttttatgacatcagagcaacaattatttcagttgggtttttctttttttttgccaccattataaattgccacaattacttttattttttaaagaaattacagtgtagtgtttattctaaggaagatatgtatgaatgtatatacaaagactcagctacttcttttcttatatgtacagccttcattctgttgcaattaagttttagtacttgtatgaaaggtgtgaattagaaagtcacatatatacatatgtatcttataatcttttctccctgaaatactcacattcccacatacattcactattttcacacacacacacacacacacacacacacacacacacacacacacacgaatccacagcaatccatcagatatgctggaagatccaaacgtgcatacagtagcaaatatttattgacaaattgaaaagcaggaaggaagagggttgtgccaaggtattgatgacaaatggggtgatttgcttcattgagatcttgctcccaggtaaccttaagaagattttagtccctaaagaaatgaacctttccttatcaaatagaatatcactgatatactgctgcatgaataagaaccattatgtgggcaggttatggaagcaaaattggttaatctacaccttaactctggctgctgcaattgaaaactttctttctaataaaataatatatatatctctg

SEQ ID NO: 158592 - DNA, 5078 bp, Homo sapiens
  Payload ID: 11035
  Gene Symbol: NRXN1
  Gene Name: neurexin 1
  ENST ID: ENST00000405581
  CDS Start-End: 1062-1898
cgcactcctggagatagacgctcaagcctgacgcctctgaaaaggcagcagcagtcgccttatccatagacctcaggaaattcgctttgaccgatgcatgcttcaggctctggctcgagctgaggggaataaccgggcagatgtctgagtccttaaaaaagacaagataaaaccaaaatgcatcaccaacacacaaccaattgatgtgctggcatcttagcttggccctgcagaggcagagagaaaagaagaggagctgttgcgatttccacatctaacagcttctggctatttcgcaactgctgggtttgagtcctactgttgccgtggctgaaaagagaagtaaaatccaacttgtgagaccacgcacaaggaattaggctttggctgcagcggtgctgaagcccatgctatgacagaagaagcaggcctttgaagctatcctcgggttaagaaatggtgccctaaagaggcaagcatccctttctccgttctgctgtaagacaccacatctgaaggagacagacttgaggcattcacaagcatccaaggatactggctcactgctggcttcctgtactttcttgagaaaagtgttttctttttactgactctcactgcttccttttggcctggtaccactggtggaacctggcagataatgggatttgaggagttaagtatctgttgacactgcagatactcttaaattagttaatcagactcaaatgggtcagtgctttcccttgatcttttgttgaagccttttccagaacgttgtctccaaagtgcatcctccctttggtctggaagttctgtggctaccctgtaccactggggtcaacgttttccagttggaagaggactacagggagagagggcggggttattggaagaagaagaagaaaaaaagaactagataaaggagggcacatccctctcactcccgcctttccccttacctttctgtctctcgggacccttatttcttcgtcacggtgtccaggaccattttgaccctgtcggccccggcacccccccgccgcaccccagccccgagcatggggacggcgctgctccagcgcgggggctgttttcttctgtgcctctcgctgctgctcctgggctgctgggcggagctgggcagcgggctggagtttccgggcgccgagggccaatggacgcgcttccccaagtggaacgcctgctgcgagagcgagatgagcttccagctcaagactcgcagcgcccgcggcctcgtgctctacttcgacgacgagggcttctgcgacttcctggagctgattctgacgcgcggcggccgcctgcagctcagcttctccatcttctgcgctgagcctgcgacgctcctggccgacacgccggttaacgacggcgcctggcacagcgtgcgcatccgccgccagttccgcaacaccacgctcttcatcgaccaggtggaggccaagtgggtggaggtcaagtccaagcgcagggacatgacggtgttcagcggccttttcgtcggggggctgcccccggaactgcgcgccgcggcgctcaagctcaccctggcctcggtgagggagcgggagcccttcaaggggtggattcgtgacgtgagggtcaactcctcgcaggtcctgcccgtggacagcggcgaggtgaagctggacgatgagccgcccaacagcggcgggggaagcccgtgcgaggcgggcgaggagggcgagggcggggtgtgcctcaacggaggtgtgtgctccgtggtggacgaccaggccgtgtgcgactgctcgcgaaccggcttccgcggcaaggactgcagccaagaagacaacaatgtggaaggtctggcgcacctgatgatgggcgaccaaggtaaaagtaaagattaattcaacaaatctatattctagagcagaaatacaatcatgactatgacatggcatccacagagtgttcatataacaaggaaatgaaaacatttgggcaagttagaatgaatgacagaatggaagtgctgtgagactggtacaaagtgaagtaggaattcagaaaaaggaaagcataacatcaatccaagtctgtcttatgtgaatatccccaccttgtgccatctgttggaggaattaaaaaaaaatctggaaaaaataatttaggaactttacattgcaatttcctatgtggagttaaatcctagttgtgcataaaatcggggttaagtctggacagtttatataactgatttacagtgtaaacttatgtttcctaaatttttatatctcaatataatcatggagcaattttctcaatttccccacttttctcttgtgtgagtagtgaattcaggggatctggaatgaagttttgtggattaatgtctttctttatgaaaaaaagactataaaaaaataaattcaagaacatcttcattattttgatttcttctttatgaattcttaaatattttctaactgtttaaatgtccagtgatagatgaatatatttcattaaaaaataattaacacatgtaaaaagaacatgccttttgataaccttcttcatcctcctctcaagtcctttctctcgaggtaagcactggtctcactttgtgatgtgtccttacagagttgatgttgatccttctgtgctccataacaactcagggtttggaaactgcaaaatcccttatcatgtgtacatgacaaaaatggcgaagtcagctggagacatgttagagaccactgctgtgggctggcagaatcacaatgaattaaacacgagtttactcattcttctcataggccatagtgcctcctatttttaattagtcatcctgtttcaaactttagagtcagtctgttacttgtgttttttacattcctaaacaaagatatgtcacctttaactggatatggttaagaataaactttgaatgaattatagttttctttggggcagctgaagatctgttattcaaagccaaccttacttttgctggttgtgggtagatggattcaaatagtcttcatgaaatttggatcacatttttttggggcttgaaatttgtcaatgatgttgttgttaggatcattgataatgctaattttattctcctttctatttagaatttaggtttatctgtttgccttgaatgaagtatgtcttttctcttttgttcttgtttcttttcctatgtatgtgtaactggtcacttcattccaataattgctttgattgtttatttatattttactttaatggcttatcagaaatgaatgactatttaaattacaaaaaagtcaaaatatgttatacatgaaaatcaagccataatagctggttaatagctcaggagcacaagttaataattatcagcgaatgttggcactttgattggaggcttgtacttttccttcataagtcatcataattgtaattacatatttgtatttgtgattatacttaatgctaacttttcctagtagagtgtaagctctatgagggcagaaagcttgtctttctctttgaccattgtatttccagaacatttttcttattgtatcttgaatttgcgattttcatgacttaaatgtatttgtttgggggcggtggtttcaactgtccattttaaagagtcaaatggacatttactgtttaattatccaggcttctcatgttactagaagagcaaaatattacaagtagaactgaaaagaatatagttacacattctgaaagtgcataagccttattctctttgtgaagagtagatcttaaattagtataatttataaaagtaataaagatagatttttctcaaaactaattgttaaagctaattgtaattgttaagacctggatacaactcttccacctgaactaattgatgagtaatatctaatattaccatgtgctttaaatttttatctatactgtcataccacaataatatttcattaaacttactcttataatagatttgatattattaatacttagaaaagaataaagcatttggtgtttttttaatacattttcttttgtctttgtcttagtccatttgggcttctatataaaaataccataaactgggtagcttgtaagtaacagaaacttatttctcaaacgtctggaggctgggaagtccaagaccaagggctgacacagtcggtgtccagtgagattttgcttcctggttcatagatcactaccttctctttgtgtcctcacttgaaagggagaaagagagctctctggagtgtcttttataaggacagcaatcccattcataaaggctctgccctcaggacctaatcaaatcccaaaatccccctctcctaatccgtcattttgtgggttcggatttcagtttatcaattttggaaagatacaacattcagatcacacagtttccatgatttttatttttataccattttcaagtcctgtgttgctatatagcgaatttgtctgtgaagtgcacaacttccagttactaaaatcctaatgcatatttgttttatgctttttaaaatatattttgctgtgatttctgatatagacctaatttggttattaaaatatgatatgtatcttcttctgtataaattcttaaattgtatttcctcatttagtttcataataataagtcatctgtttgttcagaaaagtttgtgaatgttgacagacccttactgttgaaatgcctgtgtttggtgcatatacaaactaagaagtaagaatatttgtttaaattttctactgtgttacctctactcttgcaatactggatccccttaactcacagccgcagaccgtgggaagaccggagtttcaccttataatatcagacattaaatatctacttttatctatacagtacacatagaaggctatgtgactatttagaattcaatgtttgtttactagttcatctttagcttacatgttcattagttctgagtagaaccaagaaaaactaattgaagagtatatgcttatgtattatctcttgctgtgatttaaccaatcttgttacatgtattactaataaaagtcccagcttgaatgta

SEQ ID NO: 158593 - DNA, 2508 bp, Homo sapiens
  Payload ID: 11035
  Gene Symbol: NRXN1
  Gene Name: neurexin 1
  ENST ID: ENST00000402717
  CDS Start-End: 1-2508
ggaaaagaagaatatattgccacgttcaaaggatctgaatacttctgctacgacttgtctcaaaaccccattcaaagcagcagtgatgaaataactctgtcatttaaaacccttcagaggaatggactgatgcttcacactgggaaatcggctgattatgtcaatcttgccctgaaaaatggagctgtctctctggtcattaatttgggatcaggggcctttgaagcactagtggagcctgtgaatggaaagtttaatgataatgcctggcatgatgtgaaagtcaccaggaatctgcgtcaggtgacaatatcagtggatgggattcttaccacaacgggctacacgcaagaagattataccatgctggggtctgatgactttttctatgttggaggcagtcccagcacagccgaccttccagggtcaccagtcagtaacaactttatgggctgtctcaaagaggttgtatataaaaataatgatgtgaggctggaattatctcgacttgccaagcaaggagatcctaagatgaagatccatggagtggtggcatttaaatgtgagaatgttgcaactttagacccaatcacctttgaaaccccagagtctttcatctctttgcctaaatggaatgcaaagaaaactggctccatatcatttgatttccgtacaacagagccaaatggcctcatcttatttagccatggcaagccaagacatcagaaagatgccaagcacccacagatgataaaggtggacttctttgctattgagatgctagatggccacctctacctcctcctggacatggggtcaggtactataaaaataaaagccctgttgaagaaagtgaatgatggagaatggtatcatgtggacttccagagagacggacggtcaggtaccatttctgtcaacacgttgcgtactccctacactgctcctggtgagagtgagattctggacctggatgatgagttgtacctgggggggctgccagaaaataaagctggccttgtcttccccaccgaggtgtggactgctctgctcaactatggctacgtgggctgcatcagggatttgttcatcgatggccaaagcaaagatatccggcaaatggctgaagttcaaagtactgctggagtgaagccttcctgctcaaaggaaacagcaaaaccgtgccttagcaacccttgcaaaaacaatggcatgtgcagggatgggtggaacagatatgtctgtgattgttccggaacaggctatcttggcaggtcctgtgagagagaggcaacggttttgagctatgatgggagcatgtttatgaaaattcagctccccgtagtcatgcatacggaggctgaggatgtttccttacggttccgatcccagcgtgcatatggcattctgatggcaaccacttctagagactctgctgacaccctccgcctggagctagacgcaggacgtgtgaaactgacggtcaatctagattgtatcaggattaactgtaattccagcaaaggtcccgagactctttttgctggctataacctcaatgataacgagtggcacacagtgcgtgtagttcggcgtggaaaaagtttaaagttaacagtggatgaccaacaggccatgacaggtcaaatggcaggtgatcatactaggctggagttccataacatagagactggcatcatcacagaacgacggtatctttcttctgtcccctccaacttcattggacacctgcagagcttgacatttaatggaatggcatacattgacctgtgtaaaaatggcgacatagattactgtgagcttaatgccagatttggcttcaggaacatcatagcagatcctgtcaccttcaagaccaaatcgagctatgttgccttagctaccttgcaagcctacacttctatgcatctttttttccagttcaagacaacatccctagatggattaattctatataacagtggggatggaaatgactttattgtggttgaattagttaaagggtacttacattacgtgtttgatttgggaaatggtgctaacctcatcaaaggaagctcaaataaacctctcaatgacaatcagtggcacaacgtgatgatatcaagggacaccagcaacctccacactgtaaagattgacacaaaaatcacaacgcaaatcaccgccggagccaggaacttagacctcaagagtgacttatatataggaggagtagctaaagaaacatacaaatccttaccaaaacttgtacatgccaaagaaggctttcaaggctgcctggcatcagttgatttaaatggacggcttccggacctcatctccgatgctcttttctgcaacggacagatcgagagaggatgtgaagggcccagcacaacctgccaagaggactcatgttccaatcaaggtgtgtgcttgcaacaatgggatggcttcagctgtgactgtagtatgacttccttcagtggaccactctgcaatgac

SEQ ID NO: 158594 - DNA, 2873 bp, Homo sapiens
  Payload ID: 11035
  Gene Symbol: NRXN1
  Gene Name: neurexin 1
  ENST ID: ENST00000401710
  CDS Start-End: 818-2236
tttttcttttctttttttctttttctttttctttttctgtttctctcccttactccttcgtctgcatcttcttctcagctgcctttccgccgttcgattcccacttccttcagaagggcgcactcttccctctgaacccctcgccgggcgtaagtgtcaggaggcggcggacgcggagattgcctcgggagcaggcgatgcgcgccgctgctccgcgcgctgcccgggggaggctggcgctagcgggcgagccggccggggctgaatggagggaaggggcgcctggattccatggggtctgcttctgtcttgaaaggaggttgggccggcgaagtggcctccctagtccccgcacacaaagctaaatggatttacctagtggattcgcggtggatgtctgtcatgtagaagtgaggaccttccaggaggagctttaaacaatttctcggccccccacccgccggcacgcactctcgcccgaaactctttgggagtatctctcgagaacctggagccctggaaatctgggagcagccacccgctccgcgcttgctgttcccggggctgcctttccggacaagcccctctccagctgcattcgcctcggctatgtttcggattgtttggggtgctaggcacggcggactccaggaccccgagaagactgtccgaaggagggagaggatgggtgccctggcgcggtgaggcggccggcccctcagcccactccgcgccgcccgctcccctgcgccctctcctctccccgcgccccaaactttgcctcccgcggcggctgcccctcggcgggcgccccgccatgtaccagaggatgctccggtgcggcgccgagctgggctcgcccgggggcggcggcggcggcggcggcggcggcggcgcaggggggcgcctggccctgctttggatagtcccgctcaccctcagcggcctcctaggagtggcgtggggggcatccagtttgggagcgcaccacatccaccatttccatggcagcagcaagcatcattcagtgcctattgcaatctacaggtcaccggcatccttgcgaggcggacacgctgggacgacatatatctttagcaaaggtggtggacaaatcacgtataagtggcctcctaatgaccgacccagtacacgagcagacagactggccataggttttagcactgttcagaaagaagccgtattggtgcgagtggacagttcttcaggcttgggtgactacctagaactgcatatacaccagggaaaaattggagttaagtttaatgttgggacagatgacatcgccattgaagaatccaatgcaatcattaatgatgggaaataccatgtagttcgtttcacgaggagtggtggcaatgccacgttgcaggtggacagctggccagtgatcgagcgctaccctgcaggaaacaatgataacgagcgcctggcgattgctagacagcgaattccatatcgacttggtcgagtagttgatgaatggctactcgacaaagggcgtcagctcacaatcttcaatagccaagcaaccataataattggcgggaaagagcagggccagcccttccagggccagctctctgggctgtactacaatggcttgaaagttctgaatatggcagccgaaaacgatgccaacatcgccatagtgggaaatgtgagactggttggtgaagtgccttcctctatgacaactgagtcaacagccactgccatgcaatcagagatgtccacatcaattatggagactaccacgaccctggctactagcacagccagaagaggaaagcccccgacaaaagaacccattagccagaccacagatgacatccttgtggcctcagcagagtgtcccagcgatgatgaggacattgacccctgtgagccgagctcaggtgggttagccaacccaacccgagcaggcggcagagagccgtatccaggctcagcagaagtgatccgggagtccagcagcaccacgggtatggtcgttgggatagtagccgctgccgccctgtgcatccttatcctcctctatgccatgtacaagtacagaaaccgggatgaaggctcataccatgtggacgagagtcgaaactacatcagtaactcagcacagtccaatggggctgttgtaaaggagaaacaacccagcagtgcgaaaagctccaacaaaaataagaaaaacaaggataaagagtattatgtctgatcccaagatcttaaatggacacttgtatagaaatagtcttcattttatctgagacataatataaacttatttactttcctttttatgaagcacatacaaaagaagacagggaatgcaatcaggaaggaaagactttttaaaaaataaaaacaagtatctcatgctcttgtttctcaaaaaagaaaaacaaaaaacaaaaaacaggggccaataaattccctaacatccacagtgttttcatttactctgcttgtctttatgttgctggaacatttctaaaagacagtgatgaccgcacgcattcataaagcaaaggagtactacagcatcaaggcacaacacaaaaaccaacacaaaacataacacaaaaaagaagctacctatgatcctggatttagccaaagtgctagcgctttcctgagaagtcagtccaattgccagagaagactgtccttttgagtgactcaacctgcaaacctttaagagtttgccgcctggtgcaactggagcagtggttggaacttgcatttgaaacaaagtgctggcttttttgaagacttgtgtaggaacacattcaaaaagcccctttctggttgtgagagaggaaaaaaaagtatggaggccttattttcaaaaa

SEQ ID NO: 158595 - DNA, 2553 bp, Homo sapiens
  Payload ID: 11035
  Gene Symbol: NRXN1
  Gene Name: neurexin 1
  ENST ID: ENST00000406859
  CDS Start-End: 1-2553
ggaaaagaagaatatattgccacgttcaaaggatctgaatacttctgctacgacttgtctcaaaaccccattcaaagcagcagtgatgaaataactctgtcatttaaaacccttcagaggaatggactgatgcttcacactgggaaatcggctgattatgtcaatcttgccctgaaaaatggagctgtctctctggtcattaatttgggatcaggggcctttgaagcactagtggagcctgtgaatggaaagtttaatgataatgcctggcatgatgtgaaagtcaccaggaatctgcgtcagcactcaggcattggacacgctatggtaaacaaactacattgttcggtgacaatatcagtggatgggattcttaccacaacgggctacacgcaagaagattataccatgctggggtctgatgactttttctatgttggaggcagtcccagcacagccgaccttccagggtcaccagtcagtaacaactttatgggctgtctcaaagaggttgtatataaaaataatgatgtgaggctggaattatctcgacttgccaagcaaggagatcctaagatgaagatccatggagtggtggcatttaaatgtgagaatgttgcaactttagacccaatcacctttgaaaccccagagtctttcatctctttgcctaaatggaatgcaaagaaaactggctccatatcatttgatttccgtacaacagagccaaatggcctcatcttatttagccatggcaagccaagacatcagaaagatgccaagcacccacagatgataaaggtggacttctttgctattgagatgctagatggccacctctacctcctcctggacatggggtcaggtactataaaaataaaagccctgttgaagaaagtgaatgatggagaatggtatcatgtggacttccagagagacggacggtcaggtaccatttctgtcaacacgttgcgtactccctacactgctcctggtgagagtgagattctggacctggatgatgagttgtacctgggggggctgccagaaaataaagctggccttgtcttccccaccgaggtgtggactgctctgctcaactatggctacgtgggctgcatcagggatttgttcatcgatggccaaagcaaagatatccggcaaatggctgaagttcaaagtactgctggagtgaagccttcctgctcaaaggaaacagcaaaaccgtgccttagcaacccttgcaaaaacaatggcatgtgcagggatgggtggaacagatatgtctgtgattgttccggaacaggctatcttggcaggtcctgtgagagagaggcaacggttttgagctatgatgggagcatgtttatgaaaattcagctccccgtagtcatgcatacggaggctgaggatgtttccttacggttccgatcccagcgtgcatatggcattctgatggcaaccacttctagagactctgctgacaccctccgcctggagctagacgcaggacgtgtgaaactgacggtcaatctagattgtatcaggattaactgtaattccagcaaaggtcccgagactctttttgctggctataacctcaatgataacgagtggcacacagtgcgtgtagttcggcgtggaaaaagtttaaagttaacagtggatgaccaacaggccatgacaggtcaaatggcaggtgatcatactaggctggagttccataacatagagactggcatcatcacagaacgacggtatctttcttctgtcccctccaacttcattggacacctgcagagcttgacatttaatggaatggcatacattgacctgtgtaaaaatggcgacatagattactgtgagcttaatgccagatttggcttcaggaacatcatagcagatcctgtcaccttcaagaccaaatcgagctatgttgccttagctaccttgcaagcctacacttctatgcatctttttttccagttcaagacaacatccctagatggattaattctatataacagtggggatggaaatgactttattgtggttgaattagttaaagggtacttacattacgtgtttgatttgggaaatggtgctaacctcatcaaaggaagctcaaataaacctctcaatgacaatcagtggcacaacgtgatgatatcaagggacaccagcaacctccacactgtaaagattgacacaaaaatcacaacgcaaatcaccgccggagccaggaacttagacctcaagagtgacttatatataggaggagtagctaaagaaacatacaaatccttaccaaaacttgtacatgccaaagaaggctttcaaggctgcctggcatcagttgatttaaatggacggcttccggacctcatctccgatgctcttttctgcaacggacagatcgagagaggatgtgaagggcccagcacaacctgccaagaggactcatgttccaatcaaggtgtgtgcttgcaacaatgggatggcttcagctgtgactgtagtatgacttccttcagtggaccactctgcaatgac

SEQ ID NO: 158596 - DNA, 2215 bp, Homo sapiens
  Payload ID: 11035
  Gene Symbol: NRXN1
  Gene Name: neurexin 1
  ENST ID: ENST00000412315
  CDS Start-End: 200-619
ctgtgtcttttctcgcccatctgtgtgcagggcactgataggccgggctgatgcgcaggcaatttatcatcttgatctcccactgagtcagggagctctcctgtcaccagtattgatttcagaggatggactaaatttcctaggatttccattaagaattaagaaaaaagctctaagcacgcagggtagccagacagacatggatatgagatggcactgtgaaaacttgcagaccacagatgacatccttgtggcctcagcagagtgtcccagcgatgatgaggacattgacccctgtgagccgagctcagccaacccaacccgagcaggcggcagagagccgtatccaggctcagcagaagtgatccgggagtccagcagcaccacgggtatggtcgttgggatagtagccgctgccgccctgtgcatccttatcctcctctatgccatgtacaagtacagaaaccgggatgaaggctcataccatgtggacgagagtcgaaactacatcagtaactcagcacagtccaatggggctgttgtaaaggagaaacaacccagcagtgcgaaaagctccaacaaaaataagaaaaacaaggataaagagtattatgtctgatcccaagatcttaaatggacacttgtatagaaatagtcttcattttatctgagacataatataaacttatttactttcctttttatgaagcacatacaaaagaagacagggaatgcaatcaggaaggaaagactttttaaaaaataaaaacaagtatctcatgctcttgtttctcaaaaaagaaaaacaaaaaacaaaaaacaggggccaataaattccctaacatccacagtgttttcatttactctgcttgtctttatgttgctggaacatttctaaaagacagtgatgaccgcacgcattcataaagcaaaggagtactacagcatcaaggcacaacacaaaaaccaacacaaaacataacacaaaaaagaagctacctatgatcctggatttagccaaagtgctagcgctttcctgagaagtcagtccaattgccagagaagactgtccttttgagtgactcaacctgcaaacctttaagagtttgccgcctggtgcaactggagcagtggttggaacttgcatttgaaacaaagtgctggcttttttgaagacttgtgtaggaacacattcaaaaagcccctttctggttgtgagagaggaaaaaaaagtatggaggccttattttcaaaaatgtgaaatataaggcacgttttcacacaaaatttcaaaacaaaaacaagagggcatagatgcaatcattgggaaattttcatgcacgcttattatgttattacatatgtttatataaaatccatctctgtgtgctttctggactgtgataagtgacgttttatagcctgttgtatagaaaatgcaaaatatatctctgctcttcagccatttttggtaaattcaatgttataagtgttgctaagtatagggagttttatgacatcagagcaacaattatttcagttgggtttttctttttttttgccaccattataaattgccacaattacttttattttttaaagaaattacagtgtagtgtttattctaaggaagatatgtatgaatgtatatacaaagactcagctacttcttttcttatatgtacagccttcattctgttgcaattaagttttagtacttgtatgaaaggtgtgaattagaaagtcacatatatacatatgtatcttataatcttttctccctgaaatactcacattcccacatacattcactattttcacacacacacacacacacacacacacacacacacacacacacacacgaatccacagcaatccatcagatatgctggaagatccaaacgtgcatacagtagcaaatatttattgacaaattgaaaagcaggaaggaagagggttgtgccaaggtattgatgacaaatggggtgatttgcttcattgagatcttgctcccaggtaaccttaagaagattttagtccctaaagaaatgaacctttccttatcaaatagaatatcactgatatactgctgcatgaataagaaccattatgtgggcaggttatggaagcaaaattggttaatctacaccttaactctggctgctgcaattgaaaactttctttctaataaaataatatatatatctctgaa

SEQ ID NO: 158597 - DNA, 5724 bp, Homo sapiens
  Payload ID: 11035
  Gene Symbol: NRXN1
  Gene Name: neurexin 1
  ENST ID: ENST00000405472
  CDS Start-End: 1056-5543
cctggagatagacgctcaagcctgacgcctctgaaaaggcagcagcagtcgccttatccatagacctcaggaaattcgctttgaccgatgcatgcttcaggctctggctcgagctgaggggaataaccgggcagatgtctgagtccttaaaaaagacaagataaaaccaaaatgcatcaccaacacacaaccaattgatgtgctggcatcttagcttggccctgcagaggcagagagaaaagaagaggagctgttgcgatttccacatctaacagcttctggctatttcgcaactgctgggtttgagtcctactgttgccgtggctgaaaagagaagtaaaatccaacttgtgagaccacgcacaaggaattaggctttggctgcagcggtgctgaagcccatgctatgacagaagaagcaggcctttgaagctatcctcgggttaagaaatggtgccctaaagaggcaagcatccctttctccgttctgctgtaagacaccacatctgaaggagacagacttgaggcattcacaagcatccaaggatactggctcactgctggcttcctgtactttcttgagaaaagtgttttctttttactgactctcactgcttccttttggcctggtaccactggtggaacctggcagataatgggatttgaggagttaagtatctgttgacactgcagatactcttaaattagttaatcagactcaaatgggtcagtgctttcccttgatcttttgttgaagccttttccagaacgttgtctccaaagtgcatcctccctttggtctggaagttctgtggctaccctgtaccactggggtcaacgttttccagttggaagaggactacagggagagagggcggggttattggaagaagaagaagaaaaaaagaactagataaaggagggcacatccctctcactcccgcctttccccttacctttctgtctctcgggacccttatttcttcgtcacggtgtccaggaccattttgaccctgtcggccccggcacccccccgccgcaccccagccccgagcatggggacggcgctgctccagcgcgggggctgttttcttctgtgcctctcgctgctgctcctgggctgctgggcggagctgggcagcgggctggagtttccgggcgccgagggccaatggacgcgcttccccaagtggaacgcctgctgcgagagcgagatgagcttccagctcaagactcgcagcgcccgcggcctcgtgctctacttcgacgacgagggcttctgcgacttcctggagctgattctgacgcgcggcggccgcctgcagctcagcttctccatcttctgcgctgagcctgcgacgctcctggccgacacgccggttaacgacggcgcctggcacagcgtgcgcatccgccgccagttccgcaacaccacgctcttcatcgaccaggtggaggccaagtgggtggaggtcaagtccaagcgcagggacatgacggtgttcagcggccttttcgtcggggggctgcccccggaactgcgcgccgcggcgctcaagctcaccctggcctcggtgagggagcgggagcccttcaaggggtggattcgtgacgtgagggtcaactcctcgcaggtcctgcccgtggacagcggcgaggtgaagctggacgatgagccgcccaacagcggcgggggaagcccgtgcgaggcgggcgaggagggcgagggcggggtgtgcctcaacggaggtgtgtgctccgtggtggacgaccaggccgtgtgcgactgctcgcgaaccggcttccgcggcaaggactgcagccaagaagacaacaatgtggaaggtctggcgcacctgatgatgggcgaccaaggaaaagaagaatatattgccacgttcaaaggatctgaatacttctgctacgacttgtctcaaaaccccattcaaagcagcagtgatgaaataactctgtcatttaaaacccttcagaggaatggactgatgcttcacactgggaaatcggctgattatgtcaatcttgccctgaaaaatggagctgtctctctggtcattaatttgggatcaggggcctttgaagcactagtggagcctgtgaatggaaagtttaatgataatgcctggcatgatgtgaaagtcaccaggaatctgcgtcaggtgacaatatcagtggatgggattcttaccacaacgggctacacgcaagaagattataccatgctggggtctgatgactttttctatgttggaggcagtcccagcacagccgaccttccagggtcaccagtcagtaacaactttatgggctgtctcaaagaggttgtatataaaaataatgatgtgaggctggaattatctcgacttgccaagcaaggagatcctaagatgaagatccatggagtggtggcatttaaatgtgagaatgttgcaactttagacccaatcacctttgaaaccccagagtctttcatctctttgcctaaatggaatgcaaagaaaactggctccatatcatttgatttccgtacaacagagccaaatggcctcatcttatttagccatggcaagccaagacatcagaaagatgccaagcacccacagatgataaaggtggacttctttgctattgagatgctagatggccacctctacctcctcctggacatggggtcaggtactataaaaataaaagccctgttgaagaaagtgaatgatggagaatggtatcatgtggacttccagagagacggacggtcaggtaccatttctgtcaacacgttgcgtactccctacactgctcctggtgagagtgagattctggacctggatgatgagttgtacctgggggggctgccagaaaataaagctggccttgtcttccccaccgaggtgtggactgctctgctcaactatggctacgtgggctgcatcagggatttgttcatcgatggccaaagcaaagatatccggcaaatggctgaagttcaaagtactgctggagtgaagccttcctgctcaaaggaaacagcaaaaccgtgccttagcaacccttgcaaaaacaatggcatgtgcagggatgggtggaacagatatgtctgtgattgttccggaacaggctatcttggcaggtcctgtgagagagaggcaacggttttgagctatgatgggagcatgtttatgaaaattcagctccccgtagtcatgcatacggaggctgaggatgtttccttacggttccgatcccagcgtgcatatggcattctgatggcaaccacttctagagactctgctgacaccctccgcctggagctagacgcaggacgtgtgaaactgacggtcaatctagattgtatcaggattaactgtaattccagcaaaggtcccgagactctttttgctggctataacctcaatgataacgagtggcacacagtgcgtgtagttcggcgtggaaaaagtttaaagttaacagtggatgaccaacaggccatgacaggtcaaatggcaggtgatcatactaggctggagttccataacatagagactggcatcatcacagaacgacggtatctttcttctgtcccctccaacttcattggacacctgcagagcttgacatttaatggaatggcatacattgacctgtgtaaaaatggcgacatagattactgtgagcttaatgccagatttggcttcaggaacatcatagcagatcctgtcaccttcaagaccaaatcgagctatgttgccttagctaccttgcaagcctacacttctatgcatctttttttccagttcaagacaacatccctagatggattaattctatataacagtggggatggaaatgactttattgtggttgaattagttaaagggtacttacattacgtgtttgatttgggaaatggtgctaacctcatcaaaggaagctcaaataaacctctcaatgacaatcagtggcacaacgtgatgatatcaagggacaccagcaacctccacactgtaaagattgacacaaaaatcacaacgcaaatcaccgccggagccaggaacttagacctcaagagtgacttatatataggaggagtagctaaagaaacatacaaatccttaccaaaacttgtacatgccaaagaaggctttcaaggctgcctggcatcagttgatttaaatggacggcttccggacctcatctccgatgctcttttctgcaacggacagatcgagagaggatgtgaagggcccagcacaacctgccaagaggactcatgttccaatcaaggtgtgtgcttgcaacaatgggatggcttcagctgtgactgtagtatgacttccttcagtggaccactctgcaatgaccctgggacgacatatatctttagcaaaggtggtggacaaatcacgtataagtggcctcctaatgaccgacccagtacacgagcagacagactggccataggttttagcactgttcagaaagaagccgtattggtgcgagtggacagttcttcaggcttgggtgactacctagaactgcatatacaccagggaaaaattggagttaagtttaatgttgggacagatgacatcgccattgaagaatccaatgcaatcattaatgatgggaaataccatgtagttcgtttcacgaggagtggtggcaatgccacgttgcaggtggacagctggccagtgatcgagcgctaccctgcaggaaacaatgataacgagcgcctggcgattgctagacagcgaattccatatcgacttggtcgagtagttgatgaatggctactcgacaaagggcgtcagctcacaatcttcaatagccaagcaaccataataattggcgggaaagagcagggccagcccttccagggccagctctctgggctgtactacaatggcttgaaagttctgaatatggcagccgaaaacgatgccaacatcgccatagtgggaaatgtgagactggttggtgaagtgccttcctctatgacaactgagtcaacagccactgccatgcaatcagagatgtccacatcaattatggagactaccacgaccctggctactagcacagccagaagaggaaagcccccgacaaaagaacccattagccagaccacagatgacatccttgtggcctcagcagagtgtcccagcgatgatgaggacattgacccctgtgagccgagctcaggtgggttagccaacccaacccgagcaggcggcagagagccgtatccaggctcagcagaagtgatccgggagtccagcagcaccacgggtatggtcgttgggatagtagccgctgccgccctgtgcatccttatcctcctctatgccatgtacaagtacagaaaccgggatgaaggctcataccatgtggacgagagtcgaaactacatcagtaactcagcacagtccaatggggctgttgtaaaggagaaacaacccagcagtgcgaaaagctccaacaaaaataagaaaaacaaggataaagagtattatgtctgatcccaagatcttaaatggacacttgtatagaaatagtcttcattttatctgagacataatataaacttatttactttcctttttatgaagcacatacaaaagaagacagggaatgcaatcaggaaggaaagactttttaaaaaataaaaacaagtatctcatgctcttgtttctcaaaaaa

SEQ ID NO: 158598 - DNA, 1857 bp, Homo sapiens
  Payload ID: 11035
  Gene Symbol: NRXN1
  Gene Name: neurexin 1
  ENST ID: ENST00000611589
  CDS Start-End: 959-1555
agccctggaaatctgggagcagccacccgctccgcgcttgctgttcccggggctgcctttccggacaagcccctctccagctgcattcgcctcggctatgtttcggattgtttggggtgctaggcacggcggactccaggaccccgagaagactgtccgaaggagggagaggatgggtgccctggcgcggtgaggcggccggcccctcagcccactccgcgccgcccgctcccctgcgccctctcctctccccgcgccccaaactttgcctcccgcggcggctgcccctcggcgggcgccccgccatgtaccagaggatgctccgctttggatagtcccgctcaccctcagcggcctcctaggagtggcgtggggggcatccagtttgggagcgcaccacatccaccatttccatggcagcagcaagcatcattcagtgcctattgcaatctacaggtcaccggcatccttgcgaggcggacacgctgggacgacatatatctttagcaaaggtggtggacaaatcacgtataagtggcctcctaatgaccgacccagtacacgagcagacagactggccataggttttagcactgttcagaaagaagccgtattggtgcgagtggacagttcttcaggcttgggtgactacctagaactgcatatacaccagggaaaaattggagttaagtttaatgttgggacagatgacatcgccattgaagaatccaatgcaatcattaatgatgggaaataccatgtagttcgtttcacgaggagtggtggcaatgccacgttgcaggtggacagctggccagtgatcgagcgctaccctgcagggcgtcagctcacaatcttcaatagccaagcaaccataataattggcgggaaagagcagggccagcccttccagggccagctctctgggctgtactacaatggcttgaaagttctgaatatggcagccgaaaacgatgccaacatcgccatagtgggaaatgtgagactggttggtgaagtgccttcctctatgacaactgagtcaacagccactgccatgcaatcagagatgtccacatcaattatggagactaccacgaccctggctactagcacagccagaagaggaaagcccccgacaaaagaacccattagccagaccacagatgacatccttgtggcctcagcagagtgtcccagcgatgatgaggacattgacccctgtgagccgagctcaggtgggttagccaacccaacccgagcaggcggcagagagccgtatccaggctcagcagaagtgatccgggagtccagcagcaccacgggtatggtcgttgggatagtagccgctgccgccctgtgcatccttatcctcctctatgccatgtacaagtacagaaaccgggatgaaggctcataccatgtggacgagagtcgaaactacatcagtaactcagcacagtccaatggggctgttgtaaaggagaaacaacccagcagtgcgaaaagctccaacaaaaataagaaaaacaaggataaagagtattatgtctgatcccaagatcttaaatggacacttgtatagaaatagtcttcattttatctgagacataatataaacttatttactttcctttttatgaagcacatacaaaagaagacagggaatgcaatcaggaaggaaagactttttaaaaaataaaaacaagtatctcatgctcttgtttctcaaaaaagaaaaacaaaaaacaaaaaacaggggccaataaattccctaacatccacagtgttttcatttactctgcttgtctttatgttgctggaacatttctaaaagacagtgatgaccgcacgcat

SEQ ID NO: 158599 - DNA, 1379 bp, Homo sapiens
  Payload ID: 11035
  Gene Symbol: NRXN1
  Gene Name: neurexin 1
  ENST ID: ENST00000626249
  CDS Start-End: 1-264
cctgtgaatggaaagtttaatgataatgcctggcatgatgtgaaagtcaccaggaatctgcgtcaggtgacaatatcagtggatgggattcttaccacaacgggctacacgcaagaagattataccatgctggggtctgatgactttttctatgttggaggcagtcccagcacagccgaccttccagggtcaccagtcagtaacaactttatgggctgtctcaaagagattaaagaaaaaaaaggaaatcactcaacatattgaaacaacctataatctcatattccttagaagcaacttaggtctttccctatatggcatttaataatgtctatttgaaatgagactttgcttgcacgtagaacaactaaccctcaattggaaagttacttttgtgtatgtgattatcaaatttcaaaataaaataagattagctcaaaataatttggtaaaacctaacctgaacttcatatggtgctttgtttaaaatgacaaggaactttgaatggccgggaattcaaatagagatcaaagtagttttttttaaataattcatattttcatcacaagtaaatcaaagtctgggaaaatatctgtactcattgaaaaatgactcacaggtttaaatttgaaaaaaaagagttaaagaaaaattataaataataaattgccattatatgcagcccatacctatgaaattcttagaagataataggtctttaaaaaaatatgctttctaaatctgatttttgcaaaggcaacactgttttgacagaaatacttgtttatattatttgcattttgataacactgagtaagagctgaaatatatgttgcttaagaattttcgatcattttatatttaattaaattttctaacaagcagtttttgagtgactgctacaaaaggagaggaggttagaaaatcttgcagaaagagaaatcatggtgtctgagatgctcagactctatgaggacatcttgcccatttaccttagaccacttggaaagcattttcctgtagaaaagtcttacagttaattcttcaggtgctcactagatatattttaagaatctttaaagatagatgaaaatctcactagtatgtgtttctatcccaatattttcatcgtataagtgtttctgtagtcactgacctatcaggaagggtcatggcgctccctcattaatctccccctcagaacctgttcctgcaattattatgcatttcctggtctctttgtgcccccgaaatgctctgaaatgcttatttccctcctgcagagtgaacattatttaacgtagtttgttagtaaggaaatgaaactgaagaggtaggaaaggactgtgtgttaaataaaacaacctagaatccttta

SEQ ID NO: 158600 - DNA, 2444 bp, Homo sapiens
  Payload ID: 11035
  Gene Symbol: NRXN1
  Gene Name: neurexin 1
  ENST ID: ENST00000628364
  CDS Start-End: 848-2257
tagagccccttgcttcaccagcgtgtgtggtttttcttttctttttttctttttctttttctttttctgtttctctcccttactccttcgtctgcatcttcttctcagctgcctttccgccgttcgattcccacttccttcagaagggcgcactcttccctctgaacccctcgccgggcgtaagtgtcaggaggcggcggacgcggagattgcctcgggagcaggcgatgcgcgccgctgctccgcgcgctgcccgggggaggctggcgctagcgggcgagccggccggggctgaatggagggaaggggcgcctggattccatggggtctgcttctgtcttgaaaggaggttgggccggcgaagtggcctccctagtccccgcacacaaagctaaatggatttacctagtggattcgcggtggatgtctgtcatgtagaagtgaggaccttccaggaggagctttaaacaatttctcggccccccacccgccggcacgcactctcgcccgaaactctttgggagtatctctcgagaacctggagccctggaaatctgggagcagccacccgctccgcgcttgctgttcccggggctgcctttccggacaagcccctctccagctgcattcgcctcggctatgtttcggattgtttggggtgctaggcacggcggactccaggaccccgagaagactgtccgaaggagggagaggatgggtgccctggcgcggtgaggcggccggcccctcagcccactccgcgccgcccgctcccctgcgccctctcctctccccgcgccccaaactttgcctcccgcggcggctgcccctcggcgggcgccccgccatgtaccagaggatgctccggtgcggcgccgagctgggctcgcccgggggcggcggcggcggcggcggcggcggcggcgcaggggggcgcctggccctgctttggatagtcccgctcaccctcagcggcctcctaggagtggcgtggggggcatccagtttgggagcgcaccacatccaccatttccatggcagcagcaagcatcattcagtgcctattgcaatctacaggtcaccggcatccttgcgaggcggacacgctgggacgacatatatctttagcaaaggtggtggacaaatcacgtataagtggcctcctaatgaccgacccagtacacgagcagacagactggccataggttttagcactgttcagaaagaagccgtattggtgcgagtggacagttcttcaggcttgggtgactacctagaactgcatatacaccagggaaaaattggagttaagtttaatgttgggacagatgacatcgccattgaagaatccaatgcaatcattaatgatgggaaataccatgtagttcgtttcacgaggagtggtggcaatgccacgttgcaggtggacagctggccagtgatcgagcgctaccctgcaggaaacaatgataacgagcgcctggcgattgctagacagcgaattccatatcgacttggtcgagtagttgatgaatggctactcgacaaagggcgtcagctcacaatcttcaatagccaagcaaccataataattggcgggaaagagcagggccagcccttccagggccagctctctgggctgtactacaatggcttgaaagttctgaatatggcagccgaaaacgatgccaacatcgccatagtgggaaatgtgagactggttggtgaagtgccttcctctatgacaactgagtcaacagccactgccatgcaatcagagatgtccacatcaattatggagactaccacgaccctggctactagcacagccagaagaggaaagcccccgacaaaagaacccattagccagaccacagatgacatccttgtggcctcagcagagtgtcccagcgatgatgaggacattgacccctgtgagccgagctcagccaacccaacccgagcaggcggcagagagccgtatccaggctcagcagaagtgatccgggagtccagcagcaccacgggtatggtcgttgggatagtagccgctgccgccctgtgcatccttatcctcctctatgccatgtacaagtacagaaaccgggatgaaggctcataccatgtggacgagagtcgaaactacatcagtaactcagcacagtccaatggggctgttgtaaaggagaaacaacccagcagtgcgaaaagctccaacaaaaataagaaaaacaaggataaagagtattatgtctgatcccaagatcttaaatggacacttgtatagaaatagtcttcattttatctgagacataatataaacttatttactttcctttttatgaagcacatacaaaagaagacagggaatgcaatcaggaaggaaagactttttaaaaaataaaaacaagtatctcatgctcttgtttctcaaaaaagaaaaa

SEQ ID NO: 158601 - DNA, 8113 bp, Homo sapiens
  Payload ID: 11035
  Gene Symbol: NRXN1
  Gene Name: neurexin 1
  ENST ID: ENST00000625672
  CDS Start-End: 184-4674
gggcggggttattggaagaagaagaagaaaaaaagaactagataaaggagggcacatccctctcactcccgcctttccccttacctttctgtctctcgggacccttatttcttcgtcacggtgtccaggaccattttgaccctgtcggccccggcacccccccgccgcaccccagccccgagcatggggacggcgctgctccagcgcgggggctgttttcttctgtgcctctcgctgctgctcctgggctgctgggcggagctgggcagcgggctggagtttccgggcgccgagggccaatggacgcgcttccccaagtggaacgcctgctgcgagagcgagatgagcttccagctcaagactcgcagcgcccgcggcctcgtgctctacttcgacgacgagggcttctgcgacttcctggagctgattctgacgcgcggcggccgcctgcagctcagcttctccatcttctgcgctgagcctgcgacgctcctggccgacacgccggttaacgacggcgcctggcacagcgtgcgcatccgccgccagttccgcaacaccacgctcttcatcgaccaggtggaggccaagtgggtggaggtcaagtccaagcgcagggacatgacggtgttcagcggccttttcgtcggggggctgcccccggaactgcgcgccgcggcgctcaagctcaccctggcctcggtgagggagcgggagcccttcaaggggtggattcgtgacgtgagggtcaactcctcgcaggtcctgcccgtggacagcggcgaggtgaagctggacgatgagccgcccaacagcggcgggggaagcccgtgcgaggcgggcgaggagggcgagggcggggtgtgcctcaacggaggtgtgtgctccgtggtggacgaccaggccgtgtgcgactgctcgcgaaccggcttccgcggcaaggactgcagccaagaagacaacaatgtggaaggtctggcgcacctgatgatgggcgaccaaggtaaaagtaaaggaaaagaagaatatattgccacgttcaaaggatctgaatacttctgctacgacttgtctcaaaaccccattcaaagcagcagtgatgaaataactctgtcatttaaaacccttcagaggaatggactgatgcttcacactgggaaatcggctgattatgtcaatcttgccctgaaaaatggagctgtctctctggtcattaatttgggatcaggggcctttgaagcactagtggagcctgtgaatggaaagtttaatgataatgcctggcatgatgtgaaagtcaccaggaatctgcgtcaggtgacaatatcagtggatgggattcttaccacaacgggctacacgcaagaagattataccatgctggggtctgatgactttttctatgttggaggcagtcccagcacagccgaccttccagggtcaccagtcagtaacaactttatgggctgtctcaaagaggttgtatataaaaataatgatgtgaggctggaattatctcgacttgccaagcaaggagatcctaagatgaagatccatggagtggtggcatttaaatgtgagaatgttgcaactttagacccaatcacctttgaaaccccagagtctttcatctctttgcctaaatggaatgcaaagaaaactggctccatatcatttgatttccgtacaacagagccaaatggcctcatcttatttagccatggcaagccaagacatcagaaagatgccaagcacccacagatgataaaggtggacttctttgctattgagatgctagatggccacctctacctcctcctggacatggggtcaggtactataaaaataaaagccctgttgaagaaagtgaatgatggagaatggtatcatgtggacttccagagagacggacggtcaggtaccatttctgtcaacacgttgcgtactccctacactgctcctggtgagagtgagattctggacctggatgatgagttgtacctgggggggctgccagaaaataaagctggccttgtcttccccaccgaggtgtggactgctctgctcaactatggctacgtgggctgcatcagggatttgttcatcgatggccaaagcaaagatatccggcaaatggctgaagttcaaagtactgctggagtgaagccttcctgctcaaaggaaacagcaaaaccgtgccttagcaacccttgcaaaaacaatggcatgtgcagggatgggtggaacagatatgtctgtgattgttccggaacaggctatcttggcaggtcctgtgagagagaggcaacggttttgagctatgatgggagcatgtttatgaaaattcagctccccgtagtcatgcatacggaggctgaggatgtttccttacggttccgatcccagcgtgcatatggcattctgatggcaaccacttctagagactctgctgacaccctccgcctggagctagacgcaggacgtgtgaaactgacggtcaatctagattgtatcaggattaactgtaattccagcaaaggtcccgagactctttttgctggctataacctcaatgataacgagtggcacacagtgcgtgtagttcggcgtggaaaaagtttaaagttaacagtggatgaccaacaggccatgacaggtcaaatggcaggtgatcatactaggctggagttccataacatagagactggcatcatcacagaacgacggtatctttcttctgtcccctccaacttcattggacacctgcagagcttgacatttaatggaatggcatacattgacctgtgtaaaaatggcgacatagattactgtgagcttaatgccagatttggcttcaggaacatcatagcagatcctgtcaccttcaagaccaaatcgagctatgttgccttagctaccttgcaagcctacacttctatgcatctttttttccagttcaagacaacatccctagatggattaattctatataacagtggggatggaaatgactttattgtggttgaattagttaaagggtacttacattacgtgtttgatttgggaaatggtgctaacctcatcaaaggaagctcaaataaacctctcaatgacaatcagtggcacaacgtgatgatatcaagggacaccagcaacctccacactgtaaagattgacacaaaaatcacaacgcaaatcaccgccggagccaggaacttagacctcaagagtgacttatatataggaggagtagctaaagaaacatacaaatccttaccaaaacttgtacatgccaaagaaggctttcaaggctgcctggcatcagttgatttaaatggacggcttccggacctcatctccgatgctcttttctgcaacggacagatcgagagaggatgtgaagggcccagcacaacctgccaagaggactcatgttccaatcaaggtgtgtgcttgcaacaatgggatggcttcagctgtgactgtagtatgacttccttcagtggaccactctgcaatgaccctgggacgacatatatctttagcaaaggtggtggacaaatcacgtataagtggcctcctaatgaccgacccagtacacgagcagacagactggccataggttttagcactgttcagaaagaagccgtattggtgcgagtggacagttcttcaggcttgggtgactacctagaactgcatatacaccagggaaaaattggagttaagtttaatgttgggacagatgacatcgccattgaagaatccaatgcaatcattaatgatgggaaataccatgtagttcgtttcacgaggagtggtggcaatgccacgttgcaggtggacagctggccagtgatcgagcgctaccctgcaggaaacaatgataacgagcgcctggcgattgctagacagcgaattccatatcgacttggtcgagtagttgatgaatggctactcgacaaagggcgtcagctcacaatcttcaatagccaagcaaccataataattggcgggaaagagcagggccagcccttccagggccagctctctgggctgtactacaatggcttgaaagttctgaatatggcagccgaaaacgatgccaacatcgccatagtgggaaatgtgagactggttggtgaagtgccttcctctatgacaactgagtcaacagccactgccatgcaatcagagatgtccacatcaattatggagactaccacgaccctggctactagcacagccagaagaggaaagcccccgacaaaagaacccattagccagaccacagatgacatccttgtggcctcagcagagtgtcccagcgatgatgaggacattgacccctgtgagccgagctcagccaacccaacccgagcaggcggcagagagccgtatccaggctcagcagaagtgatccgggagtccagcagcaccacgggtatggtcgttgggatagtagccgctgccgccctgtgcatccttatcctcctctatgccatgtacaagtacagaaaccgggatgaaggctcataccatgtggacgagagtcgaaactacatcagtaactcagcacagtccaatggggctgttgtaaaggagaaacaacccagcagtgcgaaaagctccaacaaaaataagaaaaacaaggataaagagtattatgtctgatcccaagatcttaaatggacacttgtatagaaatagtcttcattttatctgagacataatataaacttatttactttcctttttatgaagcacatacaaaagaagacagggaatgcaatcaggaaggaaagactttttaaaaaataaaaacaagtatctcatgctcttgtttctcaaaaaagaaaaacaaaaaacaaaaaacaggggccaataaattccctaacatccacagtgttttcatttactctgcttgtctttatgttgctggaacatttctaaaagacagtgatgaccgcacgcattcataaagcaaaggagtactacagcatcaaggcacaacacaaaaaccaacacaaaacataacacaaaaaagaagctacctatgatcctggatttagccaaagtgctagcgctttcctgagaagtcagtccaattgccagagaagactgtccttttgagtgactcaacctgcaaacctttaagagtttgccgcctggtgcaactggagcagtggttggaacttgcatttgaaacaaagtgctggcttttttgaagacttgtgtaggaacacattcaaaaagcccctttctggttgtgagagaggaaaaaaaagtatggaggccttattttcaaaaatgtgaaatataaggcacgttttcacacaaaatttcaaaacaaaaacaagagggcatagatgcaatcattgggaaattttcatgcacgcttattatgttattacatatgtttatataaaatccatctctgtgtgctttctggactgtgataagtgacgttttatagcctgttgtatagaaaatgcaaaatatatctctgctcttcagccatttttggtaaattcaatgttataagtgttgctaagtatagggagttttatgacatcagagcaacaattatttcagttgggtttttctttttttttgccaccattataaattgccacaattacttttattttttaaagaaattacagtgtagtgtttattctaaggaagatatgtatgaatgtatatacaaagactcagctacttcttttcttatatgtacagccttcattctgttgcaattaagttttagtacttgtatgaaaggtgtgaattagaaagtcacatatatacatatgtatcttataatcttttctccctgaaatactcacattcccacatacattcactattttcacacacacacacacacacacacacacacacacacacacacacacacgaatccacagcaatccatcagatatgctggaagatccaaacgtgcatacagtagcaaatatttattgacaaattgaaaagcaggaaggaagagggttgtgccaaggtattgatgacaaatggggtgatttgcttcattgagatcttgctcccaggtaaccttaagaagattttagtccctaaagaaatgaacctttccttatcaaatagaatatcactgatatactgctgcatgaataagaaccattatgtgggcaggttatggaagcaaaattggttaatctacaccttaactctggctgctgcaattgaaaactttctttctaataaaataatatatatatctctgaatctgatgtgcatgatgaacatttctggaaagtaaacactttctctcgactaagaaagtatttttcagtaatttttgattctgtattactacccacttaaaaaatcattctctgttaattattgactatgttttaacttttctggttttacatatatatcattaaatatagttttagtttaacacattaagtagtggaaaagtatagattatacacttgttttgcatattattcaatgatgttcacagcaataaattactaatatgagaaggtagtgcaaaaaatgcattattacattgcaagttgatgtttcaggaaaaattggttgcattacttgaataccttctaaaagaacgataaaaaattttgtagaagagaagaatatctttccaattagctttaatcagcaaaggcaaaaaatgcaaaacatcttttgtgatactttagttgatgaaaaaaaagccaagaagtggcctggatttcagacatacagcaccttagaaatatgtataattcatagcaaatcaccactatctatggttgccaagtaattgttgtgtacaaagaaatttagtggctttttatgacccagaaagtagaaggtataaaatgaaaatttaatatccattgcttcttttctagattttcattttttttaatttgccacattaaataattcacgagtcttttcttttcccccgtctcattcagtcttactcagggaaagccagttaaataagaagggaagtgtaaaactactaatttacagcttgaagggtttttttttttaagattgcttttctattttatctattaagcttgaaccagtttccatctggaaagattctaaaatataatagaaaataaattgaataatggtaattttaagcagtatatctatgaaatgtgttgtttgggattgatttcaatgtttctccccagcgtaaattttaaagttacatgcaatgattgatatagtttattatcagcaaaattatttctaatattattggcttacacaaactctagcaaaaattattttttcctcaatggaaaaagaaaagagaggaacagagttagaaagagaaaatgacttgaatcccaagtatcttcataccaaacatatcagggttccctgcatagtttgcagttgattgaggatttcacacgacttggcataaatttgattacatctctagactgtaacttttctgattgattatgcttcttttttatccatgtaatgtgttgccttttttaaaagaacaaatactacaataacgtgtgaagtggtcaatccctaagacatcaaagaaaggccacataaccctacccttctagtgctttgtgtgattgggtatcaaaggggttttcttcttctttttttgtttgtttgtttttctgttgcaaggccaatttatccattattggaaatgctaagcaagtggaatttactgttttgttaataaaatatttcttaatacaactgtgatttattgattttaaaaattatatgcggcaccatttcgtgcttaagtgggaaagtaaagaaggctgcatttgaagggaagacccatccttatattatagaggaagaatgttgactctcttttttctggatttaactagtcattaaagacctctatattcatacacttaaagatgtagccattaaatgtacttttgttatatttgttcatcttgatatgccagaaaccataaactcatacagtattagttgcaaacaatattaaaatactaatttcataaatatgctttttctctataaaagacaatggaatccaagttaagtaaacctgtgattaaattccaacactatcaca

SEQ ID NO: 158602 - DNA, 2543 bp, Homo sapiens
  Payload ID: 11035
  Gene Symbol: NRXN1
  Gene Name: neurexin 1
  ENST ID: ENST00000626899
  CDS Start-End: 1478-2311
ctctctctctctctctctctctctctttctttctttccgatggggaagagagggtggtgacaagttagaagcgcttgcggaaggtccccgcccccaggatcaggctccccctgcaaggggacgatgcaaaggtaaaagcacctcgctccgcagcatccagacctggaggggctgcgaccacgggccgagcccacccattccccagccaaaggacgggcccgccgctctccatggtactgcggagagctcagctccgcccttctctttcagaaggacagcacccggcgtcacgtaacccagccttctcaggctccaccaccgccttttccttcccagctctttccctctcctccccctcctcctccttctcctcctcctcctcctcctgctcccctccgttgcctgttctcccctcccgcactcctggagatagacgctcaagcctgacgcctctgaaaaggcagcagcagtcgccttatccatagacctcaggaaattcgctttgaccgatgcatgcttcaggctctggctcgagctgaggggaataaccgggcagatgtctgagtccttaaaaaagacaagataaaaccaaaatgcatcaccaacacacaaccaattgatgtgctggcatcttagcttggccctgcagaggcagagagaaaagaagaggagctgttgcgatttccacatctaacagcttctggctatttcgcaactgctgggtttgagtcctactgttgccgtggctgaaaagagaagtaaaatccaacttgtgagaccacgcacaaggaattaggctttggctgcagcggtgctgaagcccatgctatgacagaagaagcaggcctttgaagctatcctcgggttaagaaatggtgccctaaagaggcaagcatccctttctccgttctgctgtaagacaccacatctgaaggagacagacttgaggcattcacaagcatccaaggatactggctcactgctggcttcctgtactttcttgagaaaagtgttttctttttactgactctcactgcttccttttggcctggtaccactggtggaacctggcagataatgggatttgaggagttaagtatctgttgacactgcagatactcttaaattagttaatcagactcaaatgggtcagtgctttcccttgatcttttgttgaagccttttccagaacgttgtctccaaagtgcatcctccctttggtctggaagttctgtggctaccctgtaccactggggtcaacgttttccagttggaagaggactacagggagagagggcggggttattggaagaagaagaagaaaaaaagaactagataaaggagggcacatccctctcactcccgcctttccccttacctttctgtctctcgggacccttatttcttcgtcacggtgtccaggaccattttgaccctgtcggccccggcacccccccgccgcaccccagccccgagcatggggacggcgctgctccagcgcgggggctgttttcttctgtgcctctcgctgctgctcctgggctgctgggcggagctgggcagcgggctggagtttccgggcgccgagggccaatggacgcgcttccccaagtggaacgcctgctgcgagagcgagatgagcttccagctcaagactcgcagcgcccgcggcctcgtgctctacttcgacgacgagggcttctgcgacttcctggagctgattctgacgcgcggcggccgcctgcagctcagcttctccatcttctgcgctgagcctgcgacgctcctggccgacacgccggttaacgacggcgcctggcacagcgtgcgcatccgccgccagttccgcaacaccacgctcttcatcgaccaggtggaggccaagtgggtggaggtcaagtccaagcgcagggacatgacggtgttcagcggccttttcgtcggggggctgcccccggaactgcgcgccgcggcgctcaagctcaccctggcctcggtgagggagcgggagcccttcaaggggtggattcgtgacgtgagggtcaactcctcgcaggtcctgcccgtggacagcggcgaggtgaagctggacgatgagccgcccaacagcggcgggggaagcccgtgcgaggcgggcgaggagggcgagggcggggtgtgcctcaacggaggtgtgtgctccgtggtggacgaccaggccgtgtgcgactgctcgcgaaccggcttccgcggcaaggactgcagccaagacaacaatgtggaaggtctggcgcacctgatgatgggcgaccaaggtaaaagtaaagattaattcaacaaatctatattctagagcagaaatacaatcatgactatgacatggcatccacagagtgttcatataacaaggaaatgaaaacatttgggcaagttagaatgaatgacagaatggaagtgctgtgagactggtacaaagtgaagtaggaattcagaaaaaggaaagcataacatcaatccaagtctgtcttatgtgaatatccccaccttgtgccatctgttggagg

SEQ ID NO: 158603 - DNA, 506 bp, Homo sapiens
  Payload ID: 11035
  Gene Symbol: NRXN1
  Gene Name: neurexin 1
  ENST ID: ENST00000495871
  CDS Start-End: 1-506
cagtaacaactttatgggctgtctcaaagaggttgtatataaaaataatgatgtgaggctggaattatctcgacttgccaagcaaggagatcctaagatgaagatccatggagtggtggcatttaaatgtgagaatgttgcaactttagacccaatcacctttgaaaccccagagtctttcatctctttgcctaaatggaatgcaaagaaaactggctccatatcatttgatttccgtacaacagagccaaatggcctcatcttatttagccatggcaagccaagacatcagaaagatgccaagcacccacagatgataaaggtggacttctttgctattgagatgctagatggccacctctacctcctcctggacatggggtcaggtactataaaaataaaagccctgttgaagaaagtgaatgatggagaatggtatcatgtggacttccagagagacggacggtcaggtcaaatggcaggtgatcatactaggctggagttcc

SEQ ID NO: 158604 - DNA, 641 bp, Homo sapiens
  Payload ID: 11035
  Gene Symbol: NRXN1
  Gene Name: neurexin 1
  ENST ID: ENST00000625320
  CDS Start-End: 1-641
gatttgggaaatggtgctaacctcatcaaaggaagctcaaataaacctctcaatgacaatcagtggcacaacgtgatgatatcaagggacaccagcaacctccacactgtaaagattgacacaaaaatcacaacgcaaatcaccgccggagccaggaacttagacctcaagagtgacttatatataggaggagtagctaaagaaacatacaaatccttaccaaaacttgtacatgccaaagaaggctttcaaggctgcctggcatcagttgatttaaatggacggcttccggacctcatctccgatgctcttttctgcaacggacagatcgagagaggatgtgaagttgcattgatgaaagctgacttgcaagggcccagcacaacctgccaagaggactcatgttccaatcaaggtgtgtgcttgcaacaatgggatggcttcagctgtgactgtagtatgacttccttcagtggaccactctgcaatgaccctgggacgacatatatctttagcaaaggtggtggacaaatcacgtataagtggcctcctaatgaccgacccagtacacgagcagacagactggccataggttttagcactgttcagaaagaagccgtattggtgcgagtggacagttc

SEQ ID NO: 158605 - DNA, 3243 bp, Homo sapiens
  Payload ID: 11035
  Gene Symbol: NRXN1
  Gene Name: neurexin 1
  ENST ID: ENST00000628515
  CDS Start-End: 1093-2472
ctgctcccctccgttgcctgttctcccctcccgcactcctggagatagacgctcaagcctgacgcctctgaaaaggcagcagcagtcgccttatccatagacctcaggaaattcgctttgaccgatgcatgcttcaggctctggctcgagctgaggggaataaccgggcagatgtctgagtccttaaaaaagacaagataaaaccaaaatgcatcaccaacacacaaccaattgatgtgctggcatcttagcttggccctgcagaggcagagagaaaagaagaggagctgttgcgatttccacatctaacagcttctggctatttcgcaactgctgggtttgagtcctactgttgccgtggctgaaaagagaagtaaaatccaacttgtgagaccacgcacaaggaattaggctttggctgcagcggtgctgaagcccatgctatgacagaagaagcaggcctttgaagctatcctcgggttaagaaatggtgccctaaagaggcaagcatccctttctccgttctgctgtaagacaccacatctgaaggagacagacttgaggcattcacaagcatccaaggatactggctcactgctggcttcctgtactttcttgagaaaagtgttttctttttactgactctcactgcttccttttggcctggtaccactggtggaacctggcagataatgggatttgaggagttaagtatctgttgacactgcagatactcttaaattagttaatcagactcaaatgggtcagtgctttcccttgatcttttgttgaagccttttccagaacgttgtctccaaagtgcatcctccctttggtctggaagttctgtggctaccctgtaccactggggtcaacgttttccagttggaagaggactacagggagagagggcggggttattggaagaagaagaagaaaaaaagaactagataaaggagggcacatccctctcactcccgcctttccccttacctttctgtctctcgggacccttatttcttcgtcacggtgtccaggaccattttgaccctgtcggccccggcacccccccgccgcaccccagccccgagcatggggacggcgctgctccagcgcgggggctgttttcttctgtgcctctcgctgctgctcctgggctgctgggcggagctgggcagcgggctggagtttccgggcgccgagggccaatggacgcgcttccccaagtggaacgcctgctgcgagagcgagatgagcttccagctcaagactcgcagcgcccgcggcctcgtgctctacttcgacgacgagggcttctgcgacttcctggagctgattctgacgcgcggcggccgcctgcagctcagcttctccatcttctgcgctgagcctgcgacgctcctggccgacacgccggttaacgacggcgcctggcacagcgtgcgcatccgccgccagttccgcaacaccacgctcttcatcgaccaggtggaggccaagtgggtggaggtcaagtccaagcgcagggacatgacggtgttcagcggccttttcgtcggggggctgcccccggaactgcgcgccgcggcgctcaagctcaccctggcctcggtgagggagcgggagcccttcaaggggtggattcgtgacgtgagggtcaactcctcgcaggtcctgcccgtggacagcggcgaggtgaagctggacgatgagccgcccaacagcggcgggggaagcccgtgcgaggcgggcgaggagggcgagggcggggtgtgcctcaacggaggtgtgtgctccgtggtggacgaccaggccgtgtgcgactgctcgcgaaccggcttccgcggcaaggactgcagccaaggaaaagaagaatatattgccacgttcaaaggatctgaatacttctgctacgacttgtctcaaaaccccattcaaagcagcagtgatgaaataactctgtcatttaaaacccttcagaggaatggactgatgcttcacactgggaaatcggctgattatgtcaatcttgccctgaaaaatggagctgtctctctggtcattaatttgggatcaggggcctttgaagcactagtggagcctgtgaatggaaagtttaatgataatgcctggcatgatgtgaaagtcaccaggaatctgcgtcaggtgacaatatcagtggatgggattcttaccacaacgggctacacgcaagaagattataccatgctggggtctgatgactttttctatgttggaggcagtcccagcacagccgaccttccagggtcaccagtcagtaacaactttatgggctgtctcaaagaggtaaatatcgttgccatcagaatcattcctaattcatggtctcatcatttcagatccagcatgaaagcacctttgctgaagacccgatgttccagagtcaaacggcacaactttaaattcaatattctactattgtttatgtaggattgggggagggaaacagctcatagatcattatgaaggaattaggttcctcttctttattagtctgtaagtaatttacatttgagatttgtgtggacagttgatattagctataaaagaaagtcaaacaaaaagagatactgggtctaaagttgagctaaatggtttacttgcttatttctacttaaatgccataggtgttatgcatacagtgatgacttttttgagtattaaaagaaaaaagaagaaaaagcaattagcctataggagaagcaacgactatgtaattcaaaacaaaactaaaacaaaataagtctatataatgacataattttcttcccttattttcaacacattctggaggaagtaaatgttatctggtgaatttacttgatatttatctgagcaagatcatcaaactaaatgacatcaataatttcatccctcattatcagctgtagttgtgtattgtaactttgtataagattggaatttgttgggttttggggagagaaagatgaagaagtccctgaatttcattttttaatgaatattttccataaaagctgtctttaaaaaaattcattcagacacaatccaatttctttgggctactggaaccagaggttcctcttacattgtatgcctacaatttaatggtgtagatttctaaacatcaaagttaaataactttgaattcactgttagccataggtgctgttggtaagcagtgatgtacttggtttattctgaagtaaataatttaatcat

SEQ ID NO: 158606 - DNA, 4500 bp, Homo sapiens
  Payload ID: 11035
  Gene Symbol: NRXN1
  Gene Name: neurexin 1
  Uniprot ID: Q9ULB1
  ENST ID: ENST00000630543
  CDS Start-End: 1-4500
atggggacggcgctgctccagcgcgggggctgttttcttctgtgcctctcgctgctgctcctgggctgctgggcggagctgggcagcgggctggagtttccgggcgccgagggccaatggacgcgcttccccaagtggaacgcctgctgcgagagcgagatgagcttccagctcaagactcgcagcgcccgcggcctcgtgctctacttcgacgacgagggcttctgcgacttcctggagctgattctgacgcgcggcggccgcctgcagctcagcttctccatcttctgcgctgagcctgcgacgctcctggccgacacgccggttaacgacggcgcctggcacagcgtgcgcatccgccgccagttccgcaacaccacgctcttcatcgaccaggtggaggccaagtgggtggaggtcaagtccaagcgcagggacatgacggtgttcagcggccttttcgtcggggggctgcccccggaactgcgcgccgcggcgctcaagctcaccctggcctcggtgagggagcgggagcccttcaaggggtggattcgtgacgtgagggtcaactcctcgcaggtcctgcccgtggacagcggcgaggtgaagctggacgatgagccgcccaacagcggcgggggaagcccgtgcgaggcgggcgaggagggcgagggcggggtgtgcctcaacggaggtgtgtgctccgtggtggacgaccaggccgtgtgcgactgctcgcgaaccggcttccgcggcaaggactgcagccaagaagacaacaatgtggaaggtctggcgcacctgatgatgggcgaccaaggtaaaagtaaaggaaaagaagaatatattgccacgttcaaaggatctgaatacttctgctacgacttgtctcaaaaccccattcaaagcagcagtgatgaaataactctgtcatttaaaacccttcagaggaatggactgatgcttcacactgggaaatcggctgattatgtcaatcttgccctgaaaaatggagctgtctctctggtcattaatttgggatcaggggcctttgaagcactagtggagcctgtgaatggaaagtttaatgataatgcctggcatgatgtgaaagtcaccaggaatctgcgtcaggtgacaatatcagtggatgggattcttaccacaacgggctacacgcaagaagattataccatgctggggtctgatgactttttctatgttggaggcagtcccagcacagccgaccttccagggtcaccagtcagtaacaactttatgggctgtctcaaagaggttgtatataaaaataatgatgtgaggctggaattatctcgacttgccaagcaaggagatcctaagatgaagatccatggagtggtggcatttaaatgtgagaatgttgcaactttagacccaatcacctttgaaaccccagagtctttcatctctttgcctaaatggaatgcaaagaaaactggctccatatcatttgatttccgtacaacagagccaaatggcctcatcttatttagccatggcaagccaagacatcagaaagatgccaagcacccacagatgataaaggtggacttctttgctattgagatgctagatggccacctctacctcctcctggacatggggtcaggtactataaaaataaaagccctgttgaagaaagtgaatgatggagaatggtatcatgtggacttccagagagacggacggtcaggtaccatttctgtcaacacgttgcgtactccctacactgctcctggtgagagtgagattctggacctggatgatgagttgtacctgggggggctgccagaaaataaagctggccttgtcttccccaccgaggtgtggactgctctgctcaactatggctacgtgggctgcatcagggatttgttcatcgatggccaaagcaaagatatccggcaaatggctgaagttcaaagtactgctggagtgaagccttcctgctcaaaggaaacagcaaaaccgtgccttagcaacccttgcaaaaacaatggcatgtgcagggatgggtggaacagatatgtctgtgattgttccggaacaggctatcttggcaggtcctgtgagagagaggcaacggttttgagctatgatgggagcatgtttatgaaaattcagctccccgtagtcatgcatacggaggctgaggatgtttccttacggttccgatcccagcgtgcatatggcattctgatggcaaccacttctagagactctgctgacaccctccgcctggagctagacgcaggacgtgtgaaactgacggtcaatctagattgtatcaggattaactgtaattccagcaaaggtcccgagactctttttgctggctataacctcaatgataacgagtggcacacagtgcgtgtagttcggcgtggaaaaagtttaaagttaacagtggatgaccaacaggccatgacaggtcaaatggcaggtgatcatactaggctggagttccataacatagagactggcatcatcacagaacgacggtatctttcttctgtcccctccaacttcattggacacctgcagagcttgacatttaatggaatggcatacattgacctgtgtaaaaatggcgacatagattactgtgagcttaatgccagatttggcttcaggaacatcatagcagatcctgtcaccttcaagaccaaatcgagctatgttgccttagctaccttgcaagcctacacttctatgcatctttttttccagttcaagacaacatccctagatggattaattctatataacagtggggatggaaatgactttattgtggttgaattagttaaagggtacttacattacgtgtttgatttgggaaatggtgctaacctcatcaaaggaagctcaaataaacctctcaatgacaatcagtggcacaacgtgatgatatcaagggacaccagcaacctccacactgtaaagattgacacaaaaatcacaacgcaaatcaccgccggagccaggaacttagacctcaagagtgacttatatataggaggagtagctaaagaaacatacaaatccttaccaaaacttgtacatgccaaagaaggctttcaaggctgcctggcatcagttgatttaaatggacggcttccggacctcatctccgatgctcttttctgcaacggacagatcgagagaggatgtgaagggcccagcacaacctgccaagaggactcatgttccaatcaaggtgtgtgcttgcaacaatgggatggcttcagctgtgactgtagtatgacttccttcagtggaccactctgcaatgaccctgggacgacatatatctttagcaaaggtggtggacaaatcacgtataagtggcctcctaatgaccgacccagtacacgagcagacagactggccataggttttagcactgttcagaaagaagccgtattggtgcgagtggacagttcttcaggcttgggtgactacctagaactgcatatacaccagggaaaaattggagttaagtttaatgttgggacagatgacatcgccattgaagaatccaatgcaatcattaatgatgggaaataccatgtagttcgtttcacgaggagtggtggcaatgccacgttgcaggtggacagctggccagtgatcgagcgctaccctgcaggaaacaatgataacgagcgcctggcgattgctagacagcgaattccatatcgacttggtcgagtagttgatgaatggctactcgacaaagggcgtcagctcacaatcttcaatagccaagcaaccataataattggcgggaaagagcagggccagcccttccagggccagctctctgggctgtactacaatggcttgaaagttctgaatatggcagccgaaaacgatgccaacatcgccatagtgggaaatgtgagactggttggtgaagtgccttcctctatgacaactgagtcaacagccactgccatgcaatcagagatgtccacatcaattatggagactaccacgaccctggctactagcacagccagaagaggaaagcccccgacaaaagaacccattagccagaccacagatgacatccttgtggcctcagcagagtgtcccagcgatgatgaggacattgacccctgtgagccgagctcaggtgggttagccaacccaacccgagcaggcggcagagagccgtatccaggctcagcagaagtgatccgggagtccagcagcaccacgggtatggtcgttgggatagtagccgctgccgccctgtgcatccttatcctcctctatgccatgtacaagtacagaaaccgggatgaaggctcataccatgtggacgagagtcgaaactacatcagtaactcagcacagtccaatggggctgttgtaaaggagaaacaacccagcagtgcgaaaagctccaacaaaaataagaaaaacaaggataaagagtattatgtctga

SEQ ID NO: 158607 - DNA, 837 bp, Homo sapiens
  Payload ID: 11035
  Gene Symbol: NRXN1
  Gene Name: neurexin 1
  ENST ID: ENST00000630656
  CDS Start-End: 409-636
agcacagcttagatctgcagcatgcagggtttaagataccagaagcctaaaaacaataataatgaaaataagaataaactcatttggataaactaattttaagatttatgttaaaatatttcttcttgaagattgcatgtcaaatttatgcacgctgtatgtgaaatctagtccttattctcgagaaaagcaaaaatgccttggcattcaaacattccctaggcctgtggagaattagagctagcagaaaccacagatgacatccttgtggcctcagcagagtgtcccagcgatgatgaggacattgacccctgtgagccgagctcagccaacccaacccgagcaggcggcagagagccgtatccaggctcagcagaagtgatccgggagtccagcagcaccacgggtatggtcgttgggatagtagccgctgccgccctgtgcatccttatcctcctctatgccatgtacaagtacagaaaccgggatgaaggctcataccatgtggacgagagtcgaaactacatcagtaactcagcacagtccaatggggctgttgtaaaggagaaacaacccagcagtgcgaaaagctccaacaaaaataagaaaaacaaggataaagagtattatgtctgatcccaagatcttaaatggacacttgtatagaaatagtcttcattttatctgagacataatataaacttatttactttcctttttatgaagcacatacaaaagaagacagggaatgcaatcaggaaggaaagactttttaaaaaataaaaacaagtatctcatgctcttgtttctcaaaaaagaaaaacaaaaaacaaaaaa

SEQ ID NO: 158608 - DNA, 464 bp, Homo sapiens
  Payload ID: 11035
  Gene Symbol: NRXN1
  Gene Name: neurexin 1
  ENST ID: ENST00000496792
  CDS Start-End: 1-380
ccccggaactgcgcgccgcggcgctcaagctcaccctggcctcggtgagggagcgggagcccttcaaggggtggattcgtgacgtgagggtcaactcctcgcaggtcctgcccgtggacagcggcgaggtgaagctggacgatgagccgcccaacagcggcgggggaagcccgtgcgaggcgggcgaggagggcgagggcggggtgtgcctcaacggaggtgtgtgctccgtggtggacgaccaggccgtgtgcgactgctcgcgaaccggcttccgcggcaaggactgcagccaaggtctggcgcacctgatgatgggcgaccaaggtatgggctctgttccttttccactctgctttcagtgttttcttgttctgtagctgctttcaaaccatcactgcaaaggatgggcaaatgcttgcaaattatatggctgcaaattaaatacatatcttttgttcaca

SEQ ID NO: 158609 - DNA, 518 bp, Homo sapiens
  Payload ID: 11035
  Gene Symbol: NRXN1
  Gene Name: neurexin 1
  ENST ID: ENST00000627198
  CDS Start-End: 1-411
tcctcgcaggtcctgcccgtggacagcggcgaggtgaagctggacgatgagccgcccaacagcggcgggggaagcccgtgcgaggcgggcgaggagggcgagggcggggtgtgcctcaacggaggtgtgtgctccgtggtggacgaccaggccgtgtgcgactgctcgcgaaccggcttccgcggcaaggactgcagccaagaaataaaattcggtcttcagtgtgttttgccggtgctgttacatgacaatgaccaaggaaaatactgttgtataaatacagcaaagcctctaacagaaaaagacaacaatgtggaaggtctggcgcacctgatgatgggcgaccaaggtaaaagtaaagagaaacttgaaattttcagatggataaggaaggacttcactaatttctgactgcagactccagacatatcttcaataaagcaatgcaggagagctatctaatccattctaaattacatatattccctcaagtaagagaataaaaataatgtcactca

SEQ ID NO: 158610 - DNA, 1164 bp, Homo sapiens
  Payload ID: 11035
  Gene Symbol: NRXN1
  Gene Name: neurexin 1
  ENST ID: ENST00000625891
  CDS Start-End: 23-553
gtgacttcttcagaccactttcatgacttctggaagcaaatgtcctagtacagactcaggaaaagaagaatatattgccacgttcaaaggatctgaatacttctgctacgacttgtctcaaaaccccattcaaagcagcagtgatgaaataactctgtcatttaaaacccttcagaggaatggactgatgcttcacactgggaaatcggctgattatgtcaatcttgccctgaaaaatggagctgtctctctggtcattaatttgggatcaggggcctttgaagcactagtggagcctgtgaatggaaagtttaatgataatgcctggcatgatgtgaaagtcaccaggaatctgcgtcaggtgacaatatcagtggatgggattcttaccacaacgggctacacgcaagaagattataccatgctggggtctgatgactttttctatgttggaggcagtcccagcacagccgaccttccagggtcaccaatccagcatgaaagcacctttgctgaagacccgatgttccagagtcaaacggcacaactttaaattcaatattctactattgtttatgtaggattgggggagggaaacagctcatagatcattatgaaggaattaggttcctcttctttattagtctgtaagtaatttacatttgagatttgtgtggacagttgatattagctataaaagaaagtcaaacaaaaagagatactgggtctaaagttgagctaaatggtttacttgcttatttctacttaaatgccataggtgttatgcatacagtgatgacttttttgagtattaaaagaaaaaagaagaaaaagcaattagcctataggagaagcaacgactatgtaattcaaaacaaaactaaaacaaaataagtctatataatgacataattttcttcccttattttcaacacattctggaggaagtaaatgttatctggtgaatttacttgatatttatctgagcaagatcatcaaactaaatgacatcaataatttcatccctcattatcagctgtagttgtgtattgtaactttgtataagattggaatttgttgggttttggggagagaaagatgaagaagtccctgaatttcattttttaatgaatattttccataaaagctgtctttaaaaaaatt

SEQ ID NO: 158611 - DNA, 3553 bp, Homo sapiens
  Payload ID: 11035
  Gene Symbol: NRXN1
  Gene Name: neurexin 1
  ENST ID: ENST00000635519
  CDS Start-End: 156-344
gggctgatgcgcaggcaatttatcatcttgatctcccactgagtcagggagctctcctgtcaccagtattgatttcagaggatggactaaatttcctaggatttccattaagaattaagaaaaaagctctaagcacgcagggtagccagacagacatggatatgagatggcactgtgaaaacttgcagaccacagatgacatccttgtggcctcagcagagtgtcccagcgatgatgaggacattgacccctgtgagccgagctcagggacaaagcagaccatgtggaaaacttctagagaccaccgtatcttaccaaatgctagaagagagaggaaggattaaaaactacttttcagtggtcctttaagccaacccaacccgagcaggcggcagagagccgtatccaggctcagcagaagtgatccgggagtccagcagcaccacgggtatggtcgttgggatagtagccgctgccgccctgtgcatccttatcctcctctatgccatgtacaagtacagaaaccgggatgaaggctcataccatgtggacgagagtcgaaactacatcagtaactcagcacagtccaatggggctgttgtaaaggagaaacaacccagcagtgcgaaaagctccaacaaaaataagaaaaacaaggataaagagtattatgtctgatcccaagatcttaaatggacacttgtatagaaatagtcttcattttatctgagacataatataaacttatttactttcctttttatgaagcacatacaaaagaagacagggaatgcaatcaggaaggaaagactttttaaaaaataaaaacaagtatctcatgctcttgtttctcaaaaaagaaaaacaaaaaacaaaaaacaggggccaataaattccctaacatccacagtgttttcatttactctgcttgtctttatgttgctggaacatttctaaaagacagtgatgaccgcacgcattcataaagcaaaggagtactacagcatcaaggcacaacacaaaaaccaacacaaaacataacacaaaaaagaagctacctatgatcctggatttagccaaagtgctagcgctttcctgagaagtcagtccaattgccagagaagactgtccttttgagtgactcaacctgcaaacctttaagagtttgccgcctggtgcaactggagcagtggttggaacttgcatttgaaacaaagtgctggcttttttgaagacttgtgtaggaacacattcaaaaagcccctttctggttgtgagagaggaaaaaaaagtatggaggccttattttcaaaaatgtgaaatataaggcacgttttcacacaaaatttcaaaacaaaaacaagagggcatagatgcaatcattgggaaattttcatgcacgcttattatgttattacatatgtttatataaaatccatctctgtgtgctttctggactgtgataagtgacgttttatagcctgttgtatagaaaatgcaaaatatatctctgctcttcagccatttttggtaaattcaatgttataagtgttgctaagtatagggagttttatgacatcagagcaacaattatttcagttgggtttttctttttttttgccaccattataaattgccacaattacttttattttttaaagaaattacagtgtagtgtttattctaaggaagatatgtatgaatgtatatacaaagactcagctacttcttttcttatatgtacagccttcattctgttgcaattaagttttagtacttgtatgaaaggtgtgaattagaaagtcacatatatacatatgtatcttataatcttttctccctgaaatactcacattcccacatacattcactattttcacacacacacacacacacacacacacacacacacacacacacacacgaatccacagcaatccatcagatatgctggaagatccaaacgtgcatacagtagcaaatatttattgacaaattgaaaagcaggaaggaagagggttgtgccaaggtattgatgacaaatggggtgatttgcttcattgagatcttgctcccaggtaaccttaagaagattttagtccctaaagaaatgaacctttccttatcaaatagaatatcactgatatactgctgcatgaataagaaccattatgtgggcaggttatggaagcaaaattggttaatctacaccttaactctggctgctgcaattgaaaactttctttctaataaaataatatatatatctctgaatctgatgtgcatgatgaacatttctggaaagtaaacactttctctcgactaagaaagtatttttcagtaatttttgattctgtattactacccacttaaaaaatcattctctgttaattattgactatgttttaacttttctggttttacatatatatcattaaatatagttttagtttaacacattaagtagtggaaaagtatagattatacacttgttttgcatattattcaatgatgttcacagcaataaattactaatatgagaaggtagtgcaaaaaatgcattattacattgcaagttgatgtttcaggaaaaattggttgcattacttgaataccttctaaaagaacgataaaaaattttgtagaagagaagaatatctttccaattagctttaatcagcaaaggcaaaaaatgcaaaacatcttttgtgatactttagttgatgaaaaaaaagccaagaagtggcctggatttcagacatacagcaccttagaaatatgtataattcatagcaaatcaccactatctatggttgccaagtaattgttgtgtacaaagaaatttagtggctttttatgacccagaaagtagaaggtataaaatgaaaatttaatatccattgcttcttttctagattttcattttttttaatttgccacattaaataattcacgagtcttttcttttcccccgtctcattcagtcttactcagggaaagccagttaaataagaagggaagtgtaaaactactaatttacagcttgaagggtttttttttttaagattgcttttctattttatctattaagcttgaaccagtttccatctggaaagattctaaaatataatagaaaataaattgaataatggtaattttaagcagtatatctatgaaatgtgttgtttgggattgatttcaatgtttctccccagcgtaaattttaaagttacatgcaatgattgatatagtttattatcagcaaaattatttctaatattattggcttacacaaactctagcaaaaattattttttcctcaatggaaaaagaaaagagaggaacagagttagaaagagaaaatgacttgaatcccaagtatcttcataccaaacatatcagggttccctgcatagtttgcagttgattgaggatttcacacgacttggcataaatttgattacatctctagactgtaacttttctgattgattatgcttcttttttatccatgtaatgtgttgccttttttaaaagaacaaatactacaata

SEQ ID NO: 158612 - DNA, 3044 bp, Homo sapiens
  Payload ID: 11035
  Gene Symbol: NRXN1
  Gene Name: neurexin 1
  ENST ID: ENST00000331040
  CDS Start-End: 27-2738
atttgtgacttcttcagaccactttcatgacttctggaagcaaatgtcctagtacagactcaggaaaagaagaatatattgccacgttcaaaggatctgaatacttctgctacgacttgtctcaaaaccccattcaaagcagcagtgatgaaataactctgtcatttaaaacccttcagaggaatggactgatgcttcacactgggaaatcggctgattatgtcaatcttgccctgaaaaatggagctgtctctctggtcattaatttgggatcaggggcctttgaagcactagtggagcctgtgaatggaaagtttaatgataatgcctggcatgatgtgaaagtcaccaggaatctgcgtcaggtgacaatatcagtggatgggattcttaccacaacgggctacacgcaagaagattataccatgctggggtctgatgactttttctatgttggaggcagtcccagcacagccgaccttccagggtcaccagtcagtaacaactttatgggctgtctcaaagaggttgtatataaaaataatgatgtgaggctggaattatctcgacttgccaagcaaggagatcctaagatgaagatccatggagtggtggcatttaaatgtgagaatgttgcaactttagacccaatcacctttgaaaccccagagtctttcatctctttgcctaaatggaatgcaaagaaaactggctccatatcatttgatttccgtacaacagagccaaatggcctcatcttatttagccatggcaagccaagacatcagaaagatgccaagcacccacagatgataaaggtggacttctttgctattgagatgctagatggccacctctacctcctcctggacatggggtcaggtactataaaaataaaagccctgttgaagaaagtgaatgatggagaatggtatcatgtggacttccagagagacggacggtcaggtaccatttctgtcaacacgttgcgtactccctacactgctcctggtgagagtgagattctggacctggatgatgagttgtacctgggggggctgccagaaaataaagctggccttgtcttccccaccgaggtgtggactgctctgctcaactatggctacgtgggctgcatcagggatttgttcatcgatggccaaagcaaagatatccggcaaatggctgaagttcaaagtactgctggagtgaagccttcctgctcaaaggaaacagcaaaaccgtgccttagcaacccttgcaaaaacaatggcatgtgcagggatgggtggaacagatatgtctgtgattgttccggaacaggctatcttggcaggtcctgtgagagagaggcaacggttttgagctatgatgggagcatgtttatgaaaattcagctccccgtagtcatgcatacggaggctgaggatgtttccttacggttccgatcccagcgtgcatatggcattctgatggcaaccacttctagagactctgctgacaccctccgcctggagctagacgcaggacgtgtgaaactgacggtcaatctaggcaaaggtcccgagactctttttgctggctataacctcaatgataacgagtggcacacagtgcgtgtagttcggcgtggaaaaagtttaaagttaacagtggatgaccaacaggccatgacaggtcaaatggcaggtgatcatactaggctggagttccataacatagagactggcatcatcacagaacgacggtatctttcttctgtcccctccaacttcattggacacctgcagagcttgacatttaatggaatggcatacattgacctgtgtaaaaatggcgacatagattactgtgagcttaatgccagatttggcttcaggaacatcatagcagatcctgtcaccttcaagaccaaatcgagctatgttgccttagctaccttgcaagcctacacttctatgcatctttttttccagttcaagacaacatccctagatggattaattctatataacagtggggatggaaatgactttattgtggttgaattagttaaagggtacttacattacgtgtttgatttgggaaatggtgctaacctcatcaaaggaagctcaaataaacctctcaatgacaatcagtggcacaacgtgatgatatcaagggacaccagcaacctccacactgtaaagattgacacaaaaatcacaacgcaaatcaccgccggagccaggaacttagacctcaagagtgacttatatataggaggagtagctaaagaaacatacaaatccttaccaaaacttgtacatgccaaagaaggctttcaaggctgcctggcatcagttgatttaaatggacggcttccggacctcatctccgatgctcttttctgcaacggacagatcgagagaggatgtgaagggcccagcacaacctgccaagaggactcatgttccaatcaaggtgtgtgcttgcaacaatgggatggcttcagctgtgactgtagtatgacttccttcagtggaccactctgcaatgaccctgggacgacatatatctttagcaaaggtggtggacaaatcacgtataagtggcctcctaatgaccgacccagtacacgagcagacagactggccataggttttagcactgttcagaaagaagccgtattggtgcgagtggacagttcttcaggcttgggtgactacctagaactgcatataactcttcaatgatcagaatgcttttgtggaggcaactgctatgcttgaaagaacatagatggcctttgaagtataatatttgattcaaagtcaagttccgtcacatagtagctacggaatcataagcaaattatctaacatctgcaaccttctgtttccttattggaatccttgacctgcagtcattataatgaaatctggagccaatgatggatatatgaacctttggattcaatctttccaaacatatttctgactagaaggaatttggttttattttcatccagctaacgtgaaataaaattgtcctttcaaaat

SEQ ID NO: 158613 - DNA, 6621 bp, Homo sapiens
  Payload ID: 11036
  Gene Symbol: NRXN2
  Gene Name: neurexin 2
  Uniprot ID: Q9P2S2
  ENST ID: ENST00000265459
  CDS Start-End: 463-5601
tgcagggatgcggcggcgggagcagccgccctgactcgcggagcatcctcctcggagaggcaccgcggcggggcgggcgggcgggcggggacgcggcggggagggagagaggcgcgaggcggcagacaccgctagccctggctctgccacccgtcggagacggggcggccctgtagctctgctacccaccctccagcttctggcgccccgagaaccaggcatccctccctgctcttctgtcggagcccgcggcgggggaggggcgccgccgccgccgcctgagggaagccggcatctgggcctctgcgcgcctcgccccgcggccgggcccatggcactgtgagcctgcaagggagccccgctcagcgcggggagcgcccggccccctcccgccccatgcgcccgcggctctgaagcctgagcgggggccgggggccgggcggggccggggccgccgtaggcatggcgtccgggagccggtggcggccgacaccgccgccgctgctgttgctgctgctgctggcgctggcggcgcgcgcggacggcctggagttcggcggcggccccgggcagtgggctcgctacgcgcgctgggcgggcgcggcgagcagcggcgagctcagcttcagcctgcgcaccaacgccacgcgcgcgctgctgctctacctggacgacggcggcgactgcgacttcctggagctgctgctggtggacggccgcctgcggctgcgcttcacgctttcgtgcgccgagccggccacgctgcagctggacacgccggtggccgacgaccgctggcacatggtgctgctgacccgcgacgcgcgccgcacggcgctggcggtggacggcgaggcccgcgccgccgaggtgcgctccaagcggcgcgagatgcaggtggccagcgacctgttcgtgggcggcatcccgcccgacgtgcgcctctcggcgcttacgctgagcaccgtcaagtacgagccgcccttccgcggcctcttggccaacctgaagctgggcgagcggccccccgcgctgctgggcagccagggcctgcgcggcgccaccgccgacccgctgtgcgcgcccgcgcgcaacccctgcgccaacggcggcctctgcaccgtgctggcccccggcgaggtgggctgcgactgcagccacacgggcttcggcggcaagttctgcagcgaagaggagcaccccatggaaggtccggctcacctgacgttaaacagcgaagtagggtccttactgttctccgaggggggggccgggagaggaggagccggcgatgtgcaccagccaacaaaaggcaaggaggagtttgtggcgaccttcaaaggcaatgagttcttctgctacgacctgtcacacaaccccatccagagcagcactgatgagatcacactggccttccgcaccctgcaacgcaacggcctgatgctgcatacaggcaagtcggccgactacgtcaacctgtccctcaagtctggggctgtctggctggtcatcaacctaggctcaggtgccttcgaggcccttgtggaacccgtcaatggcaagttcaacgacaacgcctggcacgacgtccgggtcacccgaaacctgcgccagcacgcagggattggacacgctatggtaaacaaactgcattatctggtgaccatctcggtggacgggatcctgaccaccacaggctacacgcaggaggattacaccatgctgggctctgatgacttcttctacattgggggcagccccaacacagctgacctgccgggctcgcccgtcagcaacaacttcatgggctgcctcaaggacgtggtctataagaacaatgacttcaaattggaactatcccgcctggcaaaggaaggggaccccaagatgaagctgcagggggacttgtcattccgctgtgaggatgtggctgccctggaccctgtgacctttgagagtcccgaggcctttgtggcgctgccccgctggagcgctaagcgcactggctccatctccctagacttccgcaccaccgagcccaatgggctgctgctcttcagccagggccggcgggctgggggtggagctggcagccacagctctgctcagcgggccgactactttgccatggagctattggacggccacctctatcttctgctggacatgggatctgggggcatcaagctgcgggcatccagccgcaaggtcaatgatggcgagtggtgtcacgtggacttccagagggatgggcgaaaaggctccatctcagtgaatagtcgcagcacgccgttcttggccactggagacagcgagattctggacctggagagtgagctgtacctgggcggtctccctgaggggggccgggtggacctgcccctgcccccagaggtgtggacagcagcactccgggcaggctacgtgggctgtgtgcgggacctcttcatagatgggcgtagccgagacctccggggcctggctgaggctcagggggctgtgggcgttgcccccttttgctcccgggagacgctgaagcagtgtgcatctgccccctgtcgcaatgggggcgtctgtcgagaaggctggaaccgcttcatctgtgactgcatcgggaccggctttcttgggcgggtctgtgagagagaggccacggtcctgagctacgatggctccatgtacatgaagatcatgctgcctaacgccatgcacacggaggcagaggatgtgtccctgcgtttcatgtcccagcgggcctacggactcatgatggccaccacttccagggagtctgccgacaccctacgcctggagctggatggggggcagatgaagctcactgtcaacctcgactgcctgcgcgtcggctgcgcacccagtaaaggccccgaaacgctgtttgcggggcacaagctcaatgacaatgagtggcacacggtgagggtggtccggcgtggcaagagcctgcagctgtctgtggacaacgtgactgtggagggacagatggcaggagcccatatgcggctggagttccacaacattgagacgggcatcatgacggagcggcggtttatctccgtggtgccctccaacttcatcgggcatctgagtgggctcgtgttcaatggccagccctacatggaccagtgcaaggatggtgacatcacctactgtgagctcaatgctcgctttggcctgcgtgccatcgtggccgatcccgtcaccttcaagagtcgcagcagctacctggcactcgccacgctccaagcctatgcttccatgcacctcttcttccagttcaagaccacggcccctgatgggcttcttctgttcaactcgggcaacggcaatgacttcattgtcatcgagctggtcaaggggtacatccactacgtgtttgacctggggaatggcccgtccttgatgaaggggaactcagacaaaccagtcaatgacaaccagtggcacaacgtggtggtgtccagggacccaggcaacgtgcacacgctcaagattgactcccgcactgtcacgcagcactccaatggcgcccgaaacctcgatctcaaaggggagttgtacattggcggtctgagcaagaatatgttcagcaacctgcccaagctggtggcctcccgggatggctttcagggctgcctggcctcagtggacctcaacggacgtctcccagacctcatcgccgacgccctgcaccgcattgggcaggtggagaggggctgtgatggccccagcaccacctgcactgaagagtcctgtgccaaccagggcgtctgcttgcagcagtgggatggcttcacctgcgactgcaccatgacttcctatggaggccctgtctgcaatgatcccgggaccacatacatctttgggaaggggggagcgctcatcacctacacgtggccccccaatgacaggcccagcacgaggatggatcgcctggccgtgggcttcagcacccaccagcggagcgctgtgctggtgcgggtggacagcgcctccggccttggagactacctgcagctgcacatcgaccagggcaccgtgggggtgatctttaacgtgggcacggacgacattaccatcgacgagcccaacgccatagtaagcgacggcaaataccacgtggtgcgcttcactcgaagcggcggcaacgccaccctgcaggtggacagctggccggtcaacgagcggtacccggcaggaaactttgataacgagcgcctggcgattgctagacagagaatcccctaccggcttggtcgagtagtagatgagtggctgctcgacaaaggccgccagctgaccatcttcaacagccaggctgccatcaagatcgggggccgggatcagggccgccccttccagggccaggtgtccggcctctactacaatgggctcaaggtgctggcgctggccgccgagagcgaccccaatgtgcggactgagggtcacctgcgcctggtgggggaggggccgtccgtgctgctcagtgcggagaccacggccaccaccctgctggctgacatggccaccaccatcatggagactaccaccaccatggccactaccaccacgcgccggggccgctcccccacactgagggacagcaccacccagaacacagatgacctgctggtggcctctgctgagtgtccaagcgatgatgaggacctggaggagtgtgagcccagtactggaggagagttaatattgcccattatcacggaggactccttagacccccctcccgtggccacccgatcccccttcgtgcccccgccccctaccttctaccccttcctcacgggagtgggcgccacccaagacacgctgcccccgcccgccgcgcgccgcccgccctctgggggcccgtgccaggccgagcgggacgacagcgactgcgaggagcccatcgaggcctcgggcttcgcctccggggaggtctttgactccagcctcccccccacggacgacgaggacttttacaccacctttcccctggtcacggaccgcaccaccctcctgtcaccccgcaaacccgctccccggcccaacctcaggacagatggggccacgggcgcccctggggtgctgtttgccccctccgccccggcccccaacctgccggcgggcaaaatgaaccaccgagacccgcttcagcccttgctggagaacccgcccttggggcccggggcccccacgtcctttgagccgcggaggccccctcccctgcgccccggcgtgacctcagcccccggcttcccccatctgcccacagccaaccccacagggcctggggagcggggcccgccgggcgcagtggaggtgatccgggagtccagcagcaccacgggcatggtggtgggcattgtggcggcggcggcgctctgcatcctcatcctcctctacgccatgtataagtaccgcaatcgtgatgagggctcctaccaggtggaccagagccgaaactacatcagtaactcggcccagagcaatggggcggtggtgaaagagaaggccccggctgcccccaagacgcccagcaaggccaagaagaacaaagacaaggagtattatgtctgagcccccggcactgcgccccactgccagctgcccctcctgggagggcccgggaggagggtgccaccctctccctgccaggggcctggggaccctctccctggctgcctcaggcttctcttacgaagaggaaacgcaaaaaaagaaaaggaaaaaccccgtgctcgcccccttcctcctgccgtccactgcgcggcctcgtcagtcccggggctgactgtccctctcagctctgcgcctgccaggcagggcacgtgctcacagccctgggttgatttatttttttaagggggtagttttattttggtggggttgggtgggaaggaaggctgggggttttgtaaagtgtccactgctcgtcctgttaattttcctcaatttttcttcttcttccttctgtccctcctgccttccttctcttcccaagccctccaatccccatcccaggcttgctgtgtctcactgtccccaccctccttccctacttctttttttgtgtgtctggtttctcccttcctttcctccctttgggtttccagagtcggtgggagaagggcgggagggtgggcccgagtggcccagtgggtgggtggggtggggtggggcaagtgccccaactcccctcaccaggagaggcacctgcttggtgccgcccagggaaggggctcaggcctgacggaaggcctgttctgtgtgtgccgccgggcgacgtgcattgatggggaagctgctggaggagcaggggtggggggtgggagggaggggaaaggcaaatgcagatatatattacagacaaatactctagattccacgagcagcagcctgtggcacccgctgggcgcgggcagcagggaagagggagcaaggcattgtccacagactgctggggtcacttctttgcccacgggctccctgctcccccagttttttttctctctttgttaacaaatgtgtctgagtcttggaaaacaccccaaccccggaaatgtgtgggaaaaagaaaacaaaaactttccaaattcc

SEQ ID NO: 158614 - DNA, 3535 bp, Homo sapiens
  Payload ID: 11036
  Gene Symbol: NRXN2
  Gene Name: neurexin 2
  Uniprot ID: P58401
  ENST ID: ENST00000301894
  CDS Start-End: 513-2513
ggcagcagcggcgcggccggccccagtcgccgtcggtctcccgccttcgggggaaccaggtctccgtccctcttctctcctccagcccgcaccgccccgctccccagctcggtttttccgcaggatttccctcgctctcccctccctgcttggcccccgcgctcccctccctctccactcggcaccatgccccctcccccgggcgctcccccgggtttctgacggccctctgcgccgctccgaccccgccgggatgcagagagacccctagctcctcgcgatggacccaggcatcctggaccttggcgttgccgctccgcggacccccgatttcccggcgggatccagttgattttgttggctccggaccgaggcttgggccctggtttacctccgcttcatccctaccccgctcccggagctcggagccggaggggggcttcgcggggctgcgcagccccgcgtccccgcccccggccatggggctgtgaggcggtcgcccccgggccgaaatgccccccggggggagcgggccgggggggtgcccgcgccgccccccggccctggctgggcccctgccgccgcctccaccgccgccgccgccacctctgctgccgctgttgccgctgttgctgctgttgctgctgggggcggccgagggggcccgggtctcctccagcctcagcaccacccaccacgtccaccacttccacagcaagcacggcaccgtgcccatcgccatcaaccgcatgcccttcctcacccgcggcggccacgccgggaccacatacatctttgggaaggggggagcgctcatcacctacacgtggccccccaatgacaggcccagcacgaggatggatcgcctggccgtgggcttcagcacccaccagcggagcgctgtgctggtgcgggtggacagcgcctccggccttggagactacctgcagctgcacatcgaccagggcaccgtgggggtgatctttaacgtgggcacggacgacattaccatcgacgagcccaacgccatagtaagcgacggcaaataccacgtggtgcgcttcactcgaagcggcggcaacgccaccctgcaggtggacagctggccggtcaacgagcggtacccggcaggaaactttgataacgagcgcctggcgattgctagacagagaatcccctaccggcttggtcgagtagtagatgagtggctgctcgacaaaggccgccagctgaccatcttcaacagccaggctgccatcaagatcgggggccgggatcagggccgccccttccagggccaggtgtccggcctctactacaatgggctcaaggtgctggcgctggccgccgagagcgaccccaatgtgcggactgagggtcacctgcgcctggtgggggaggggccgtccgtgctgctcagtgcggagaccacggccaccaccctgctggctgacatggccaccaccatcatggagactaccaccaccatggccactaccaccacgcgccggggccgctcccccacactgagggacagcaccacccagaacacagatgacctgctggtggcctctgctgagtgtccaagcgatgatgaggacctggaggagtgtgagcccagtactggaggagagttaatattgcccattatcacggaggactccttagacccccctcccgtggccacccgatcccccttcgtgcccccgccccctaccttctaccccttcctcacgggagtgggcgccacccaagacacgctgcccccgcccgccgcgcgccgcccgccctctgggggcccgtgccaggccgagcgggacgacagcgactgcgaggagcccatcgaggcctcgggcttcgcctccggggaggtctttgactccagcctcccccccacggacgacgaggacttttacaccacctttcccctggtcacggaccgcaccaccctcctgtcaccccgcaaacccgctccccggcccaacctcaggacagatggggccacgggcgcccctggggtgctgtttgccccctccgccccggcccccaacctgccggcgggcaaaatgaaccaccgagacccgcttcagcccttgctggagaacccgcccttggggcccggggcccccacgtcctttgagccgcggaggccccctcccctgcgccccggcgtgacctcagcccccggcttcccccatctgcccacagccaaccccacagggcctggggagcggggcccgccgggcgcagtggaggtgatccgggagtccagcagcaccacgggcatggtggtgggcattgtggcggcggcggcgctctgcatcctcatcctcctctacgccatgtataagtaccgcaatcgtgatgagggctcctaccaggtggaccagagccgaaactacatcagtaactcggcccagagcaatggggcggtggtgaaagagaaggccccggctgcccccaagacgcccagcaaggccaagaagaacaaagacaaggagtattatgtctgagcccccggcactgcgccccactgccagctgcccctcctgggagggcccgggaggagggtgccaccctctccctgccaggggcctggggaccctctccctggctgcctcaggcttctcttacgaagaggaaacgcaaaaaaagaaaaggaaaaaccccgtgctcgcccccttcctcctgccgtccactgcgcggcctcgtcagtcccggggctgactgtccctctcagctctgcgcctgccaggcagggcacgtgctcacagccctgggttgatttatttttttaagggggtagttttattttggtggggttgggtgggaaggaaggctgggggttttgtaaagtgtccactgctcgtcctgttaattttcctcaatttttcttcttcttccttctgtccctcctgccttccttctcttcccaagccctccaatccccatcccaggcttgctgtgtctcactgtccccaccctccttccctacttctttttttgtgtgtctggtttctcccttcctttcctccctttgggtttccagagtcggtgggagaagggcgggagggtgggcccgagtggcccagtgggtgggtggggtggggtggggcaagtgccccaactcccctcaccaggagaggcacctgcttggtgccgcccagggaaggggctcaggcctgacggaaggcctgttctgtgtgtgccgccgggcgacgtgcattgatggggaagctgctggaggagcaggggtggggggtgggagggaggggaaaggcaaatgcagatatatattacagacaaatactctagattccacgagcagcagcctgtggcacccgctgggcgcgggcagcagggaagagggagcaaggcattgtccacagactgctggggtcacttctttgcccacgggctccctgctcccccagttttttttctctctttgttaacaaatgtgtctgagtcttggaaaacaccccaaccccggaaatgtgtgggaaaaagaaaacaaaaactttccaaattccaa

SEQ ID NO: 158615 - DNA, 6373 bp, Homo sapiens
  Payload ID: 11036
  Gene Symbol: NRXN2
  Gene Name: neurexin 2
  Uniprot ID: Q9P2S2
  ENST ID: ENST00000377551
  CDS Start-End: 213-5351
ggcgggggaggggcgccgccgccgccgcctgagggaagccggcatctgggcctctgcgcgcctcgccccgcggccgggcccatggcactgtgagcctgcaagggagccccgctcagcgcggggagcgcccggccccctcccgccccatgcgcccgcggctctgaagcctgagcgggggccgggggccgggcggggccggggccgccgtaggcatggcgtccgggagccggtggcggccgacaccgccgccgctgctgttgctgctgctgctggcgctggcggcgcgcgcggacggcctggagttcggcggcggccccgggcagtgggctcgctacgcgcgctgggcgggcgcggcgagcagcggcgagctcagcttcagcctgcgcaccaacgccacgcgcgcgctgctgctctacctggacgacggcggcgactgcgacttcctggagctgctgctggtggacggccgcctgcggctgcgcttcacgctttcgtgcgccgagccggccacgctgcagctggacacgccggtggccgacgaccgctggcacatggtgctgctgacccgcgacgcgcgccgcacggcgctggcggtggacggcgaggcccgcgccgccgaggtgcgctccaagcggcgcgagatgcaggtggccagcgacctgttcgtgggcggcatcccgcccgacgtgcgcctctcggcgcttacgctgagcaccgtcaagtacgagccgcccttccgcggcctcttggccaacctgaagctgggcgagcggccccccgcgctgctgggcagccagggcctgcgcggcgccaccgccgacccgctgtgcgcgcccgcgcgcaacccctgcgccaacggcggcctctgcaccgtgctggcccccggcgaggtgggctgcgactgcagccacacgggcttcggcggcaagttctgcagcgaagaggagcaccccatggaaggtccggctcacctgacgttaaacagcgaagtagggtccttactgttctccgaggggggggccgggagaggaggagccggcgatgtgcaccagccaacaaaaggcaaggaggagtttgtggcgaccttcaaaggcaatgagttcttctgctacgacctgtcacacaaccccatccagagcagcactgatgagatcacactggccttccgcaccctgcaacgcaacggcctgatgctgcatacaggcaagtcggccgactacgtcaacctgtccctcaagtctggggctgtctggctggtcatcaacctaggctcaggtgccttcgaggcccttgtggaacccgtcaatggcaagttcaacgacaacgcctggcacgacgtccgggtcacccgaaacctgcgccagcacgcagggattggacacgctatggtaaacaaactgcattatctggtgaccatctcggtggacgggatcctgaccaccacaggctacacgcaggaggattacaccatgctgggctctgatgacttcttctacattgggggcagccccaacacagctgacctgccgggctcgcccgtcagcaacaacttcatgggctgcctcaaggacgtggtctataagaacaatgacttcaaattggaactatcccgcctggcaaaggaaggggaccccaagatgaagctgcagggggacttgtcattccgctgtgaggatgtggctgccctggaccctgtgacctttgagagtcccgaggcctttgtggcgctgccccgctggagcgctaagcgcactggctccatctccctagacttccgcaccaccgagcccaatgggctgctgctcttcagccagggccggcgggctgggggtggagctggcagccacagctctgctcagcgggccgactactttgccatggagctattggacggccacctctatcttctgctggacatgggatctgggggcatcaagctgcgggcatccagccgcaaggtcaatgatggcgagtggtgtcacgtggacttccagagggatgggcgaaaaggctccatctcagtgaatagtcgcagcacgccgttcttggccactggagacagcgagattctggacctggagagtgagctgtacctgggcggtctccctgaggggggccgggtggacctgcccctgcccccagaggtgtggacagcagcactccgggcaggctacgtgggctgtgtgcgggacctcttcatagatgggcgtagccgagacctccggggcctggctgaggctcagggggctgtgggcgttgcccccttttgctcccgggagacgctgaagcagtgtgcatctgccccctgtcgcaatgggggcgtctgtcgagaaggctggaaccgcttcatctgtgactgcatcgggaccggctttcttgggcgggtctgtgagagagaggccacggtcctgagctacgatggctccatgtacatgaagatcatgctgcctaacgccatgcacacggaggcagaggatgtgtccctgcgtttcatgtcccagcgggcctacggactcatgatggccaccacttccagggagtctgccgacaccctacgcctggagctggatggggggcagatgaagctcactgtcaacctcgactgcctgcgcgtcggctgcgcacccagtaaaggccccgaaacgctgtttgcggggcacaagctcaatgacaatgagtggcacacggtgagggtggtccggcgtggcaagagcctgcagctgtctgtggacaacgtgactgtggagggacagatggcaggagcccatatgcggctggagttccacaacattgagacgggcatcatgacggagcggcggtttatctccgtggtgccctccaacttcatcgggcatctgagtgggctcgtgttcaatggccagccctacatggaccagtgcaaggatggtgacatcacctactgtgagctcaatgctcgctttggcctgcgtgccatcgtggccgatcccgtcaccttcaagagtcgcagcagctacctggcactcgccacgctccaagcctatgcttccatgcacctcttcttccagttcaagaccacggcccctgatgggcttcttctgttcaactcgggcaacggcaatgacttcattgtcatcgagctggtcaaggggtacatccactacgtgtttgacctggggaatggcccgtccttgatgaaggggaactcagacaaaccagtcaatgacaaccagtggcacaacgtggtggtgtccagggacccaggcaacgtgcacacgctcaagattgactcccgcactgtcacgcagcactccaatggcgcccgaaacctcgatctcaaaggggagttgtacattggcggtctgagcaagaatatgttcagcaacctgcccaagctggtggcctcccgggatggctttcagggctgcctggcctcagtggacctcaacggacgtctcccagacctcatcgccgacgccctgcaccgcattgggcaggtggagaggggctgtgatggccccagcaccacctgcactgaagagtcctgtgccaaccagggcgtctgcttgcagcagtgggatggcttcacctgcgactgcaccatgacttcctatggaggccctgtctgcaatgatcccgggaccacatacatctttgggaaggggggagcgctcatcacctacacgtggccccccaatgacaggcccagcacgaggatggatcgcctggccgtgggcttcagcacccaccagcggagcgctgtgctggtgcgggtggacagcgcctccggccttggagactacctgcagctgcacatcgaccagggcaccgtgggggtgatctttaacgtgggcacggacgacattaccatcgacgagcccaacgccatagtaagcgacggcaaataccacgtggtgcgcttcactcgaagcggcggcaacgccaccctgcaggtggacagctggccggtcaacgagcggtacccggcaggaaactttgataacgagcgcctggcgattgctagacagagaatcccctaccggcttggtcgagtagtagatgagtggctgctcgacaaaggccgccagctgaccatcttcaacagccaggctgccatcaagatcgggggccgggatcagggccgccccttccagggccaggtgtccggcctctactacaatgggctcaaggtgctggcgctggccgccgagagcgaccccaatgtgcggactgagggtcacctgcgcctggtgggggaggggccgtccgtgctgctcagtgcggagaccacggccaccaccctgctggctgacatggccaccaccatcatggagactaccaccaccatggccactaccaccacgcgccggggccgctcccccacactgagggacagcaccacccagaacacagatgacctgctggtggcctctgctgagtgtccaagcgatgatgaggacctggaggagtgtgagcccagtactggaggagagttaatattgcccattatcacggaggactccttagacccccctcccgtggccacccgatcccccttcgtgcccccgccccctaccttctaccccttcctcacgggagtgggcgccacccaagacacgctgcccccgcccgccgcgcgccgcccgccctctgggggcccgtgccaggccgagcgggacgacagcgactgcgaggagcccatcgaggcctcgggcttcgcctccggggaggtctttgactccagcctcccccccacggacgacgaggacttttacaccacctttcccctggtcacggaccgcaccaccctcctgtcaccccgcaaacccgctccccggcccaacctcaggacagatggggccacgggcgcccctggggtgctgtttgccccctccgccccggcccccaacctgccggcgggcaaaatgaaccaccgagacccgcttcagcccttgctggagaacccgcccttggggcccggggcccccacgtcctttgagccgcggaggccccctcccctgcgccccggcgtgacctcagcccccggcttcccccatctgcccacagccaaccccacagggcctggggagcggggcccgccgggcgcagtggaggtgatccgggagtccagcagcaccacgggcatggtggtgggcattgtggcggcggcggcgctctgcatcctcatcctcctctacgccatgtataagtaccgcaatcgtgatgagggctcctaccaggtggaccagagccgaaactacatcagtaactcggcccagagcaatggggcggtggtgaaagagaaggccccggctgcccccaagacgcccagcaaggccaagaagaacaaagacaaggagtattatgtctgagcccccggcactgcgccccactgccagctgcccctcctgggagggcccgggaggagggtgccaccctctccctgccaggggcctggggaccctctccctggctgcctcaggcttctcttacgaagaggaaacgcaaaaaaagaaaaggaaaaaccccgtgctcgcccccttcctcctgccgtccactgcgcggcctcgtcagtcccggggctgactgtccctctcagctctgcgcctgccaggcagggcacgtgctcacagccctgggttgatttatttttttaagggggtagttttattttggtggggttgggtgggaaggaaggctgggggttttgtaaagtgtccactgctcgtcctgttaattttcctcaatttttcttcttcttccttctgtccctcctgccttccttctcttcccaagccctccaatccccatcccaggcttgctgtgtctcactgtccccaccctccttccctacttctttttttgtgtgtctggtttctcccttcctttcctccctttgggtttccagagtcggtgggagaagggcgggagggtgggcccgagtggcccagtgggtgggtggggtggggtggggcaagtgccccaactcccctcaccaggagaggcacctgcttggtgccgcccagggaaggggctcaggcctgacggaaggcctgttctgtgtgtgccgccgggcgacgtgcattgatggggaagctgctggaggagcaggggtggggggtgggagggaggggaaaggcaaatgcagatatatattacagacaaatactctagattccacgagcagcagcctgtggcacccgctgggcgcgggcagcagggaagagggagcaaggcattgtccacagactgctggggtcacttctttgcccacgggctccctgctcccccagttttttttctctctttgttaacaaatgtgtctgagtcttggaaaacaccccaaccccggaaatgtgtgggaaaaagaaaacaaaaactttccaaattccaa

SEQ ID NO: 158616 - DNA, 6413 bp, Homo sapiens
  Payload ID: 11036
  Gene Symbol: NRXN2
  Gene Name: neurexin 2
  Uniprot ID: Q9P2S2
  ENST ID: ENST00000377559
  CDS Start-End: 463-5391
tgcagggatgcggcggcgggagcagccgccctgactcgcggagcatcctcctcggagaggcaccgcggcggggcgggcgggcgggcggggacgcggcggggagggagagaggcgcgaggcggcagacaccgctagccctggctctgccacccgtcggagacggggcggccctgtagctctgctacccaccctccagcttctggcgccccgagaaccaggcatccctccctgctcttctgtcggagcccgcggcgggggaggggcgccgccgccgccgcctgagggaagccggcatctgggcctctgcgcgcctcgccccgcggccgggcccatggcactgtgagcctgcaagggagccccgctcagcgcggggagcgcccggccccctcccgccccatgcgcccgcggctctgaagcctgagcgggggccgggggccgggcggggccggggccgccgtaggcatggcgtccgggagccggtggcggccgacaccgccgccgctgctgttgctgctgctgctggcgctggcggcgcgcgcggacggcctggagttcggcggcggccccgggcagtgggctcgctacgcgcgctgggcgggcgcggcgagcagcggcgagctcagcttcagcctgcgcaccaacgccacgcgcgcgctgctgctctacctggacgacggcggcgactgcgacttcctggagctgctgctggtggacggccgcctgcggctgcgcttcacgctttcgtgcgccgagccggccacgctgcagctggacacgccggtggccgacgaccgctggcacatggtgctgctgacccgcgacgcgcgccgcacggcgctggcggtggacggcgaggcccgcgccgccgaggtgcgctccaagcggcgcgagatgcaggtggccagcgacctgttcgtgggcggcatcccgcccgacgtgcgcctctcggcgcttacgctgagcaccgtcaagtacgagccgcccttccgcggcctcttggccaacctgaagctgggcgagcggccccccgcgctgctgggcagccagggcctgcgcggcgccaccgccgacccgctgtgcgcgcccgcgcgcaacccctgcgccaacggcggcctctgcaccgtgctggcccccggcgaggtgggctgcgactgcagccacacgggcttcggcggcaagttctgcagcgaagaggagcaccccatggaaggtccggctcacctgacgttaaacagcgaaggcaaggaggagtttgtggcgaccttcaaaggcaatgagttcttctgctacgacctgtcacacaaccccatccagagcagcactgatgagatcacactggccttccgcaccctgcaacgcaacggcctgatgctgcatacaggcaagtcggccgactacgtcaacctgtccctcaagtctggggctgtctggctggtcatcaacctaggctcaggtgccttcgaggcccttgtggaacccgtcaatggcaagttcaacgacaacgcctggcacgacgtccgggtcacccgaaacctgcgccagcacgcagggattggacacgctatggtgaccatctcggtggacgggatcctgaccaccacaggctacacgcaggaggattacaccatgctgggctctgatgacttcttctacattgggggcagccccaacacagctgacctgccgggctcgcccgtcagcaacaacttcatgggctgcctcaaggacgtggtctataagaacaatgacttcaaattggaactatcccgcctggcaaaggaaggggaccccaagatgaagctgcagggggacttgtcattccgctgtgaggatgtggctgccctggaccctgtgacctttgagagtcccgaggcctttgtggcgctgccccgctggagcgctaagcgcactggctccatctccctagacttccgcaccaccgagcccaatgggctgctgctcttcagccagggccggcgggctgggggtggagctggcagccacagctctgctcagcgggccgactactttgccatggagctattggacggccacctctatcttctgctggacatgggatctgggggcatcaagctgcgggcatccagccgcaaggtcaatgatggcgagtggtgtcacgtggacttccagagggatgggcgaaaaggctccatctcagtgaatagtcgcagcacgccgttcttggccactggagacagcgagattctggacctggagagtgagctgtacctgggcggtctccctgaggggggccgggtggacctgcccctgcccccagaggtgtggacagcagcactccgggcaggctacgtgggctgtgtgcgggacctcttcatagatgggcgtagccgagacctccggggcctggctgaggctcagggggctgtgggcgttgcccccttttgctcccgggagacgctgaagcagtgtgcatctgccccctgtcgcaatgggggcgtctgtcgagaaggctggaaccgcttcatctgtgactgcatcgggaccggctttcttgggcgggtctgtgagagagaggccacggtcctgagctacgatggctccatgtacatgaagatcatgctgcctaacgccatgcacacggaggcagaggatgtgtccctgcgtttcatgtcccagcgggcctacggactcatgatggccaccacttccagggagtctgccgacaccctacgcctggagctggatggggggcagatgaagctcactgtcaacctcggtaaaggccccgaaacgctgtttgcggggcacaagctcaatgacaatgagtggcacacggtgagggtggtccggcgtggcaagagcctgcagctgtctgtggacaacgtgactgtggagggacagatggcaggagcccatatgcggctggagttccacaacattgagacgggcatcatgacggagcggcggtttatctccgtggtgccctccaacttcatcgggcatctgagtgggctcgtgttcaatggccagccctacatggaccagtgcaaggatggtgacatcacctactgtgagctcaatgctcgctttggcctgcgtgccatcgtggccgatcccgtcaccttcaagagtcgcagcagctacctggcactcgccacgctccaagcctatgcttccatgcacctcttcttccagttcaagaccacggcccctgatgggcttcttctgttcaactcgggcaacggcaatgacttcattgtcatcgagctggtcaaggggtacatccactacgtgtttgacctggggaatggcccgtccttgatgaaggggaactcagacaaaccagtcaatgacaaccagtggcacaacgtggtggtgtccagggacccaggcaacgtgcacacgctcaagattgactcccgcactgtcacgcagcactccaatggcgcccgaaacctcgatctcaaaggggagttgtacattggcggtctgagcaagaatatgttcagcaacctgcccaagctggtggcctcccgggatggctttcagggctgcctggcctcagtggacctcaacggacgtctcccagacctcatcgccgacgccctgcaccgcattgggcaggtggagaggggctgtgatggccccagcaccacctgcactgaagagtcctgtgccaaccagggcgtctgcttgcagcagtgggatggcttcacctgcgactgcaccatgacttcctatggaggccctgtctgcaatgatcccgggaccacatacatctttgggaaggggggagcgctcatcacctacacgtggccccccaatgacaggcccagcacgaggatggatcgcctggccgtgggcttcagcacccaccagcggagcgctgtgctggtgcgggtggacagcgcctccggccttggagactacctgcagctgcacatcgaccagggcaccgtgggggtgatctttaacgtgggcacggacgacattaccatcgacgagcccaacgccatagtaagcgacggcaaataccacgtggtgcgcttcactcgaagcggcggcaacgccaccctgcaggtggacagctggccggtcaacgagcggtacccggcaggccgccagctgaccatcttcaacagccaggctgccatcaagatcgggggccgggatcagggccgccccttccagggccaggtgtccggcctctactacaatgggctcaaggtgctggcgctggccgccgagagcgaccccaatgtgcggactgagggtcacctgcgcctggtgggggaggggccgtccgtgctgctcagtgcggagaccacggccaccaccctgctggctgacatggccaccaccatcatggagactaccaccaccatggccactaccaccacgcgccggggccgctcccccacactgagggacagcaccacccagaacacagatgacctgctggtggcctctgctgagtgtccaagcgatgatgaggacctggaggagtgtgagcccagtactggaggagagttaatattgcccattatcacggaggactccttagacccccctcccgtggccacccgatcccccttcgtgcccccgccccctaccttctaccccttcctcacgggagtgggcgccacccaagacacgctgcccccgcccgccgcgcgccgcccgccctctgggggcccgtgccaggccgagcgggacgacagcgactgcgaggagcccatcgaggcctcgggcttcgcctccggggaggtctttgactccagcctcccccccacggacgacgaggacttttacaccacctttcccctggtcacggaccgcaccaccctcctgtcaccccgcaaacccgctccccggcccaacctcaggacagatggggccacgggcgcccctggggtgctgtttgccccctccgccccggcccccaacctgccggcgggcaaaatgaaccaccgagacccgcttcagcccttgctggagaacccgcccttggggcccggggcccccacgtcctttgagccgcggaggccccctcccctgcgccccggcgtgacctcagcccccggcttcccccatctgcccacagccaaccccacagggcctggggagcggggcccgccgggcgcagtggaggtgatccgggagtccagcagcaccacgggcatggtggtgggcattgtggcggcggcggcgctctgcatcctcatcctcctctacgccatgtataagtaccgcaatcgtgatgagggctcctaccaggtggaccagagccgaaactacatcagtaactcggcccagagcaatggggcggtggtgaaagagaaggccccggctgcccccaagacgcccagcaaggccaagaagaacaaagacaaggagtattatgtctgagcccccggcactgcgccccactgccagctgcccctcctgggagggcccgggaggagggtgccaccctctccctgccaggggcctggggaccctctccctggctgcctcaggcttctcttacgaagaggaaacgcaaaaaaagaaaaggaaaaaccccgtgctcgcccccttcctcctgccgtccactgcgcggcctcgtcagtcccggggctgactgtccctctcagctctgcgcctgccaggcagggcacgtgctcacagccctgggttgatttatttttttaagggggtagttttattttggtggggttgggtgggaaggaaggctgggggttttgtaaagtgtccactgctcgtcctgttaattttcctcaatttttcttcttcttccttctgtccctcctgccttccttctcttcccaagccctccaatccccatcccaggcttgctgtgtctcactgtccccaccctccttccctacttctttttttgtgtgtctggtttctcccttcctttcctccctttgggtttccagagtcggtgggagaagggcgggagggtgggcccgagtggcccagtgggtgggtggggtggggtggggcaagtgccccaactcccctcaccaggagaggcacctgcttggtgccgcccagggaaggggctcaggcctgacggaaggcctgttctgtgtgtgccgccgggcgacgtgcattgatggggaagctgctggaggagcaggggtggggggtgggagggaggggaaaggcaaatgcagatatatattacagacaaatactctagattccacgagcagcagcctgtggcacccgctgggcgcgggcagcagggaagagggagcaaggcattgtccacagactgctggggtcacttctttgcccacgggctccctgctcccccagttttttttctctctttgttaacaaatgtgtctgagtcttggaaaacaccccaaccccggaaatgtgtgggaaaaagaaaacaaaaactttccaaattccaa

SEQ ID NO: 158617 - DNA, 6381 bp, Homo sapiens
  Payload ID: 11036
  Gene Symbol: NRXN2
  Gene Name: neurexin 2
  ENST ID: ENST00000409571
  CDS Start-End: 245-5362
gcatccctccctgctcttctgtcggagcccgcggcgggggaggggcgccgccgccgccgcctgagggaagccggcatctgggcctctgcgcgcctcgccccgcggccgggcccatggcactgtgagcctgcaagggagccccgctcagcgcggggagcgcccggccccctcccgccccatgcgcccgcggctctgaagcctgagcgggggccgggggccgggcggggccggggccgccgtaggcatggcgtccgggagccggtggcggccgacaccgccgccgctgctgttgctgctgctgctggcgctggcggcgcgcgcggacggcctggagttcggcggcggccccgggcagtgggctcgctacgcgcgctgggcgggcgcggcgagcagcggcgagctcagcttcagcctgcgcaccaacgccacgcgcgcgctgctgctctacctggacgacggcggcgactgcgacttcctggagctgctgctggtggacggccgcctgcggctgcgcttcacgctttcgtgcgccgagccggccacgctgcagctggacacgccggtggccgacgaccgctggcacatggtgctgctgacccgcgacgcgcgccgcacggcgctggcggtggacggcgaggcccgcgccgccgaggtgcgctccaagcggcgcgagatgcaggtggccagcgacctgttcgtgggcggcatcccgcccgacgtgcgcctctcggcgcttacgctgagcaccgtcaagtacgagccgcccttccgcggcctcttggccaacctgaagctgggcgagcggccccccgcgctgctgggcagccagggcctgcgcggcgccaccgccgacccgctgtgcgcgcccgcgcgcaacccctgcgccaacggcggcctctgcaccgtgctggcccccggcgaggtgggctgcgactgcagccacacgggcttcggcggcaagttctgcagcgaagaggagcaccccatggaaggtccggctcacctgacgttaaacagcgaagtagggtccttactgttctccgaggggggggccgggagaggaggagccggcgatgtgcaccagccaacaaaaggcaaggaggagtttgtggcgaccttcaaaggcaatgagttcttctgctacgacctgtcacacaaccccatccagagcagcactgatgagatcacactggccttccgcaccctgcaacgcaacggcctgatgctgcatacaggcaagtcggccgactacgtcaacctgtccctcaagtctggggctgtctggctggtcatcaacctaggctcaggtgccttcgaggcccttgtggaacccgtcaatggcaagttcaacgacaacgcctggcacgacgtccgggtcacccgaaacctgcgccagcacgcagggattggacacgctatggtgaccatctcggtggacgggatcctgaccaccacaggctacacgcaggaggattacaccatgctgggctctgatgacttcttctacattgggggcagccccaacacagctgacctgccgggctcgcccgtcagcaacaacttcatgggctgcctcaaggacgtggtctataagaacaatgacttcaaattggaactatcccgcctggcaaaggaaggggaccccaagatgaagctgcagggggacttgtcattccgctgtgaggatgtggctgccctggaccctgtgacctttgagagtcccgaggcctttgtggcgctgccccgctggagcgctaagcgcactggctccatctccctagacttccgcaccaccgagcccaatgggctgctgctcttcagccagggccggcgggctgggggtggagctggcagccacagctctgctcagcgggccgactactttgccatggagctattggacggccacctctatcttctgctggacatgggatctgggggcatcaagctgcgggcatccagccgcaaggtcaatgatggcgagtggtgtcacgtggacttccagagggatgggcgaaaaggctccatctcagtgaatagtcgcagcacgccgttcttggccactggagacagcgagattctggacctggagagtgagctgtacctgggcggtctccctgaggggggccgggtggacctgcccctgcccccagaggtgtggacagcagcactccgggcaggctacgtgggctgtgtgcgggacctcttcatagatgggcgtagccgagacctccggggcctggctgaggctcagggggctgtgggcgttgcccccttttgctcccgggagacgctgaagcagtgtgcatctgccccctgtcgcaatgggggcgtctgtcgagaaggctggaaccgcttcatctgtgactgcatcgggaccggctttcttgggcgggtctgtgagagagaggccacggtcctgagctacgatggctccatgtacatgaagatcatgctgcctaacgccatgcacacggaggcagaggatgtgtccctgcgtttcatgtcccagcgggcctacggactcatgatggccaccacttccagggagtctgccgacaccctacgcctggagctggatggggggcagatgaagctcactgtcaacctcgactgcctgcgcgtcggctgcgcacccagtaaaggccccgaaacgctgtttgcggggcacaagctcaatgacaatgagtggcacacggtgagggtggtccggcgtggcaagagcctgcagctgtctgtggacaacgtgactgtggagggacagatggcaggagcccatatgcggctggagttccacaacattgagacgggcatcatgacggagcggcggtttatctccgtggtgccctccaacttcatcgggcatctgagtgggctcgtgttcaatggccagccctacatggaccagtgcaaggatggtgacatcacctactgtgagctcaatgctcgctttggcctgcgtgccatcgtggccgatcccgtcaccttcaagagtcgcagcagctacctggcactcgccacgctccaagcctatgcttccatgcacctcttcttccagttcaagaccacggcccctgatgggcttcttctgttcaactcgggcaacggcaatgacttcattgtcatcgagctggtcaaggggtacatccactacgtgtttgacctggggaatggcccgtccttgatgaaggggaactcagacaaaccagtcaatgacaaccagtggcacaacgtggtggtgtccagggacccaggcaacgtgcacacgctcaagattgactcccgcactgtcacgcagcactccaatggcgcccgaaacctcgatctcaaaggggagttgtacattggcggtctgagcaagaatatgttcagcaacctgcccaagctggtggcctcccgggatggctttcagggctgcctggcctcagtggacctcaacggacgtctcccagacctcatcgccgacgccctgcaccgcattgggcaggtggagaggggctgtgatggccccagcaccacctgcactgaagagtcctgtgccaaccagggcgtctgcttgcagcagtgggatggcttcacctgcgactgcaccatgacttcctatggaggccctgtctgcaatgatcccgggaccacatacatctttgggaaggggggagcgctcatcacctacacgtggccccccaatgacaggcccagcacgaggatggatcgcctggccgtgggcttcagcacccaccagcggagcgctgtgctggtgcgggtggacagcgcctccggccttggagactacctgcagctgcacatcgaccagggcaccgtgggggtgatctttaacgtgggcacggacgacattaccatcgacgagcccaacgccatagtaagcgacggcaaataccacgtggtgcgcttcactcgaagcggcggcaacgccaccctgcaggtggacagctggccggtcaacgagcggtacccggcaggaaactttgataacgagcgcctggcgattgctagacagagaatcccctaccggcttggtcgagtagtagatgagtggctgctcgacaaaggccgccagctgaccatcttcaacagccaggctgccatcaagatcgggggccgggatcagggccgccccttccagggccaggtgtccggcctctactacaatgggctcaaggtgctggcgctggccgccgagagcgaccccaatgtgcggactgagggtcacctgcgcctggtgggggaggggccgtccgtgctgctcagtgcggagaccacggccaccaccctgctggctgacatggccaccaccatcatggagactaccaccaccatggccactaccaccacgcgccggggccgctcccccacactgagggacagcaccacccagaacacagatgacctgctggtggcctctgctgagtgtccaagcgatgatgaggacctggaggagtgtgagcccagtactggaggagagttaatattgcccattatcacggaggactccttagacccccctcccgtggccacccgatcccccttcgtgcccccgccccctaccttctaccccttcctcacgggagtgggcgccacccaagacacgctgcccccgcccgccgcgcgccgcccgccctctgggggcccgtgccaggccgagcgggacgacagcgactgcgaggagcccatcgaggcctcgggcttcgcctccggggaggtctttgactccagcctcccccccacggacgacgaggacttttacaccacctttcccctggtcacggaccgcaccaccctcctgtcaccccgcaaacccgctccccggcccaacctcaggacagatggggccacgggcgcccctggggtgctgtttgccccctccgccccggcccccaacctgccggcgggcaaaatgaaccaccgagacccgcttcagcccttgctggagaacccgcccttggggcccggggcccccacgtcctttgagccgcggaggccccctcccctgcgccccggcgtgacctcagcccccggcttcccccatctgcccacagccaaccccacagggcctggggagcggggcccgccgggcgcagtggaggtgatccgggagtccagcagcaccacgggcatggtggtgggcattgtggcggcggcggcgctctgcatcctcatcctcctctacgccatgtataagtaccgcaatcgtgatgagggctcctaccaggtggaccagagccgaaactacatcagtaactcggcccagagcaatggggcggtggtgaaagagaaggccccggctgcccccaagacgcccagcaaggccaagaagaacaaagacaaggagtattatgtctgagcccccggcactgcgccccactgccagctgcccctcctgggagggcccgggaggagggtgccaccctctccctgccaggggcctggggaccctctccctggctgcctcaggcttctcttacgaagaggaaacgcaaaaaaagaaaaggaaaaaccccgtgctcgcccccttcctcctgccgtccactgcgcggcctcgtcagtcccggggctgactgtccctctcagctctgcgcctgccaggcagggcacgtgctcacagccctgggttgatttatttttttaagggggtagttttattttggtggggttgggtgggaaggaaggctgggggttttgtaaagtgtccactgctcgtcctgttaattttcctcaatttttcttcttcttccttctgtccctcctgccttccttctcttcccaagccctccaatccccatcccaggcttgctgtgtctcactgtccccaccctccttccctacttctttttttgtgtgtctggtttctcccttcctttcctccctttgggtttccagagtcggtgggagaagggcgggagggtgggcccgagtggcccagtgggtgggtggggtggggtggggcaagtgccccaactcccctcaccaggagaggcacctgcttggtgccgcccagggaaggggctcaggcctgacggaaggcctgttctgtgtgtgccgccgggcgacgtgcattgatggggaagctgctggaggagcaggggtggggggtgggagggaggggaaaggcaaatgcagatatatattacagacaaatactctagattccacgagcagcagcctgtggcacccgctgggcgcgggcagcagggaagagggagcaaggcattgtccacagactgctggggtcacttctttgcccacgggctccctgctcccccagttttttttctctctttgttaacaaatgtgtctgagtcttggaaaacaccccaaccccggaaatgtgtgggaaaaagaaaacaaaaactttccaaattc

SEQ ID NO: 158618 - DNA, 878 bp, Homo sapiens
  Payload ID: 11036
  Gene Symbol: NRXN2
  Gene Name: neurexin 2
  ENST ID: ENST00000442300
  CDS Start-End: 1-878
agcgtgagtcctgcggcgacctgtgggcagcctgtgtggtcagaggagcaccccatggaaggtccggctcacctgacgttaaacagcgaagtagggtccttactgttctccgaggggggggccgggagaggaggagccggcgatgtgcaccagccaacaaaaggcaaggaggagtttgtggcgaccttcaaaggcaatgagttcttctgctacgacctgtcacacaaccccatccagagcagcactgatgagatcacactggccttccgcaccctgcaacgcaacggcctgatgctgcatacaggcaagtcggccgactacgtcaacctgtccctcaagtctggggctgtctggctggtcatcaacctaggctcaggtgccttcgaggcccttgtggaacccgtcaatggcaagttcaacgacaacgcctggcacgacgtccgggtcacccgaaacctgcgccaggtgaccatctcggtggacgggatcctgaccaccacaggctacacgcaggaggattacaccatgctgggctctgatgacttcttctacattgggggcagccccaacacagctgacctgccgggctcgcccgtcagcaacaacttcatgggctgcctcaaggacgtggtctataagaacaatgacttcaaattggaactatcccgcctggcaaaggaaggggaccccaagatgaagctgcagggggacttgtcattccgctgtgaggatgtggctgccctggaccctgtgacctttgagagtcccgaggcctttgtggcgctgccccgctggagcgctaagcgcactggctccatctccctagacttccgcaccaccgagcccaatgggctgctgctcttcagccagggccggcg

SEQ ID NO: 158619 - DNA, 828 bp, Homo sapiens
  Payload ID: 11036
  Gene Symbol: NRXN2
  Gene Name: neurexin 2
  ENST ID: ENST00000423049
  CDS Start-End: 1-828
ttgctgctgttgctgctgggggcggccgagggggcccgggtctcctccagcctcagcaccacccaccacgtccaccacttccacagcaagcacggcaccgtgcccatcgccatcaaccgcatgcccttcctcacccgcggcggccacgccgggaccacatacatctttgggaaggggggagcgctcatcacctacacgtggccccccaatgacaggcccagcacgaggatggatcgcctggccgtgggcttcagcacccaccagcggagcgctgtgctggtgcgggtggacagcgcctccggccttggagactacctgcagctgcacatcgaccagggcaccgtgggggtgatctttaacgtgggcacggacgacattaccatcgacgagcccaacgccatagtaagcgacggcaaataccacgtggtgcgcttcactcgaagcggcggcaacgccaccctgcaggtggacagctggccggtcaacgagcggtacccggcaggccgccagctgaccatcttcaacagccaggctgccatcaagatcgggggccgggatcagggccgccccttccagggccaggtgtccggcctctactacaatgggctcaaggtgctggcgctggccgccgagagcgaccccaatgtgcggactgagggtcacctgcgcctggtgggggaggggccgtccgtgctgctcagtgcggagaccacggccaccaccctgctggctgacatggccaccaccatcatggagactaccaccaccatggccactaccaccacgcgccggggccgctcccccacactgagggacagcaccacccag

SEQ ID NO: 158620 - DNA, 618 bp, Homo sapiens
  Payload ID: 11036
  Gene Symbol: NRXN2
  Gene Name: neurexin 2
  ENST ID: ENST00000417749
  CDS Start-End: 1-618
tctgcagcgaagaggagcaccccatggaaggtccggctcacctgacgttaaacagcgaagtagggtccttactgttctccgaggggggggccgggagaggaggagccggcgatgtgcaccagccaacaaaaggcaaggaggagtttgtggcgaccttcaaaggcaatgagttcttctgctacgacctgtcacacaaccccatccagagcagcactgatgagatcacactggccttccgcaccctgcaacgcaacggcctgatgctgcatacaggcaagtcggccgactacgtcaacctgtccctcaagtctggggctgtctggctggtcatcaacctaggctcaggtgccttcgaggcccttgtggaacccgtcaatggcaagttcaacgacaacgcctggcacgacgtccgggtcacccgaaacctgcgccaggtgaccatctcggtggacgggatcctgaccaccacaggctacacgcaggaggattacaccatgctgggctctgatgacttcttctacattgggggcagccccaacacagctgacctgccgggctcgcccgtcagcaacaacttcatgggctgcctcaaggacgtggtctataagaacaatgact

SEQ ID NO: 158621 - DNA, 643 bp, Homo sapiens
  Payload ID: 11036
  Gene Symbol: NRXN2
  Gene Name: neurexin 2
  ENST ID: ENST00000437746
  CDS Start-End: 1-643
cgccgacccgctgtgcgcgcccgcgcgcaacccctgcgccaacggcggcctctgcaccgtgctggcccccggcgaggtgggctgcgactgcagccacacgggcttcggcggcaagttctgcagcgaagaggagcaccccatggaagtagggtccttactgttctccgaggggggggccgggagaggaggagccggcgatgtgcaccagccaacaaaaggcaaggaggagtttgtggcgaccttcaaaggcaatgagttcttctgctacgacctgtcacacaaccccatccagagcagcactgatgagatcacactggccttccgcaccctgcaacgcaacggcctgatgctgcatacaggcaagtcggccgactacgtcaacctgtccctcaagtctggggctgtctggctggtcatcaacctaggctcaggtgccttcgaggcccttgtggaacccgtcaatggcaagttcaacgacaacgcctggcacgacgtccgggtcacccgaaacctgcgccaggtgaccatctcggtggacgggatcctgaccaccacaggctacacgcaggaggattacaccatgctgggctctgatgacttcttctacattgggggcagccccaacacagctgacctgccgggc

SEQ ID NO: 158622 - DNA, 8504 bp, Homo sapiens
  Payload ID: 11037
  Gene Symbol: NRXN3
  Gene Name: neurexin 3
  Uniprot ID: Q9HDB5
  ENST ID: ENST00000281127
  CDS Start-End: 880-2178
acttcgcaggcgcccgcccgcctctcggccacctctgcagcctgccaggcacctcctcttgcgctctcgctgatttcgcccacccacctccctccaccccgtgccacgttggtttgggtggctgctccgcaccgggttcctcctcctctcctctttccctccagtccttcttattctcttcctctggctgcggtggctgctgctgctgctggttttcatccagttgggaaacccaggaagccggcggctgctccgtggcgctagtccagcacgcccagggttaaaagcctcgcgcccttccgcggagactcccaggaacacccgaagaactcttccacctgcagcccccttttgcctggcagttctgcattgcatctcatggaagtggaaacaggaaaataaaaatgttcaaactccttggatgttgggataaactcacctgaacccacttgggttcgggctgcctccttctcttccttcattgccacctttcctctgtgtggctcccgggagtgtgcggttaagtcatcagactcgaagtgcctagagatccggaggaagccgcgccggtcttcccctgacatgcgtggcatgccggggctccgtaggaggtttgctatacctgggaggaccctggcattctaaatttcagctccgggaaagagaaggggctttttgccttttatcttttttttttctttctttaagtagtaattttttaactgattcattgtttggaaagcgcatattgcttccctcttccccgaattctggcaactcttcctcctgctatgatgggcccttgggcatcatgaacttcattactcctcactggctggaattcaaactgcccatctgtagtggtcccgtgcgttgaccatgcacctgagaatccacgcgagacggagccctcctcgccggccggcctggacgcttgggatctggttcctgttctggggatgtatcgtcagctctgtatggagttcttctaatgtagcttcctcctcctccacctcttcctcgccggggtctcactctcagcacgagcaccatttccatggcagcaagcatcactcagtgcctatttctatctatcgttcccctgtttcccttcgaggaggacacgctggcgctacgtacatctttgggaaaagtggtgggcttatcctctacacctggccagccaatgacaggcccagcacgcggtctgaccgccttgccgtgggcttcagcaccactgtgaaggatggcatcttggtccgcatcgacagtgctccaggacttggtgacttcctccagcttcacatagaacaggggaaaattggagttgtcttcaacattggcacagttgacatctccatcaaagaggagagaacccctgtaaatgacggcaaataccatgtggtacgcttcaccaggaacggcggcaacgccaccctgcaggtggacaactggccagtgaatgaacattatcctacaggccggcagttaaccatcttcaacactcaggcgcaaatagccattggtggaaaggacaaaggacgcctcttccaaggccaactctctgggctctattatgatggtttgaaagtactgaacatggcggctgagaacaaccccaatattaaaatcaatggaagtgttcggctggttggagaagtcccatcaattttgggaacaacacagacgacctccatgccaccagaaatgtctactactgtcatggaaaccactactacaatggcgactaccacaacccgtaagaatcgctctacagccagcattcagccaacatcagatgatcttgtttcatctgctgaatgttcaagtgatgatgaagactttgttgaatgtgagccgagtacaggtaggtcagcaaaccccacggagccgggaatcagacgggttccgggggcctcagaggtgatccgggagtcgagcagcacaacagggatggtcgtcggcattgtggctgctgccgccctctgcatcttgatcctcctgtacgccatgtacaagtacaggaacagggacgaggggtcctatcaagtggacgagacgcggaactacatcagcaactccgcccagagcaacggcacgctcatgaaggagaagcagcagagctcgaagagcggccacaagaaacagaaaaacaaggacagggagtattacgtgtaaacatgcgaacactgctcacacgcgagttttcacagttatttctatccacgcctatgaatctttggacggtgagatctcacagatgtcagaactgctggaactatgaaatggggtatataaccacgactctggtggggaaaaccgttttttaaaggacacacacacacacagcgatgcatctctctctaaagctcagccacggctgcggcaaggtcccagcggtcgctgggagacagaaggttttgtgccctgctgtatcataaagcacacacttagcgctctggagccggacggtggctccaccacttccgcaggcctggaaacttccttctccggaggaccttttactaaaaggtagaagacttcatggcttacttgttccataactccaagtgagtctgtaatgtttgtgaagcttgactgtaaccatgttttttctgtttaattatgtaaaaaacaaaactacaacaacaaaaaaagaaaaaagttaaaaaagaaaaaaacaccaaaaaacaaaaacaaacaaaaaaaaaaacccacaacccttatctggttctgaccagtgtgcgtgtaactttatgatctgaggggaaaaatggcttttgggtttttgtttatttttttgataatgactggacatcagaagaggaaaaaaactcaaaacaaaagcgagagagactattgccatatgaactcaaaagctatcatggtgttcactctacatatcaggttatggtgtctctagaatctgttgtttgtttcctataagatgctttgctgaacacatagcaaaattcatgtgacggatgataaattgattcgaaaagctggtcccccaggatctaatttcagaatttaccacccaaacccggaacagatgggtttagggctggtgttatcagagctattggctttacgtaacaatattgttcctgtccattcacccagccaaattgtgttaaagaggaaagccccacaaactaaaacagcctttcctagggaagaggaaggggaggtgggctggatctgtgactgattgaaatgcatgcaaataaaaaagacaatattaaagtctgttatcaaaccagacagtaggggagttcaactcgtgatggaaccacaaaaggtcacacaagccaaccatgtcatgccagagtacaaaacacatagttctttccccgccccgaatgtgacaatggttttcatagtggtttaattttgtagcctgacatttatggataactctgtccttccatttgctcacttctctcttcacccatcttttttaaaaacaaataaatgaataaagctgctgtgacacacacacaaaaggaatttaatagtataatatatatataaataaatatatatacagatatatttatcatggtatgtttgatgggatgactgacacaggaaatctgttaaagtcttaaaatggaatgagaatgttgttttaaaagaaaatagcaaaacaacaaaaaagcaaaccttaaaatgtgaagaaagtgtgaattttagttttgtcacagttaactgtgtcaaagagaattaaaaaaaaaaacttcagattttgtttacatattttactacatttttgctggtataattccttagccacctatgtacatactgctttaagaaatgtttttttcctgtttatttctgtttggtttatattctggttgtctttttctttttgtaaagaggaaacaatgtacagaaaaacaataaactggttgtatggccatagctatccgaaaagcaagagacaaagcaagacaaatattcacacaaaaatgaagtgtgtcctctggagggtcagatatacaatttcttttgtacagatgaaaatcaatcagctgcttagatttagaaatctactcttgctggtctttgtaagttgcatgaatatttgactttgaaaaaatatcttaacgacatggggcaaaaagtgcaatctaaatggtagcctttactaatgtgtgtggaaagaggtgttcctcattatctaatatttcaatgtgttaagagtttaatttttttgttatcattaaaaaagacaggattataaagagatatcaaagcacgattttagataacctaaacggcccagcctatacgaagttgattatatctcgatgtctgtaaaagattgctgttcttggagtcttgaggtcttgtgaattgatttcctgctttctttcatttttttcaatttaagtaataatacatttgttatattcctttcagtgtaagtttctatttggacaattttatgggaacatgtgcattctctatgtgagcttctatcatattcctgttttattagcagaacctaaaggaatttatttaatgatgttgtgacattactgctttttcttttttcttttcttagttcatatttgcattttcgttcaaggatatgcttagcaataaaatgttcttcccaaaaccttgtatgctgatgcacttttattttcttaacatttgagaaaatctcgcactgaagctaattatgtcatatcttattaaaagccgagtaagagctagaccactttcatgtgatagaagatattctaagcagttactaattattacattatcaaaatgccatatttatgagataattatctgttacttgaggcattattttttagattgctatgatagaataaccaggagggagtgcatttttctggaaagatgatagaaacattgtattctagaaaagattattggatactatggttttgtttgtttgtttttgttttttgtttttcgttttttgtttgttttttttttgagacagagtctcgctctgtcgcccgggctggagtgcagtggcacgatctcggctcactgcaagctccgcctcccgggttcacaccattctcctgcctcagccccccgagtaggtgggactacaggtgcccgccaccacgcccggctaattttttgtatttttcgtagagacggggtttcaccgtgttagccgggatggtctcgatctcctgacctcgtaatccacccgcctcggcctcccaaagtgctgggattacaggcgtgagccaccgcgcccggcttggatactatgttttttaaaggcatttcgtaccttttacgtattttctataagtcaacaagctttaaacagtatttaaaactatgttcacatagtgccataagcactagaaagtcttagatgtcttctttccaagcctcccaccatattaaaatttaaaattaaaaaacagaatccaaaaccaaaatttaaatgagttcttcaattttaacagcttcttacaagaatttctgattacaacttgtttcatacacccattgtagcagtaatgtctcatatttctcgttctctcagcacacacttacttggccaattggataatccatctaccctttgttcttcactgtaatctagaaatatagatttaactgaacagctgtcctttatccatatgttggttaccagttttcaaagagttagaattttaaaaatatatatttagttaagcctgtgccttcaagataacattagtggagtggttatactatcgactatgttaggaatgggggggagaaagtcaggttcagtgatgtcaaattatgtaaagttttttttttgttcctgtcttcaaagttctgtattagatgttctcccatcattttttgagatggagtcttgcagcctacagtgcagtggcatgatattggctcactgcaacctctgcctctcaacctcaaacgattctcctgcctcagcctcctgagtagctgcgactacaggcatgggccaccacacccagctcattttttaatttattttttatttttttagtaaggaagggtttcaccatgttggcaaggctggtctcgaactccttacttcaagtgatccacccaccttggccttgcaaaatgctgggattataggtgtgagccactcctcctgaaatctttctaaatctcactaatatataattctaggactactttaagcattcactttttctttaattcaagaaacatttattgaacacttatgtacaagctagtctactattggctattgttactttgtttcaatgaaggcagaaaatggctagaaggattttaagcctttttgtctcttgtataaatctatacaggtccagtctctctttgctcatattcaaattgaagtttgatctttctccaaaaaatatccaagccctgtgtttgtcccagttgaactaatatcttgattatatagtttaagatcagtttgataatgtctattgaatatttactaaatgattatgggatattaaattgagagccttgggagcttatcatctagtaaagatgaacaaaaaatggtactatagtgaatgcaaataagctatcaaaaagtacaaactaagttgggagcttagaagaaattatgtaagggaaggcttcatagaaggggtgacattttggtaaaccttggaaaactgataggcagaaataagggctgtatatcattctaagcaaacccttaaagtgggagcaagcaggatcaaaaccataatttggattgatgacagactgcaaaaagtacattggaggaagatatgagtaggaaggtttttgaaatcatgtcaatgaatgggaagagagaaatgggagaatagcttgagaagttcaaggtcaagggctgctttgtcgagtacaaaggactcgagcatatttgaaatgaaaggtaataactgatctactcttatggagcaaccgagtttcctgatagagatgtttatctgggggaaaaaggcataagtcaatcttcttggagagaatgggatcagaaactgacatattgctacagaggttacaaaagctgtagtcagagggcttcagtgttctggatatattaaaggacaaggtcagatacccaagtgggaccgtgagtgattaatggcagcagtccactgacagcaccagtaggaaggcgctaatgaaaagatctctaaatatcagtaaggggttagctgccattaataatacaactttatagctttactattttttcttttattgttgaaatagtgagggcacgtatttttctaattgtgtttattacaaagaaaacagacccgaagaacttaaatgacttctccaaggtcacacagctaatacatgacaatgtcatgacttaaaatccagtcttgtggttccaaatttagagctctttcataaacctgtctctagagaagcaagtcattttctactttttccagaagcatttgaagtggaagctaaggcaggaaatgagaggatattgtgttagtctactgggattaccctggcaaaataccacaggctgggtagacaactgaaatgtatttctcagttccagaaacaaagttgcagatcaaagtttgttagggctcagtttctgggaagggctctcttcctggcttgtagataataagctaccttctcactatgtactcacagggcctttcttctgttcatgcactgagagatttctttttcttgctcttcttataagaccaccagtgctattggttaaagccctgccattatgactttgtttgaccttaattacttcctaaagacactacctcccaatacagtcatgtttggggttgggacttcaacatatgaatgttggaggggatatggttctgtttctagcaaatgtatagtagtgggaattgcaaaggttgaagttccaaagtatcaagggaatcagaattgggaagcaattctaacctttttgaagtggttacatggcccaagtagaagagcaaataattccaagagacaccaagccacagagcaggtaggatcacgtgagtagggcccaggatagaagagcagtgttagggttgcatgagagtgagggcatataagacaacaacagctaaaagcaatgcatgctcagatcttgggagatgtattaaatgagtagagtgaatttcaagatatctgagttttttttttttaatgattacatgggttctagagtcaaaatgccatggctcatctggtactgtaacttaagataaactgcttagctaaggctcagctttcatacctataattttgttatacttatcttgcaggtttcttgagaaatattggatgaaataattcatgtgaaatgcttaacatatgtgtgacaaataattatccttaaataaatgttggtcgttattacaattggctttgttacttgattcaggcaggatcaaaattagctgctatatgcatgactaaccaggaccaaaaagttaataaaaatacgaaagtttggcactctt

SEQ ID NO: 158623 - DNA, 2764 bp, Homo sapiens
  Payload ID: 11037
  Gene Symbol: NRXN3
  Gene Name: neurexin 3
  ENST ID: ENST00000335750
  CDS Start-End: 62-2701
ttcttcagtgcccagttttctgccgtgggatggtgttaggcccgggaagaacagagcctaaatgcacccctctacccacttccaccgggatcttgacgaagctcgagaggagaatgtggccactttccgaggctcagagtatctgtgctacgacctgtctcagaacccgatccagagcagcagtgatgaaatcaccctctcctttaagacctggcagcgtaacggcctcatcctgcacacgggcaagtcggctgactatgtcaacctggctctgaaggatggtgcggtctccttggtcattaacctggggtccggggcctttgaggccattgtggagccagtgaatggaaaattcaacgacaacgcctggcatgatgtcaaagtgacacgcaacctccggcaggtgacaatctctgtggatggcattcttaccacgacgggctacactcaagaggactataccatgctgggctcggacgacttcttctatgtaggaggaagcccaagtaccgctgacttgcctggctcccctgtcagcaacaacttcatgggctgccttaaagaggttgtttataagaataatgacatccgtctggagctgtctcgcctggcccggattgcggacaccaagatgaaaatctatggcgaagttgtgtttaagtgtgagaatgtggccacactggaccccatcaactttgagaccccagaggcttacatcagcttgcccaagtggaacactaaacgtatgggctccatctcctttgacttccgcaccacagagcccaatggcctgatcctcttcactcatggaaagccccaagagaggaaggatgctcggagccagaagaatacaaaagtagacttctttgccgtggaactcctcgatggcaacctgtacttgctgcttgacatgggctctggcaccatcaaagtgaaagccactcagaagaaagccaatgatggggaatggtaccatgtggacattcagcgagatggcagatcaggtactatatcagtgaacagcaggcgcacgccattcaccgccagtggggagagcgagatcctggacctggaaggagacatgtacctgggagggctgccggagaaccgtgctggccttattctccccaccgagctgtggactgccatgctcaactatggctacgtgggctgcatccgcgacctattcattgatgggcgcagcaagaacattcgacagctggcagagatgcagaatgctgcgggtgtcaagtcctcctgttcacggatgagtgccaagcagtgtgacagctacccctgcaagaataatgctgtgtgcaaggacggctggaaccgcttcatctgcgactgcaccggcaccggatactggggaagaacctgcgaaagggaggcatccatcctgagctatgatggtagcatgtacatgaagatcatcatgcccatggtcatgcatactgaggcagaggatgtgtccttccgcttcatgtcccagcgagcttatgggctgctggtggctacgacctccagggactctgccgacaccctgcgtctggagctggatggggggcgtgtcaagctcatggttaacttagactgtatcaggataaactgtaactccagcaaaggaccagagaccttgtatgcagggcagaagctcaatgacaacgagtggcacaccgttcgggtggtgcggagaggaaaaagccttaagttaaccgtggatgatgatgtggctgagggtacaatggtgggagaccatacccgtttggagttccacaacattgaaacgggaatcatgactgagaaacgctacatctccgttgtcccctccagctttattggccatctgcagagcctcatgtttaatggccttctctacattgacttgtgcaaaaatggtgacattgattattgtgagctgaaggctcgttttggactgaggaacatcatcgctgaccctgtcacctttaagaccaagagcagctacctgagccttgccactcttcaggcttacacctccatgcacctcttcttccagttcaagaccacctcaccagatggcttcattctcttcaatagtggtgatggcaatgacttcattgcagtcgagcttgtcaaggggtatatacactacgtttttgacctcggaaacggtcccaatgtgatcaaaggcaacagtgaccgccccctgaatgacaaccagtggcacaatgtcgtcatcactcgggacaatagtaacactcatagcctgaaagtggacaccaaagtggtcactcaggttatcaatggtgccaaaaatctggatttgaaaggtgatctctatatggctggtctggcccaaggcatgtacagcaacctcccaaagctcgtggcctctcgagatggctttcagggctgtctagcatcagtggacttgaatggacgcctgccagacctcatcaatgatgctcttcatcggagcggacagatcgagcgtggctgtgaaggacccagtaccacctgccaggaagattcatgtgccaaccagggggtctgcatgcaacaatgggagggcttcacctgtgattgttctatgacctcttattctggaaaccagtgcaatgatcgtaagtacaacaacctttcatactggaactttgtgaagatgtttggagatttggagaatcttaaaggacaatatgtaaaaggatggctcttctgaaagattcataagtaattctctcctccagaaacttgggaaataaatgactagtgctcttatgag

SEQ ID NO: 158624 - DNA, 4219 bp, Homo sapiens
  Payload ID: 11037
  Gene Symbol: NRXN3
  Gene Name: neurexin 3
  Uniprot ID: Q9HDB5
  ENST ID: ENST00000428277
  CDS Start-End: 387-1766
ctctgtgtggctcccgggagtgtgcggttaagtcatcagactcgaagtgcctagagatccggaggaagccgcgccggtcttcccctgacatgcgtggcatgccggggctccgtaggaggtttgctatacctgggaggaccctggcattctaaatttcagctccgggaaagagaaggggctttttgccttttatcttttttttttctttctttaagtagtaattttttaactgattcattgtttggaaagcgcatattgcttccctcttccccgaattctggcaactcttcctcctgctatgatgggcccttgggcatcatgaacttcattactcctcactggctggaattcaaactgcccatctgtagtggtcccgtgcgttgaccatgcacctgagaatccacgcgagacggagccctcctcgccggccggcctggacgcttgggatctggttcctgttctggggatgtatcgtcagctctgtatggagttcttctaatgtagcttcctcctcctccacctcttcctcgccggggtctcactctcagcacgagcaccatttccatggcagcaagcatcactcagtgcctatttctatctatcgttcccctgtttcccttcgaggaggacacgctggcgctacgtacatctttgggaaaagtggtgggcttatcctctacacctggccagccaatgacaggcccagcacgcggtctgaccgccttgccgtgggcttcagcaccactgtgaaggatggcatcttggtccgcatcgacagtgctccaggacttggtgacttcctccagcttcacatagaacaggggaaaattggagttgtcttcaacattggcacagttgacatctccatcaaagaggagagaacccctgtaaatgacggcaaataccatgtggtacgcttcaccaggaacggcggcaacgccaccctgcaggtggacaactggccagtgaatgaacattatcctacaggcaacactgataatgaacgcttccaaatggtaaaacagaaaatccccttcaaatataatcggcctgtagaggagtggctgcaggaaaaaggccggcagttaaccatcttcaacactcaggcgcaaatagccattggtggaaaggacaaaggacgcctcttccaaggccaactctctgggctctattatgatggtttgaaagtactgaacatggcggctgagaacaaccccaatattaaaatcaatggaagtgttcggctggttggagaagtcccatcaattttgggaacaacacagacgacctccatgccaccagaaatgtctactactgtcatggaaaccactactacaatggcgactaccacaacccgtaagaatcgctctacagccagcattcagccaacatcagatgatcttgtttcatctgctgaatgttcaagtgatgatgaagactttgttgaatgtgagccgagtacagcaaaccccacggagccgggaatcagacgggttccgggggcctcagaggtgatccgggagtcgagcagcacaacagggatggtcgtcggcattgtggctgctgccgccctctgcatcttgatcctcctgtacgccatgtacaagtacaggaacagggacgaggggtcctatcaagtggacgagacgcggaactacatcagcaactccgcccagagcaacggcacgctcatgaaggagaagcagcagagctcgaagagcggccacaagaaacagaaaaacaaggacagggagtattacgtgtaaacatgcgaacactgctcacacgcgagttttcacagttatttctatccacgcctatgaatctttggacggtgagatctcacagatgtcagaactgctggaactatgaaatggggtatataaccacgactctggtggggaaaaccgttttttaaaggacacacacacacacagcgatgcatctctctctaaagctcagccacggctgcggcaaggtcccagcggtcgctgggagacagaaggttttgtgccctgctgtatcataaagcacacacttagcgctctggagccggacggtggctccaccacttccgcaggcctggaaacttccttctccggaggaccttttactaaaaggtagaagacttcatggcttacttgttccataactccaagtgagtctgtaatgtttgtgaagcttgactgtaaccatgttttttctgtttaattatgtaaaaaacaaaactacaacaacaaaaaaagaaaaaagttaaaaaagaaaaaaacaccaaaaaacaaaaacaaacaaaaaaaaaaacccacaacccttatctggttctgaccagtgtgcgtgtaactttatgatctgaggggaaaaatggcttttgggtttttgtttatttttttgataatgactggacatcagaagaggaaaaaaactcaaaacaaaagcgagagagactattgccatatgaactcaaaagctatcatggtgttcactctacatatcaggttatggtgtctctagaatctgttgtttgtttcctataagatgctttgctgaacacatagcaaaattcatgtgacggatgataaattgattcgaaaagctggtcccccaggatctaatttcagaatttaccacccaaacccggaacagatgggtttagggctggtgttatcagagctattggctttacgtaacaatattgttcctgtccattcacccagccaaattgtgttaaagaggaaagccccacaaactaaaacagcctttcctagggaagaggaaggggaggtgggctggatctgtgactgattgaaatgcatgcaaataaaaaagacaatattaaagtctgttatcaaaccagacagtaggggagttcaactcgtgatggaaccacaaaaggtcacacaagccaaccatgtcatgccagagtacaaaacacatagttctttccccgccccgaatgtgacaatggttttcatagtggtttaattttgtagcctgacatttatggataactctgtccttccatttgctcacttctctcttcacccatcttttttaaaaacaaataaatgaataaagctgctgtgacacacacacaaaaggaatttaatagtataatatatatataaataaatatatatacagatatatttatcatggtatgtttgatgggatgactgacacaggaaatctgttaaagtcttaaaatggaatgagaatgttgttttaaaagaaaatagcaaaacaacaaaaaagcaaaccttaaaatgtgaagaaagtgtgaattttagttttgtcacagttaactgtgtcaaagagaattaaaaaaaaaaacttcagattttgtttacatattttactacatttttgctggtataattccttagccacctatgtacatactgctttaagaaatgtttttttcctgtttatttctgtttggtttatattctggttgtctttttctttttgtaaagaggaaacaatgtacagaaaaacaataaactggttgtatggccatagctatccgaaaagcaagagacaaagcaagacaaatattcacacaaaaatgaagtgtgtcctctggagggtcagatatacaatttcttttgtacagatgaaaatcaatcagctgcttagatttagaaatctactcttgctggtctttgtaagttgcatgaatatttgactttgaaaaaatatcttaacgacatggggcaaaaagtgcaatctaaatggtagcctttactaatgtgtgtggaaagaggtgttcctcattatctaatatttcaatgtgttaagagtttaatttttttgttatcattaaaaaagacaggattataaagagatatcaaagcacgattttagataacctaaacggcccagcctatacgaagttgattatatctcgatgtctgtaaaagattgctgttcttggagtcttgaggtcttgtgaattgatttcctgctttctttcatttttttcaatttaagtaataatacatttgttatattcctttcagtgtaagtttctatttggacaattttatgggaacatgtgcattctctatgtgagcttctatcatattcctgttttattagcagaacctaaaggaatttatttaatgatgttgtgacattactgctttttcttttttcttttcttagttcatatttgcattttcgttcaaggatatgcttagcaataaaatgttcttcccaa

SEQ ID NO: 158625 - DNA, 551 bp, Homo sapiens
  Payload ID: 11037
  Gene Symbol: NRXN3
  Gene Name: neurexin 3
  ENST ID: ENST00000557081
  CDS Start-End: 193-551
attgcttacaatacctgcttgcctcatgtgctactattgtttccaaccaactatgctagacttcttaaagtaatatatccacatggttgaaaaaaagtctaacactgtaagagggcacagtgaaaagttgtttataagaataatgacatccgtctggagctgtctcgcctggcccggattgcggacaccaagatgaaaatctatggcgaagttgtgtttaagtgtgagaatgtggccacactggaccccatcaactttgagaccccagaggcttacatcagcttgcccaagtggaacactaaacgtatgggctccatctcctttgacttccgcaccacagagcccaatggcctgatcctcttcactcatggaaagccccaagagaggaaggatgctcggagccagaagaatacaaaagtagacttctttgccgtggaactcctcgatggcaacctgtacttgctgcttgacatgggctctggcaccatcaaagtgaaagccactcagaagaaagccaatgatggggaatggtaccatgtggacattcagcg

SEQ ID NO: 158626 - DNA, 6446 bp, Homo sapiens
  Payload ID: 11037
  Gene Symbol: NRXN3
  Gene Name: neurexin 3
  Uniprot ID: Q9Y4C0
  ENST ID: ENST00000554738
  CDS Start-End: 704-4882
gtcttttctctggagtcctgggaggcaagttatgggcagcactgcttctggccgcaccatgaagcctgagtctgcttgcgctctgcccagggccctgctctgtctgagcattgggcttctagctgcccccctccccacagcctgccgctgctaggaggtagaactttaggagtggtccttggcctgtttctacctgtcacctggctcacctcaccactcactcctcctccatcacagcaccccggccctccctgtccctggcctccctggctggggcatttgggggtccgctgggaggagtgcatcgctgaaggcttcttcctactctcctgcaccttctcctccttgagtcaaggcctccggatccacatggatagctgagatcttttcttggagaaagacgctttcctctttactccagtccctcacttccccacctgattttcctcctcttctgctggtcctgtctttttctactgcctctttattcaatttcttgcttgtgtgcccctctgggactctcttgtacactttcctccatctccactatctcaggatctgtgtgtgtgctgccttcctcctgtgtgctttctgtccccccatctctgtcttgtctttcccacttctattgccaaagggagagatcctctccgggctgttccctggcctgtctgctcctccgggctctgtcccagcagcgacaatgagctccacactccactcggttttcttcaccctgaaggtcagcatcctgctggggtccctgctggggctctgcctgggccttgagttcatgggcctccccaaccagtgggcccgctacctccgctgggatgccagcacacgcagtgacctgagtttccagttcaagaccaacgtctctacggggctgctcctctacctggatgatggcggcgtctgcgacttcctatgcctctccctggtggatggccgcgttcagctccgcttcagcatggactgtgccgagactgccgtgctgtccaacaagcaggtgaatgacagcagctggcacttcctcatggtgagccgtgaccgcctgcgcacggtgctgatgcttgatggcgagggccagtctggggagctgcagccccagcggccctacatggatgtggtcagtgacttgttccttggtggagtccctactgacatacgaccttctgccctgacccttgatggagttcaggccatgcccggcttcaaggggttaattctggatctcaagtatggaaactcggagcctcggcttctggggagccggggtgtccagatggatgccgagggaccctgtggtgagcgtccctgtgaaaatggtgggatctgctttctcctggacggccaccccacctgtgactgttctaccactggctatggtggcaagctctgctcagaaggcctctcccacctcatgatgagtgaacaaggtagaagtaaagctcgagaggagaatgtggccactttccgaggctcagagtatctgtgctacgacctgtctcagaacccgatccagagcagcagtgatgaaatcaccctctcctttaagacctggcagcgtaacggcctcatcctgcacacgggcaagtcggctgactatgtcaacctggctctgaaggatggtgcggtctccttggtcattaacctggggtccggggcctttgaggccattgtggagccagtgaatggaaaattcaacgacaacgcctggcatgatgtcaaagtgacacgcaacctccggcaggtgacaatctctgtggatggcattcttaccacgacgggctacactcaagaggactataccatgctgggctcggacgacttcttctatgtaggaggaagcccaagtaccgctgacttgcctggctcccctgtcagcaacaacttcatgggctgccttaaagaggttgtttataagaataatgacatccgtctggagctgtctcgcctggcccggattgcggacaccaagatgaaaatctatggcgaagttgtgtttaagtgtgagaatgtggccacactggaccccatcaactttgagaccccagaggcttacatcagcttgcccaagtggaacactaaacgtatgggctccatctcctttgacttccgcaccacagagcccaatggcctgatcctcttcactcatggaaagccccaagagaggaaggatgctcggagccagaagaatacaaaagtagacttctttgccgtggaactcctcgatggcaacctgtacttgctgcttgacatgggctctggcaccatcaaagtgaaagccactcagaagaaagccaatgatggggaatggtaccatgtggacattcagcgagatggcagatcaggtactatatcagtgaacagcaggcgcacgccattcaccgccagtggggagagcgagatcctggacctggaaggagacatgtacctgggagggctgccggagaaccgtgctggccttattctccccaccgagctgtggactgccatgctcaactatggctacgtgggctgcatccgcgacctattcattgatgggcgcagcaagaacattcgacagctggcagagatgcagaatgctgcgggtgtcaagtcctcctgttcacggatgagtgccaagcagtgtgacagctacccctgcaagaataatgctgtgtgcaaggacggctggaaccgcttcatctgcgactgcaccggcaccggatactggggaagaacctgcgaaagggaggcatccatcctgagctatgatggtagcatgtacatgaagatcatcatgcccatggtcatgcatactgaggcagaggatgtgtccttccgcttcatgtcccagcgagcttatgggctgctggtggctacgacctccagggactctgccgacaccctgcgtctggagctggatggggggcgtgtcaagctcatggttaacttaggcaaaggaccagagaccttgtatgcagggcagaagctcaatgacaacgagtggcacaccgttcgggtggtgcggagaggaaaaagccttaagttaaccgtggatgatgatgtggctgagggtacaatggtgggagaccatacccgtttggagttccacaacattgaaacgggaatcatgactgagaaacgctacatctccgttgtcccctccagctttattggccatctgcagagcctcatgtttaatggccttctctacattgacttgtgcaaaaatggtgacattgattattgtgagctgaaggctcgttttggactgaggaacatcatcgctgaccctgtcacctttaagaccaagagcagctacctgagccttgccactcttcaggcttacacctccatgcacctcttcttccagttcaagaccacctcaccagatggcttcattctcttcaatagtggtgatggcaatgacttcattgcagtcgagcttgtcaaggggtatatacactacgtttttgacctcggaaacggtcccaatgtgatcaaaggcaacagtgaccgccccctgaatgacaaccagtggcacaatgtcgtcatcactcgggacaatagtaacactcatagcctgaaagtggacaccaaagtggtcactcaggttatcaatggtgccaaaaatctggatttgaaaggtgatctctatatggctggtctggcccaaggcatgtacagcaacctcccaaagctcgtggcctctcgagatggctttcagggctgtctagcatcagtggacttgaatggacgcctgccagacctcatcaatgatgctcttcatcggagcggacagatcgagcgtggctgtgaaggacccagtaccacctgccaggaagattcatgtgccaaccagggggtctgcatgcaacaatgggagggcttcacctgtgattgttctatgacctcttattctggaaaccagtgcaatgatcctggcgctacgtacatctttgggaaaagtggtgggcttatcctctacacctggccagccaatgacaggcccagcacgcggtctgaccgccttgccgtgggcttcagcaccactgtgaaggatggcatcttggtccgcatcgacagtgctccaggacttggtgacttcctccagcttcacatagaacaggggaaaattggagttgtcttcaacattggcacagttgacatctccatcaaagaggagagaacccctgtaaatgacggcaaataccatgtggtacgcttcaccaggaacggcggcaacgccaccctgcaggtggacaactggccagtgaatgaacattatcctacaggcaacactgataatgaacgcttccaaatggtaaaacagaaaatccccttcaaatataatcggcctgtagaggagtggctgcaggaaaaaggccggcagttaaccatcttcaacactcaggcgcaaatagccattggtggaaaggacaaaggacgcctcttccaaggccaactctctgggctctattatgatggtttgaaagtactgaacatggcggctgagaacaaccccaatattaaaatcaatggaagtgttcggctggttggagaagtcccatcaattttgggaacaacacagacgacctccatgccaccagaaatgtctactactgtcatggaaaccactactacaatggcgactaccacaacccgtaagaatcgctctacagccagcattcagccaacatcagatgatcttgtttcatctgctgaatgttcaagtgatgatgaagactttgttgaatgtgagccgagtacaggtaggtcagccagaagctctaatgcagctagatcactccgtgccgcccttacatggacatggcgactcacttacacatttactcctatcatcttcatctcctgtgtagttcactcatagatatgaccctccccttcctgcatctttccttcccattctccccctttctttagcattgttaaaatttatgtgctgtcatccatctccctaaattaaagaaagcctaaaatttgtcaaaaagacaaaaaaatatatatatctgaaaacttataaatgcagaaattcattcaaaacccgttagagtcatagaattttttgaaaggcaaattataaaagtaaacaggtttttttgtttggtttttcaatcatagcaatcggaattattttaaattcaaaaattgatgccctcccaaaccccccaaagtaaaaatttgttaaagtgcagattttttttttctttttatgttatgtggtgtggatgtatgtgttgttgcctccctgtatcatcctctgttgtaaattattatatttgaaaaattagacattttgctcaaaagtttttaagaaatgacaacaaaaaaagcaagttacaagaatgtggcaattctatttgtccaagagcattcttacacaactttcttttgtaaatttttctttcatgccaaaaaacatgcgggcaatttgttgatgaggtgaattagttatccctcttcttgtagaagaccctttagctacccctcctattgctactcgtgcaccttccattacactcccccctacctttcgccccctcctcaccattattgagaccaccaaagattccctgtccatgacctctgaggcggggttaccttgcttgtcggaccaaggcagcgatggttgtgatgatgatggcttggtgatatctgggtatggctcaggggaaacctttgactctaacctgccccctactgatgatgaagatttttacaccaccttctccttggtaacagataagagtctttccacttcaatcttcgaaggtggctacaaagcacatgcgcccaagtgggaatccaaggactttagacctaacaaagtctccgaaactagtaggactactaccacatctttatcccctgagctgatccgcttcacagcttcctcctcgtctgggatggtgcccaaattgccagctggcaaaatgaataaccgtgatctcaaaccccagcctgatatagtcttgcttccgttgcccactgcctatgagctagacagcaccaaactgaagagcccactaattacttcccccatgttccgtaatgtgcccacagcaaaccccacggagccgggaatcagacgggttccgggggcctcagaggtgatccgggagtcgagcagcacaacagggatggtcgtcggcattgtggctgctgccgccctctgcatcttgatcctcctgtacgccatgtacaagtacaggaacagggacgaggggtcctatcaagtggacgagacgcggaactacatcagcaactccgcccagagcaacggcacgctcatgaaggagaagcagcagagctcgaagagcggccacaagaaacagaaaaacaaggacagggagtattacgtgtaaacatgcgaacactgctcacacgcgagttttcacagttatttctatccacgcctatgaatctttggacgg

SEQ ID NO: 158627 - DNA, 3211 bp, Homo sapiens
  Payload ID: 11037
  Gene Symbol: NRXN3
  Gene Name: neurexin 3
  ENST ID: ENST00000555387
  CDS Start-End: 30-1226
cccatctgtagtggtcccgtgcgttgaccatgcacctgagaatccacgcgagacggagccctcctcgccggccggcctggacgcttgggatctggttcctgttctggggatgtatcgtcagctctgtatggagttcttctaatgtagcttcctcctcctccacctcttcctcgccggggtctcactctcagcacgagcaccatttccatggcagcaagcatcactcagtgcctatttctatctatcgttcccctgtttcccttcgaggaggacacgctggcgctacgtacatctttgggaaaagtggtgggcttatcctctacacctggccagccaatgacaggcccagcacgcggtctgaccgccttgccgtgggcttcagcaccactgtgaaggatggcatcttggtccgcatcgacagtgctccaggacttggtgacttcctccagcttcacatagaacaggggaaaattggagttgtcttcaacattggcacagttgacatctccatcaaagaggagagaacccctgtaaatgacggcaaataccatgtggtacgcttcaccaggaacggcggcaacgccaccctgcaggtggacaactggccagtgaatgaacattatcctacaggcaacactgataatgaacgcttccaaatggtaaaacagaaaatccccttcaaatataatcggcctgtagaggagtggctgcaggaaaaaggccggcagttaaccatcttcaacactcaggcgcaaatagccattggtggaaaggacaaaggacgcctcttccaaggccaactctctgggctctattatgatggtttgaaagtactgaacatggcggctgagaacaaccccaatattaaaatcaatggaagtgttcggctggttggagaagtcccatcaattttgggaacaacacagacgacctccatgccaccagaaatgtctactactgtcatggaaaccactactacaatggcgactaccacaacccgtaagaatcgctctacagccagcattcagccaacatcagatgatcttgtttcatctgctgaatgttcaagtgatgatgaagactttgttgaatgtgagccgagtacaggtaggtcagccagaagctctaatgcagctagatcactccgtgccgcccttacatggacatggcgactcacttacacatttactcctatcatcttcatctcctgtgtagttcactcatagatatgaccctccccttcctgcatctttccttcccattctccccctttctttagcattgttaaaatttatgtgctgtcatccatctccctaaattaaagaaagcctaaaatttgtcaaaaagacaaaaaaatatatatatctgaaaacttataaatgcagaaattcattcaaaacccgttagagtcatagaattttttgaaaggcaaattataaaagtaaacaggtttttttgtttggtttttcaatcatagcaatcggaattattttaaattcaaaaattgatgccctcccaaaccccccaaagtaaaaatttgttaaagtgcagattttttttttctttttatgttatgtggtgtggatgtatgtgttgttgcctccctgtatcatcctctgttgtaaattattatatttgaaaaattagacattttgctcaaaagtttttaagaaatgacaacaaaaaaagcaagttacaagaatgtggcaattctatttgtccaagagcattcttacacaactttcttttgtaaatttttctttcatgccaaaaaacatgcgggcaatttgttgatgaggtgaattagttatccctcttcttgtagaagaccctttagctacccctcctattgctactcgtgcaccttccattacactcccccctacctttcgccccctcctcaccattattgagaccaccaaagattccctgtccatgacctctgaggcggggttaccttgcttgtcggaccaaggcagcgatggttgtgatgatgatggcttggtgatatctgggtatggctcaggggaaacctttgactctaacctgccccctactgatgatgaagatttttacaccaccttctccttggtaacagataagagtctttccacttcaatcttcgaaggtggctacaaagcacatgcgcccaagtgggaatccaaggactttagacctaacaaagtctccgaaactagtaggactactaccacatctttatcccctgagctgatccgcttcacagcttcctcctcgtctgggatggtgcccaaattgccagctggcaaaatgaataaccgtgatctcaaaccccagcctgatatagtcttgcttccgttgcccactgcctatgagctagacagcaccaaactgaagagcccactaattacttcccccatgttccgtaatgtgcccacagcaaaccccacggagccgggaatcagacgggttccgggggcctcagaggtgatccgggagtcgagcagcacaacagggatggtcgtcggcattgtggctgctgccgccctctgcatcttgatcctcctgtacgccatgtacaagtacaggaacagggacgaggggtcctatcaagtggacgagacgcggaactacatcagcaactccgcccagagcaacggcacgctcatgaaggagaagcagcagagctcgaagagcggccacaagaaacagaaaaacaaggacagggagtattacgtgtaaacatgcgaacactgctcacacgcgagttttcacagttatttctatccacgcctatgaatctttggacggtgagatctcacagatgtcagaactgctggaactatgaaatggggtatataaccacgactctggtggggaaaaccgttttttaaaggacacacacacacacagcgatgcatctctctctaaagctcagccacggctgcggcaaggtcccagcggtcgctgggagacagaaggttttgtgccctgctgtatcataaagcacacacttagcgctctggagccggacggtggctccaccacttccgcaggcctggaaacttccttctccggaggaccttttactaaaaggtagaagacttcatggcttacttgttccataactccaagtgagtctgtaatgtttgtgaagcttgactgtaaccatgttttttctgtttaattatgtaaaaaacaaaactacaacaacaaaaaaagaaaaaagtta

SEQ ID NO: 158628 - DNA, 4156 bp, Homo sapiens
  Payload ID: 11037
  Gene Symbol: NRXN3
  Gene Name: neurexin 3
  Uniprot ID: Q9Y4C0
  ENST ID: ENST00000554719
  CDS Start-End: 492-3677
caggactggagggcttgaggaatgtggtggtccctctcttcgttgtttctgccccctgaggttgtgctttctcagggatatgcactctgcacttccattcctgcagtgaaattaactcgagcttggcagctcgagaggagaatgtggccactttccgaggctcagagtatctgtgctacgacctgtctcagaacccgatccagagcagcagtgatgaaatcaccctctcctttaagacctggcagcgtaacggcctcatcctgcacacgggcaagtcggctgactatgtcaacctggctctgaaggatggtgcggtctccttggtcattaacctggggtccggggcctttgaggccattgtggagccagtgaatggaaaattcaacgacaacgcctggcatgatgtcaaagtgacacgcaacctccggcaggtgacaatctctgtggatggcattcttaccacgacgggctacactcaagaggactataccatgctgggctcggacgacttcttctatgtaggaggaagcccaagtaccgctgacttgcctggctcccctgtcagcaacaacttcatgggctgccttaaagaggttgtttataagaataatgacatccgtctggagctgtctcgcctggcccggattgcggacaccaagatgaaaatctatggcgaagttgtgtttaagtgtgagaatgtggccacactggaccccatcaactttgagaccccagaggcttacatcagcttgcccaagtggaacactaaacgtatgggctccatctcctttgacttccgcaccacagagcccaatggcctgatcctcttcactcatggaaagccccaagagaggaaggatgctcggagccagaagaatacaaaagtagacttctttgccgtggaactcctcgatggcaacctgtacttgctgcttgacatgggctctggcaccatcaaagtgaaagccactcagaagaaagccaatgatggggaatggtaccatgtggacattcagcgagatggcagatcaggtactatatcagtgaacagcaggcgcacgccattcaccgccagtggggagagcgagatcctggacctggaaggagacatgtacctgggagggctgccggagaaccgtgctggccttattctccccaccgagctgtggactgccatgctcaactatggctacgtgggctgcatccgcgacctattcattgatgggcgcagcaagaacattcgacagctggcagagatgcagaatgctgcgggtgtcaagtcctcctgttcacggatgagtgccaagcagtgtgacagctacccctgcaagaataatgctgtgtgcaaggacggctggaaccgcttcatctgcgactgcaccggcaccggatactggggaagaacctgcgaaagggaggcatccatcctgagctatgatggtagcatgtacatgaagatcatcatgcccatggtcatgcatactgaggcagaggatgtgtccttccgcttcatgtcccagcgagcttatgggctgctggtggctacgacctccagggactctgccgacaccctgcgtctggagctggatggggggcgtgtcaagctcatggttaacttagactgtatcaggataaactgtaactccagcaaaggaccagagaccttgtatgcagggcagaagctcaatgacaacgagtggcacaccgttcgggtggtgcggagaggaaaaagccttaagttaaccgtggatgatgatgtggctgagggtacaatggtgggagaccatacccgtttggagttccacaacattgaaacgggaatcatgactgagaaacgctacatctccgttgtcccctccagctttattggccatctgcagagcctcatgtttaatggccttctctacattgacttgtgcaaaaatggtgacattgattattgtgagctgaaggctcgttttggactgaggaacatcatcgctgaccctgtcacctttaagaccaagagcagctacctgagccttgccactcttcaggcttacacctccatgcacctcttcttccagttcaagaccacctcaccagatggcttcattctcttcaatagtggtgatggcaatgacttcattgcagtcgagcttgtcaaggggtatatacactacgtttttgacctcggaaacggtcccaatgtgatcaaaggcaacagtgaccgccccctgaatgacaaccagtggcacaatgtcgtcatcactcgggacaatagtaacactcatagcctgaaagtggacaccaaagtggtcactcaggttatcaatggtgccaaaaatctggatttgaaaggtgatctctatatggctggtctggcccaaggcatgtacagcaacctcccaaagctcgtggcctctcgagatggctttcagggctgtctagcatcagtggacttgaatggacgcctgccagacctcatcaatgatgctcttcatcggagcggacagatcgagcgtggctgtgaaggacccagtaccacctgccaggaagattcatgtgccaaccagggggtctgcatgcaacaatgggagggcttcacctgtgattgttctatgacctcttattctggaaaccagtgcaatgatcctggcgctacgtacatctttgggaaaagtggtgggcttatcctctacacctggccagccaatgacaggcccagcacgcggtctgaccgccttgccgtgggcttcagcaccactgtgaaggatggcatcttggtccgcatcgacagtgctccaggacttggtgacttcctccagcttcacatagaacaggggaaaattggagttgtcttcaacattggcacagttgacatctccatcaaagaggagagaacccctgtaaatgacggcaaataccatgtggtacgcttcaccaggaacggcggcaacgccaccctgcaggtggacaactggccagtgaatgaacattatcctacaggccggcagttaaccatcttcaacactcaggcgcaaatagccattggtggaaaggacaaaggacgcctcttccaaggccaactctctgggctctattatgatggtttgaaagtactgaacatggcggctgagaacaaccccaatattaaaatcaatggaagtgttcggctggttggagaagtcccatcaattttgggaacaacacagacgacctccatgccaccagaaatgtctactactgtcatggaaaccactactacaatggcgactaccacaacccgtaagaatcgctctacagccagcattcagccaacatcagatgatcttgtttcatctgctgaatgttcaagtgatgatgaagactttgttgaatgtgagccgagtacagcaaaccccacggagccgggaatcagacgggttccgggggcctcagaggtgatccgggagtcgagcagcacaacagggatggtcgtcggcattgtggctgctgccgccctctgcatcttgatcctcctgtacgccatgtacaagtacaggaacagggacgaggggtcctatcaagtggacgagacgcggaactacatcagcaactccgcccagagcaacggcacgctcatgaaggagaagcagcagagctcgaagagcggccacaagaaacagaaaaacaaggacagggagtattacgtgtaaacatgcgaacactgctcacacgcgagttttcacagttatttctatccacgcctatgaatctttggacggtgagatctcacagatgtcagaactgctggaactatgaaatggggtatataaccacgactctggtggggaaaaccgttttttaaaggacacacacacacacagcgatgcatctctctctaaagctcagccacggctgcggcaaggtcccagcggtcgctgggagacagaaggttttgtgccctgctgtatcataaagcacacacttagcgctctggagccggacggtggctccaccacttccgcaggcctggaaacttccttctccggaggaccttttactaaaaggtagaagacttcatggcttacttgttccataactccaagtgagtctgtaatgtttgtgaagcttgactgtaaccatgttttttctgtttaattatgtaaaaaacaaaactacaacaacaaaaaaa

SEQ ID NO: 158629 - DNA, 3381 bp, Homo sapiens
  Payload ID: 11037
  Gene Symbol: NRXN3
  Gene Name: neurexin 3
  Uniprot ID: Q9HDB5
  ENST ID: ENST00000557594
  CDS Start-End: 954-2867
atatgacttgcccatttgtgaatttggctccccaactcctcgcttcacttcacctgtgcctccctggtccgcgcacttcgcaggcgcccgcccgcctctcggccacctctgcagcctgccaggcacctcctcttgcgctctcgctgatttcgcccacccacctccctccaccccgtgccacgttggtttgggtggctgctccgcaccgggttcctcctcctctcctctttccctccagtccttcttattctcttcctctggctgcggtggctgctgctgctgctggttttcatccagttgggaaacccaggaagccggcggctgctccgtggcgctagtccagcacgcccagggttaaaagcctcgcgcccttccgcggagactcccaggaacacccgaagaactcttccacctgcagcccccttttgcctggcagttctgcattgcatctcatggaagtggaaacaggaaaataaaaatgttcaaactccttggatgttgggataaactcacctgaacccacttgggttcgggctgcctccttctcttccttcattgccacctttcctctgtgtggctcccgggagtgtgcggttaagtcatcagactcgaagtgcctagagatccggaggaagccgcgccggtcttcccctgacatgcgtggcatgccggggctccgtaggaggtttgctatacctgggaggaccctggcattctaaatttcagctccgggaaagagaaggggctttttgccttttatcttttttttttctttctttaagtagtaattttttaactgattcattgtttggaaagcgcatattgcttccctcttccccgaattctggcaactcttcctcctgctatgatgggcccttgggcatcatgaacttcattactcctcactggctggaattcaaactgcccatctgtagtggtcccgtgcgttgaccatgcacctgagaatccacgcgagacggagccctcctcgccggccggcctggacgcttgggatctggttcctgttctggggatgtatcgtcagctctgtatggagttcttctaatgtagcttcctcctcctccacctcttcctcgccggggtctcactctcagcacgagcaccatttccatggcagcaagcatcactcagtgcctatttctatctatcgttcccctgtttcccttcgaggaggacacgctggcgctacgtacatctttgggaaaagtggtgggcttatcctctacacctggccagccaatgacaggcccagcacgcggtctgaccgccttgccgtgggcttcagcaccactgtgaaggatggcatcttggtccgcatcgacagtgctccaggacttggtgacttcctccagcttcacatagaacaggggaaaattggagttgtcttcaacattggcacagttgacatctccatcaaagaggagagaacccctgtaaatgacggcaaataccatgtggtacgcttcaccaggaacggcggcaacgccaccctgcaggtggacaactggccagtgaatgaacattatcctacaggccggcagttaaccatcttcaacactcaggcgcaaatagccattggtggaaaggacaaaggacgcctcttccaaggccaactctctgggctctattatgatggtttgaaagtactgaacatggcggctgagaacaaccccaatattaaaatcaatggaagtgttcggctggttggagaagtcccatcaattttgggaacaacacagacgacctccatgccaccagaaatgtctactactgtcatggaaaccactactacaatggcgactaccacaacccgtaagaatcgctctacagccagcattcagccaacatcagatgatcttgtttcatctgctgaatgttcaagtgatgatgaagactttgttgaatgtgagccgagtacaggaggtgaattagttatccctcttcttgtagaagaccctttagctacccctcctattgctactcgtgcaccttccattacactcccccctacctttcgccccctcctcaccattattgagaccaccaaagattccctgtccatgacctctgaggcggggttaccttgcttgtcggaccaaggcagcgatggttgtgatgatgatggcttggtgatatctgggtatggctcaggggaaacctttgactctaacctgccccctactgatgatgaagatttttacaccaccttctccttggtaacagataagagtctttccacttcaatcttcgaaggtggctacaaagcacatgcgcccaagtgggaatccaaggactttagacctaacaaagtctccgaaactagtaggactactaccacatctttatcccctgagctgatccgcttcacagcttcctcctcgtctgggatggtgcccaaattgccagctggcaaaatgaataaccgtgatctcaaaccccagcctgatatagtcttgcttccgttgcccactgcctatgagctagacagcaccaaactgaagagcccactaattacttcccccatgttccgtaatgtgcccacagcaaaccccacggagccgggaatcagacgggttccgggggcctcagaggtgatccgggagtcgagcagcacaacagggatggtcgtcggcattgtggctgctgccgccctctgcatcttgatcctcctgtacgccatgtacaagtacaggaacagggacgaggggtcctatcaagtggacgagacgcggaactacatcagcaactccgcccagagcaacggcacgctcatgaaggagaagcagcagagctcgaagagcggccacaagaaacagaaaaacaaggacagggagtattacgtgtaaacatgcgaacactgctcacacgcgagttttcacagttatttctatccacgcctatgaatctttggacggtgagatctcacagatgtcagaactgctggaactatgaaatggggtatataaccacgactctggtggggaaaaccgttttttaaaggacacacacacacacagcgatgcatctctctctaaagctcagccacggctgcggcaaggtcccagcggtcgctgggagacagaaggttttgtgccctgctgtatcataaagcacacacttagcgctctggagccggacggtggctccaccacttccgcaggcctggaaacttccttctccggaggaccttttactaaaaggtagaagacttcatggcttacttgttccataactccaagtgagtctgtaatgtttgtgaagcttgactgtaaccatgttttttctgtttaattatgtaaaaaacaaaactacaacaacaaaaaaagaaaaaagttaaaaaagaaaaaaacaccaaaaaac

SEQ ID NO: 158630 - DNA, 523 bp, Homo sapiens
  Payload ID: 11037
  Gene Symbol: NRXN3
  Gene Name: neurexin 3
  ENST ID: ENST00000553363
  CDS Start-End: 1-523
agatgtcagtcaagatccaggcctctcccacctcatgatgagtgaacaagctcgagaggagaatgtggccactttccgaggctcagagtatctgtgctacgacctgtctcagaacccgatccagagcagcagtgatgaaatcaccctctcctttaagacctggcagcgtaacggcctcatcctgcacacgggcaagtcggctgactatgtcaacctggctctgaaggatggtgcggtctccttggtcattaacctggggtccggggcctttgaggccattgtggagccagtgaatggaaaattcaacgacaacgcctggcatgatgtcaaagtgacacgcaacctccggcagcactcaggcatcggacacgctatggtgacaatctctgtggatggcattcttaccacgacgggctacactcaagaggactataccatgctgggctcggacgacttcttctatgtaggaggaagcccaagtaccgctgacttgcctggctcccctgtcagcaacaacttcatg

SEQ ID NO: 158631 - DNA, 509 bp, Homo sapiens
  Payload ID: 11037
  Gene Symbol: NRXN3
  Gene Name: neurexin 3
  ENST ID: ENST00000553631
  CDS Start-End: 285-509
aattgctccgggagagacacaggactggagggcttgaggaatgtggtggtccctctcttcgttgtttctgccccctgaggttgtgctttctcagggatatgcactctgcacttccattcctgcagtgaaattaactcgagcttggcagggcacctgacgtccttccttattactgatggcagcagagactgaacccctgggagaggaaagtgaactgagttgtttataagaataatgacatccgtctggagctgtctcgcctggcccggattgcggacaccaagatgaaaatctatggcgaagttgtgtttaagtgtgagaatgtggccacactggaccccatcaactttgagaccccagaggcttacatcagcttgcccaagtggaacactaaacgtatgggctccatctcctttgacttccgcaccacagagcccaatggcctgatcctcttcactcatggaaagccccaagagaggaaggatgctcggagccagaagaatacaaaa

SEQ ID NO: 158632 - DNA, 6069 bp, Homo sapiens
  Payload ID: 11037
  Gene Symbol: NRXN3
  Gene Name: neurexin 3
  ENST ID: ENST00000634499
  CDS Start-End: 1006-6000
agtctcaggctcagcgctcagccctacacatcgcctcttgcatgcaactcacagagagggagaggcaacctgtcctcccctctctcagcctcggcatctccagccaccaaggacctgcttttcgcacctccaacaacccctcccttctaccctgccactccctcccagagagaaaggaaaaggagagagaaagattctggaatttgaacctacccaaagaggaaacatacccagcaaactcagttgattaaacatcaaacagacatacagacagatcccaaatcttctgttcaactggaaaggtcttttctctggagtcctgggaggcaagttatgggcagcactgcttctggccgcaccatgaagcctgagtctgcttgcgctctgcccagggccctgctctgtctgagcattgggcttctagctgcccccctccccacagcctgccgctgctaggaggtagaactttaggagtggtccttggcctgtttctacctgtcacctggctcacctcaccactcactcctcctccatcacagcaccccggccctccctgtccctggcctccctggctggggcatttgggggtccgctgggaggagtgcatcgctgaaggcttcttcctactctcctgcaccttctcctccttgagtcaaggcctccggatccacatggatagctgagatcttttcttggagaaagacgctttcctctttactccagtccctcacttccccacctgattttcctcctcttctgctggtcctgtctttttctactgcctctttattcaatttcttgcttgtgtgcccctctgggactctcttgtacactttcctccatctccactatctcaggatctgtgtgtgtgctgccttcctcctgtgtgctttctgtccccccatctctgtcttgtctttcccacttctattgccaaagggagagatcctctccgggctgttccctggcctgtctgctcctccgggctctgtcccagcagcgacaatgagctccacactccactcggttttcttcaccctgaaggtcagcatcctgctggggtccctgctggggctctgcctgggccttgagttcatgggcctccccaaccagtgggcccgctacctccgctgggatgccagcacacgcagtgacctgagtttccagttcaagaccaacgtctctacggggctgctcctctacctggatgatggcggcgtctgcgacttcctatgcctctccctggtggatggccgcgttcagctccgcttcagcatggactgtgccgagactgccgtgctgtccaacaagcaggtgaatgacagcagctggcacttcctcatggtgagccgtgaccgcctgcgcacggtgctgatgcttgatggcgagggccagtctggggagctgcagccccagcggccctacatggatgtggtcagtgacttgttccttggtggagtccctactgacatacgaccttctgccctgacccttgatggagttcaggccatgcccggcttcaaggggttaattctggatctcaagtatggaaactcggagcctcggcttctggggagccggggtgtccagatggatgccgagggaccctgtggtgagcgtccctgtgaaaatggtgggatctgctttctcctggacggccaccccacctgtgactgttctaccactggctatggtggcaagctctgctcagaaggcctctcccacctcatgatgagtgaacaaggtagaagtaaagctcgagaggagaatgtggccactttccgaggctcagagtatctgtgctacgacctgtctcagaacccgatccagagcagcagtgatgaaatcaccctctcctttaagacctggcagcgtaacggcctcatcctgcacacgggcaagtcggctgactatgtcaacctggctctgaaggatggtgcggtctccttggtcattaacctggggtccggggcctttgaggccattgtggagccagtgaatggaaaattcaacgacaacgcctggcatgatgtcaaagtgacacgcaacctccggcaggtgacaatctctgtggatggcattcttaccacgacgggctacactcaagaggactataccatgctgggctcggacgacttcttctatgtaggaggaagcccaagtaccgctgacttgcctggctcccctgtcagcaacaacttcatgggctgccttaaagaggttgtttataagaataatgacatccgtctggagctgtctcgcctggcccggattgcggacaccaagatgaaaatctatggcgaagttgtgtttaagtgtgagaatgtggccacactggaccccatcaactttgagaccccagaggcttacatcagcttgcccaagtggaacactaaacgtatgggctccatctcctttgacttccgcaccacagagcccaatggcctgatcctcttcactcatggaaagccccaagagaggaaggatgctcggagccagaagaatacaaaagtagacttctttgccgtggaactcctcgatggcaacctgtacttgctgcttgacatgggctctggcaccatcaaagtgaaagccactcagaagaaagccaatgatggggaatggtaccatgtggacattcagcgagatggcagatcaggtactatatcagtgaacagcaggcgcacgccattcaccgccagtggggagagcgagatcctggacctggaaggagacatgtacctgggagggctgccggagaaccgtgctggccttattctccccaccgagctgtggactgccatgctcaactatggctacgtgggctgcatccgcgacctattcattgatgggcgcagcaagaacattcgacagctggcagagatgcagaatgctgcgggtgtcaagtcctcctgttcacggatgagtgccaagcagtgtgacagctacccctgcaagaataatgctgtgtgcaaggacggctggaaccgcttcatctgcgactgcaccggcaccggatactggggaagaacctgcgaaagggaggcatccatcctgagctatgatggtagcatgtacatgaagatcatcatgcccatggtcatgcatactgaggcagaggatgtgtccttccgcttcatgtcccagcgagcttatgggctgctggtggctacgacctccagggactctgccgacaccctgcgtctggagctggatggggggcgtgtcaagctcatggttaacttaggcaaaggaccagagaccttgtatgcagggcagaagctcaatgacaacgagtggcacaccgttcgggtggtgcggagaggaaaaagccttaagttaaccgtggatgatgatgtggctgagggtacaatggtgggagaccatacccgtttggagttccacaacattgaaacgggaatcatgactgagaaacgctacatctccgttgtcccctccagctttattggccatctgcagagcctcatgtttaatggccttctctacattgacttgtgcaaaaatggtgacattgattattgtgagctgaaggctcgttttggactgaggaacatcatcgctgaccctgtcacctttaagaccaagagcagctacctgagccttgccactcttcaggcttacacctccatgcacctcttcttccagttcaagaccacctcaccagatggcttcattctcttcaatagtggtgatggcaatgacttcattgcagtcgagcttgtcaaggggtatatacactacgtttttgacctcggaaacggtcccaatgtgatcaaaggcaacagtgaccgccccctgaatgacaaccagtggcacaatgtcgtcatcactcgggacaatagtaacactcatagcctgaaagtggacaccaaagtggtcactcaggttatcaatggtgccaaaaatctggatttgaaaggtgatctctatatggctggtctggcccaaggcatgtacagcaacctcccaaagctcgtggcctctcgagatggctttcagggctgtctagcatcagtggacttgaatggacgcctgccagacctcatcaatgatgctcttcatcggagcggacagatcgagcgtggctgtgaaggacccagtaccacctgccaggaagattcatgtgccaaccagggggtctgcatgcaacaatgggagggcttcacctgtgattgttctatgacctcttattctggaaaccagtgcaatgatcctggcgctacgtacatctttgggaaaagtggtgggcttatcctctacacctggccagccaatgacaggcccagcacgcggtctgaccgccttgccgtgggcttcagcaccactgtgaaggatggcatcttggtccgcatcgacagtgctccaggacttggtgacttcctccagcttcacatagaacaggggaaaattggagttgtcttcaacattggcacagttgacatctccatcaaagaggagagaacccctgtaaatgacggcaaataccatgtggtacgcttcaccaggaacggcggcaacgccaccctgcaggtggacaactggccagtgaatgaacattatcctacaggcaacactgataatgaacgcttccaaatggtaaaacagaaaatccccttcaaatataatcggcctgtagaggagtggctgcaggaaaaaggccggcagttaaccatcttcaacactcaggcgcaaatagccattggtggaaaggacaaaggacgcctcttccaaggccaactctctgggctctattatgatggtttgaaagtactgaacatggcggctgagaacaaccccaatattaaaatcaatggaagtgttcggctggttggagaagtcccatcaattttgggaacaacacagacgacctccatgccaccagaaatgtctactactgtcatggaaaccactactacaatggcgactaccacaacccgtaagaatcgctctacagccagcattcagccaacatcagatgatcttgtttcatctgctgaatgttcaagtgatgatgaagactttgttgaatgtgagccgagtacaggtaggtcaggaggtgaattagttatccctcttcttgtagaagaccctttagctacccctcctattgctactcgtgcaccttccattacactcccccctacctttcgccccctcctcaccattattgagaccaccaaagattccctgtccatgacctctgaggcggggttaccttgcttgtcggaccaaggcagcgatggttgtgatgatgatggcttggtgatatctgggtatggctcaggggaaacctttgactctaacctgccccctactgatgatgaagatttttacaccaccttctccttggtaacagataagagtctttccacttcaatcttcgaaggtggctacaaagcacatgcgcccaagtgggaatccaaggactttagacctaacaaagtctccgaaactagtaggactactaccacatctttatcccctgagctgatccgcttcacagcttcctcctcgtctgggatggtgcccaaattgccagctggcaaaatgaataaccgtgatctcaaaccccagcctgatatagtcttgcttccgttgcccactgcctatgagctagacagcaccaaactgaagagcccactaattacttcccccatgttccgtaatgtgcccacagcaaaccccacggagccgggaatcagacgggttccgggggcctcagaggtgatccgggagtcgagcagcacaacagggatggtcgtcggcattgtggctgctgccgccctctgcatcttgatcctcctgtacgccatgtacaagtacaggaacagggacgaggggtcctatcaagtggacgagacgcggaactacatcagcaactccgcccagagcaacggcacgctcatgaaggagaagcagcagagctcgaagagcggccacaagaaacagaaaaacaaggacagggagtattacgtgtaaacatgcgaacactgctcacacgcgagttttcacagttatttctatccacgcctatgaatctttggacgg

SEQ ID NO: 158633 - DNA, 5254 bp, Homo sapiens
  Payload ID: 11037
  Gene Symbol: NRXN3
  Gene Name: neurexin 3
  ENST ID: ENST00000635466
  CDS Start-End: 58-4773
ctctccgggctgttccctggcctgtctgctcctccgggctctgtcccagcagcgacaatgagctccacactccactcggttttcttcaccctgaaggtcagcatcctgctggggtccctgctggggctctgcctgggccttgagttcatgggcctccccaaccagtgggcccgctacctccgctgggatgccagcacacgcagtgacctgagtttccagttcaagaccaacgtctctacggggctgctcctctacctggatgatggcggcgtctgcgacttcctatgcctctccctggtggatggccgcgttcagctccgcttcagcatggactgtgccgagactgccgtgctgtccaacaagcaggtgaatgacagcagctggcacttcctcatggtgagccgtgaccgcctgcgcacggtgctgatgcttgatggcgagggccagtctggggagctgcagccccagcggccctacatggatgtggtcagtgacttgttccttggtggagtccctactgacatacgaccttctgccctgacccttgatggagttcaggccatgcccggcttcaaggggttaattctggatctcaagtatggaaactcggagcctcggcttctggggagccggggtgtccagatggatgccgagggaccctgtggtgagcgtccctgtgaaaatggtgggatctgctttctcctggacggccaccccacctgtgactgttctaccactggctatggtggcaagctctgctcagaagatgtcagtcaagatccaggcctctcccacctcatgatgagtgaacaagctcgagaggagaatgtggccactttccgaggctcagagtatctgtgctacgacctgtctcagaacccgatccagagcagcagtgatgaaatcaccctctcctttaagacctggcagcgtaacggcctcatcctgcacacgggcaagtcggctgactatgtcaacctggctctgaaggatggtgcggtctccttggtcattaacctggggtccggggcctttgaggccattgtggagccagtgaatggaaaattcaacgacaacgcctggcatgatgtcaaagtgacacgcaacctccggcaggtgacaatctctgtggatggcattcttaccacgacgggctacactcaagaggactataccatgctgggctcggacgacttcttctatgtaggaggaagcccaagtaccgctgacttgcctggctcccctgtcagcaacaacttcatgggctgccttaaagaggttgtttataagaataatgacatccgtctggagctgtctcgcctggcccggattgcggacaccaagatgaaaatctatggcgaagttgtgtttaagtgtgagaatgtggccacactggaccccatcaactttgagaccccagaggcttacatcagcttgcccaagtggaacactaaacgtatgggctccatctcctttgacttccgcaccacagagcccaatggcctgatcctcttcactcatggaaagccccaagagaggaaggatgctcggagccagaagaatacaaaagtagacttctttgccgtggaactcctcgatggcaacctgtacttgctgcttgacatgggctctggcaccatcaaagtgaaagccactcagaagaaagccaatgatggggaatggtaccatgtggacattcagcgagatggcagatcaggtactatatcagtgaacagcaggcgcacgccattcaccgccagtggggagagcgagatcctggacctggaaggagacatgtacctgggagggctgccggagaaccgtgctggccttattctccccaccgagctgtggactgccatgctcaactatggctacgtgggctgcatccgcgacctattcattgatgggcgcagcaagaacattcgacagctggcagagatgcagaatgctgcgggtgtcaagtcctcctgttcacggatgagtgccaagcagtgtgacagctacccctgcaagaataatgctgtgtgcaaggacggctggaaccgcttcatctgcgactgcaccggcaccggatactggggaagaacctgcgaaagggaggcatccatcctgagctatgatggtagcatgtacatgaagatcatcatgcccatggtcatgcatactgaggcagaggatgtgtccttccgcttcatgtcccagcgagcttatgggctgctggtggctacgacctccagggactctgccgacaccctgcgtctggagctggatggggggcgtgtcaagctcatggttaacttagactgtatcaggataaactgtaactccagcaaaggaccagagaccttgtatgcagggcagaagctcaatgacaacgagtggcacaccgttcgggtggtgcggagaggaaaaagccttaagttaaccgtggatgatgatgtggctgagggtacaatggtgggagaccatacccgtttggagttccacaacattgaaacgggaatcatgactgagaaacgctacatctccgttgtcccctccagctttattggccatctgcagagcctcatgtttaatggccttctctacattgacttgtgcaaaaatggtgacattgattattgtgagctgaaggctcgttttggactgaggaacatcatcgctgaccctgtcacctttaagaccaagagcagctacctgagccttgccactcttcaggcttacacctccatgcacctcttcttccagttcaagaccacctcaccagatggcttcattctcttcaatagtggtgatggcaatgacttcattgcagtcgagcttgtcaaggggtatatacactacgtttttgacctcggaaacggtcccaatgtgatcaaaggcaacagtgaccgccccctgaatgacaaccagtggcacaatgtcgtcatcactcgggacaatagtaacactcatagcctgaaagtggacaccaaagtggtcactcaggttatcaatggtgccaaaaatctggatttgaaaggtgatctctatatggctggtctggcccaaggcatgtacagcaacctcccaaagctcgtggcctctcgagatggctttcagggctgtctagcatcagtggacttgaatggacgcctgccagacctcatcaatgatgctcttcatcggagcggacagatcgagcgtggctgtgaaggacccagtaccacctgccaggaagattcatgtgccaaccagggggtctgcatgcaacaatgggagggcttcacctgtgattgttctatgacctcttattctggaaaccagtgcaatgatcctggcgctacgtacatctttgggaaaagtggtgggcttatcctctacacctggccagccaatgacaggcccagcacgcggtctgaccgccttgccgtgggcttcagcaccactgtgaaggatggcatcttggtccgcatcgacagtgctccaggacttggtgacttcctccagcttcacatagaacaggggaaaattggagttgtcttcaacattggcacagttgacatctccatcaaagaggagagaacccctgtaaatgacggcaaataccatgtggtacgcttcaccaggaacggcggcaacgccaccctgcaggtggacaactggccagtgaatgaacattatcctacaggcaacactgataatgaacgcttccaaatggtaaaacagaaaatccccttcaaatataatcggcctgtagaggagtggctgcaggaaaaaggccggcagttaaccatcttcaacactcaggcgcaaatagccattggtggaaaggacaaaggacgcctcttccaaggccaactctctgggctctattatgatggtttgaaagtactgaacatggcggctgagaacaaccccaatattaaaatcaatggaagtgttcggctggttggagaagtcccatcaattttgggaacaacacagacgacctccatgccaccagaaatgtctactactgtcatggaaaccactactacaatggcgactaccacaacccgtaagaatcgctctacagccagcattcagccaacatcagatgatcttgtttcatctgctgaatgttcaagtgatgatgaagactttgttgaatgtgagccgagtacagataagagtctttccacttcaatcttcgaaggtggctacaaagcacatgcgcccaagtgggaatccaaggactttagacctaacaaagtctccgaaactagtaggactactaccacatctttatcccctgagctgatccgcttcacagcttcctcctcgtctgggatggtgcccaaattgccagctggcaaaatgaataaccgtgatctcaaaccccagcctgatatagtcttgcttccgttgcccactgcctatgagctagacagcaccaaactgaagagcccactaattacttcccccatgttccgtaatgtgcccacagcaaaccccacggagccgggaatcagacgggttccgggggcctcagaggtgatccgggagtcgagcagcacaacagggatggtcgtcggcattgtggctgctgccgccctctgcatcttgatcctcctgtacgccatgtacaagtacaggaacagggacgaggggtcctatcaagtggacgagacgcggaactacatcagcaactccgcccagagcaacggcacgctcatgaaggagaagcagcagagctcgaagagcggccacaagaaacagaaaaacaaggacagggagtattacgtgtaaacatgcgaacactgctcacacgcgagttttcacagttatttctatccacgcctatgaatctttggacggtgagatctcacagatgtcagaactgctggaactatgaaatggggtatataaccacgactctggtggggaaaaccgttttttaaaggacacacacacacacagcgatgcatctctctctaaagctcagccacggctgcggcaaggtcccagcggtcgctgggagacagaaggttttgtgccctgctgtatcataaagcacacacttagcgctctggagccggacggtggctccaccacttccgcaggcctggaaacttccttctccggaggaccttttactaaaaggtagaagacttcatggcttacttgttccataactccaagtgagtctgtaatgtttgtgaagcttgactgtaaccatgttttttctgtttaattatgtaaaaaacaaaactacaacaacaaaaaaaga

SEQ ID NO: 158634 - DNA, 2921 bp, Homo sapiens
  Payload ID: 11038
  Gene Symbol: NXPH1
  Gene Name: neurexophilin 1
  Uniprot ID: P58417
  ENST ID: ENST00000405863
  CDS Start-End: 912-1727
aagtaattgtccgtgtcaggaaggtaggcgtgccaagccgcggctctgcggagaaaccacgaccaccgcggccgccggaaacccaaagcgctccagagcgtccccgggtggccgggcagcaccagggacagcgcccgggactccactggggaccggctcctgggcttcccagcgtcgcgggtagaggtacagctgctccgtgtgccgcaggctccagattctcgccaccccacccctccctcagaaactcggactgctctcgtctgccgtgtggttctcttttcttccgaaaggccagtgtcttatctctccacttcaagtccagaggacttgctcagtctcctccccttaagtcatttccaccatcctcaggcagctgtgggaagccgagagtcctggactgttcgtccgggtgccagcgctggcagtcccagtccgtccggtgcagcagcccggcgcattcccctctctccctccctcttgctctccctccctttctgtcttcctctctttcctcctctactgctccctccctctcttgcctcttaagtttcctgcaccgtgaatccaactgtgccaagccttggctcccgcgaaccaatcctgagcgcgacccgggcactgggacggcgactccgccaaagctggacgaggcagccggacccgtctgcgctcgagcatggagacggagcgcctgggagggcacgtccggggcgctggagacgccaggcccgagtagcttctccatggagcctgcccagagcggtcccttctcgcaggattcgccccaagtcctgtgcggctgctgagagcgctccttgctctgtaaagtggatgtcaggtggatctatgtttctgaaggaacaaagactcaaagaaggcaccgccaaggaagtttgagacgcgggagaatgcaggctgcgtgctggtacgtgcttttcctcctgcagcccaccgtctacttggtcacatgtgccaatttaacgaacggtggaaagtcagaacttctgaaatcaggaagcagcaaatccacactaaagcacatatggacagaaagcagcaaagacttgtctatcagccgactcctgtcacagacttttcgtggcaaagagaatgatacagatttggacctgagatatgacaccccagaaccttattctgagcaagacctctgggactggctgaggaactccacagaccttcaagagcctcggcccagggccaagagaaggcccattgttaaaacgggcaagtttaagaaaatgtttggatggggcgattttcattccaacatcaaaacagtgaagctgaacctgttgataactgggaaaattgtagatcatggcaatgggacatttagtgtttatttcaggcataattcaactggtcaagggaatgtatctgtcagcttggtaccccctacaaaaatcgtggaatttgacttggcacaacaaaccgtgattgatgccaaagattccaagtcttttaattgtcgcattgaatatgaaaaggttgacaaggctaccaagaacacactctgcaactatgacccttcaaaaacctgttaccaggagcaaacccaaagtcatgtatcctggctctgctccaagccctttaaggtgatctgtatttacatttccttttatagtacagattataaactggtacagaaagtgtgccctgactacaactaccacagtgacacaccttactttccctcgggatgaaggtgaacatgggggtgagactgaagcctgaggaattaaaggtcatatgacagggctgttacctcaaagaagaaggtcacatctgttgcctggaatgtgtctacactgctgctcttgtcaactggctgcaaaatacactagtggaaaacactctgatgtaatttctgcccagtcagcttcatccctcagtataattgtaaatcatcacagattttgaattcacacctgaagacatgctctcacatatagaggtacacaaacacaccgtcatgcacatttcagcttgcgtctatcatgattcctgttgagagggctttcattgtctgactcataatggttcaggatcaactatcatcaaacggaaggattaactagacagagaatgtttctaacagttgctgttatggaaatctcttttaaagtcttgagtacatgctaatcaataatctccactcatgcattcctactgcttggagtagctgtactggtaaatactactgtaggagtatctgcttgttaaaatggaaaaatgtgtctttagagctcagtattctttattttacaaacacaacaaaatgtagtaacttttttccagcatacagtaggcacattcaaagtggtccaagatggctcttttttctttgaaaggggcctgttctcagtaaagatgagcaaacatttggaatttacatgtgggcagacattgggataacaactttcatcaccaatcattggacttttgtgaagttgacaccagctaaggctgcttaaaataagttctgatcattatataagaagggaaatgcctggcagacaccatgtaagttataagtgtctgtcttatctttactacacatattgtaacaaattcaatatcctagtcttcatttgtatgaatggtttgtattgtacatagtttaaccaagtgttatttgagctgcttattaatattaacttgtacttgtctctctgcttgttattggttaagaaaaaaggatatgaggaattcattttatcaatgtagctgtgaaggccattaaaaagacaaacttaatgtacagagcatttattcagatcaagtattgttgaaagctatacatatacaacattacagtctgtctgtatttagatattttatttctggaaaaaatgaaatgtacataaaaataaaacacttaaagttgagtttcaata

SEQ ID NO: 158635 - DNA, 568 bp, Homo sapiens
  Payload ID: 11038
  Gene Symbol: NXPH1
  Gene Name: neurexophilin 1
  ENST ID: ENST00000438764
  CDS Start-End: 151-568
acttcaccgaacgtgttgaggtacctagcacctaatcgcggctgctgagagcgctccttgctctgtaaagtggatgtcaggtggatctatgtttctgaaggaacaaagactcaaagaaggcaccgccaaggaagtttgagacgcgggagaatgcaggctgcgtgctggtacgtgcttttcctcctgcagcccaccgtctacttggtcacatgtgccaatttaacgaacggtggaaagtcagaacttctgaaatcaggaagcagcaaatccacactaaagcacatatggacagaaagcagcaaagacttgtctatcagccgactcctgtcacagacttttcgtggcaaagagaatgatacagatttggacctgagatatgacaccccagaaccttattctgagcaagacctctgggactggctgaggaactccacagaccttcaagagcctcggcccagggccaagagaaggcccattgttaaaacgggcaagtttaagaaaatgtttggatggggcgattttcattccaacatcaaaacagtgaagctgaacctgttgataactggga

SEQ ID NO: 158636 - DNA, 949 bp, Homo sapiens
  Payload ID: 11038
  Gene Symbol: NXPH1
  Gene Name: neurexophilin 1
  ENST ID: ENST00000429542
  CDS Start-End: 520-949
gtgtacgtgtgtgagcactgccagggctggcgaagaaccagccgccgcctttagtccgagccgccgggccacccaacacaagggcaggtctcgctgccggagaagcctgggctccgaaccagcctgcacgcggctcagtgtgctccgccgcctgggaactcgcacccgaggagcgcagggggcaaggagcccctcaccctccctctcgtccgcccgcccgcctccccagctgcggaccgcgcgcttgctggtctcaggcgctggatttactcgcttttcaatttttcgtaccctccctcccttttttttttggtcccccactccccgctacgaccccctttccccgcttgattgtcaagcctaaccttgcccgcgtagtcatgggatgtctaattttatttgcatctaggctgctgagagcgctccttgctctgtaaagtggatgtcaggtggatctatgtttctgaaggaacaaagactcaaagaaggcaccgccaaggaagtttgagacgcgggagaatgcaggctgcgtgctggtacgtgcttttcctcctgcagcccaccgtctacttggtcacatgtgccaatttaacgaacggtggaaagtcagaacttctgaaatcaggaagcagcaaatccacactaaagcacatatggacagaaagcagcaaagacttgtctatcagccgactcctgtcacagacttttcgtggcaaagagaatgatacagatttggacctgagatatgacaccccagaaccttattctgagcaagacctctgggactggctgaggaactccacagaccttcaagagcctcggcccagggccaagagaaggcccattgttaaaacgggcaagtttaagaaaatgtttggatggggcgattttcattccaacatcaaaacagtgaagctgaacctgttgataactgggaaaattgtagatc

SEQ ID NO: 158637 - DNA, 1953 bp, Homo sapiens
  Payload ID: 11038
  Gene Symbol: NXPH1
  Gene Name: neurexophilin 1
  ENST ID: ENST00000602349
  CDS Start-End: 2-763
ggtcacatgtgccaatttaacgaacggtggaaagtcagaacttctgaaatcaggaagcagcaaatccacactaaagcacatatggacagaaagcagcaaagacttgtctatcagccgactcctgtcacagacttttcgtggcaaagagaatgatacagatttggacctgagatatgacaccccagaaccttattctgagcaagacctctgggactggctgaggaactccacagaccttcaagagcctcggcccagggccaagagaaggcccattgttaaaacgggcaagtttaagaaaatgtttggatggggcgattttcattccaacatcaaaacagtgaagctgaacctgttgataactgggaaaattgtagatcatggcaatgggacatttagtgtttatttcaggcataattcaactggtcaagggaatgtatctgtcagcttggtaccccctacaaaaatcgtggaatttgacttggcacaacaaaccgtgattgatgccaaagattccaagtcttttaattgtcgcattgaatatgaaaaggttgacaaggctaccaagaacacactctgcaactatgacccttcaaaaacctgttaccaggagcaaacccaaagtcatgtatcctggctctgctccaagccctttaaggtgatctgtatttacatttccttttatagtacagattataaactggtacagaaagtgtgccctgactacaactaccacagtgacacaccttactttccctcgggatgaaggtgaacatgggggtgagactgaagcctgaggaattaaaggtcatatgacagggctgttacctcaaagaagaaggtcacatctgttgcctggaatgtgtctacactgctgctcttgtcaactggctgcaaaatacactagtggaaaacactctgatgtaatttctgcccagtcagcttcatccctcagtataattgtaaatcatcacagattttgaattcacacctgaagacatgctctcacatatagaggtacacaaacacaccgtcatgcacatttcagcttgcgtctatcatgattcctgttgagagggctttcattgtctgactcataatggttcaggatcaactatcatcaaacggaaggattaactagacagagaatgtttctaacagttgctgttatggaaatctcttttaaagtcttgagtacatgctaatcaataatctccactcatgcattcctactgcttggagtagctgtactggtaaatactactgtaggagtatctgcttgttaaaatggaaaaatgtgtctttagagctcagtattctttattttacaaacacaacaaaatgtagtaacttttttccagcatacagtaggcacattcaaagtggtccaagatggctcttttttctttgaaaggggcctgttctcagtaaagatgagcaaacatttggaatttacatgtgggcagacattgggataacaactttcatcaccaatcattggacttttgtgaagttgacaccagctaaggctgcttaaaataagttctgatcattatataagaagggaaatgcctggcagacaccatgtaagttataagtgtctgtcttatctttactacacatattgtaacaaattcaatatcctagtcttcatttgtatgaatggtttgtattgtacatagtttaaccaagtgttatttgagctgcttattaatattaacttgtacttgtctctctgcttgttattggttaagaaaaaaggatatgaggaattcattttatcaatgtagctgtgaaggccattaaaaagacaaacttaatgtacagagcatttattcagatcaagtattgttgaaagctatacatatacaacattacagtctgtctgtatttagatattttatttctggaaaaaatgaaatgtacataaaaataaaacacttaaagttgagtttc

SEQ ID NO: 158638 - DNA, 1052 bp, Homo sapiens
  Payload ID: 11039
  Gene Symbol: NXPH2
  Gene Name: neurexophilin 2
  Uniprot ID: O95156
  ENST ID: ENST00000272641
  CDS Start-End: 108-902
agcgccgcgctgtgtccctggcgtcctcagtcctgccccgcgaagtggagatgcgcgagaggcaggcgagggcgcgcagctcgtgaaaagccgcgccagccggcaccatgcgcctgcggccgctgcccctcgtggtggtccctggcttgctgcagctgctattttgtgacagtaaggaagtggtgcatgccacggaggggctggattgggaagacaaagatgctccagggacgttggtcggcaacgtggtgcactcaaggatcatcagtcccctgcgcctgtttgttaaacagtctccggtgcccaagcccggccccatggcgtacgcagacagcatggaaaacttttgggattggctggccaacatcacggagattcaggagccattggcaagaactaaacggaggccaatagtaaaaacaggaaaatttaagaaaatgtttggatggggtgactttcattccaacattaaaactgtcaaactcaatctcctcatcacagggaaaattgttgaccatggaaatggaaccttcagtgtgtatttccgacataattcaacaggcctgggcaatgtttcagtgagcttggtaccaccctccaaggtggtggaatttgaagtttccccccagtctaccttggagaccaaggaatccaaatctttcaattgtcgcattgagtatgaaaaaacagatcgggcgaaaaagaccgccctgtgcaactttgacccatccaagatctgctaccaggagcagactcagagccatgtgtcttggttgtgctccaagcccttcaaggtcatttgcatttacattgccttttacagtgttgattataaactcgtgcaaaaggtgtgccctgactacaattaccatagtgagaccccatacttatcttctggctgatcttcctgctgtggtggaaatgagggatacatatgtatttgattagaatgacaaagaaacaagcccagctctttatgataaaggatcccttttgtttctggcagtgaacaatagttccctatcaggttttcaaatttaaaaaaagaaaaa

SEQ ID NO: 158639 - DNA, 2179 bp, Homo sapiens
  Payload ID: 11040
  Gene Symbol: NXPH3
  Gene Name: neurexophilin 3
  Uniprot ID: O95157
  ENST ID: ENST00000328741
  CDS Start-End: 363-1121
cgcgcaggtccccagcacatctgggcgagagcggcgccgctggagccgaggggggcgccgagcgcagatctggagcagcagagccacggcgcagctggggcccttcgaggcgctcggggcgcacatctgggacctcgagcgggggccgtgccgcgcgcagctggaccaggggaggggggcggcggctgcacagctggaccgaagggggcggggtcggccctgggcgacccgctgaggggagggccgcgggccgccggggactggagcatgggacggcgcgcctgaaggagcaggaaggggaaggaggcctgggaccccgaaaagagaaggggagagcgaggggacgagagcggaggaggaagatgcaactgactcgctgctgcttcgtgttcctggtgcagggtagcctctatctggtcatctgtggccaggatgatggtcctcccggctcagaggaccctgagcgtgatgaccacgagggccagccccggccccgggtgcctcggaagcggggccacatctcacctaagtcccgccccatggccaattccactctcctagggctgctggccccgcctggggaggcttggggcattcttgggcagccccccaaccgcccgaaccacagccccccaccctcagccaaggtgaagaaaatctttggctggggcgacttctactccaacatcaagacggtggccctgaacctgctcgtcacagggaagattgtggaccatggcaatgggaccttcagcgtccacttccaacacaatgccacaggccagggaaacatctccatcagcctcgtgccccccagtaaagctgtagagttccaccaggaacagcagatcttcatcgaagccaaggcctccaaaatcttcaactgccggatggagtgggagaaggtagaacggggccgccggacctcgctttgcacccacgacccagccaagatctgctcccgagaccacgctcagagctcagccacctggagctgctcccagcccttcaaagtcgtctgtgtctacatcgccttctacagcacggactatcggctggtccagaaggtgtgcccagattacaactaccatagtgataccccctactacccatctgggtgacccggggcaggccacagaggccaggccagggctggaaggacaggcctgcccatgcaggagaccatctggacaccgggcagggaaggggttgggcctcaggcagggaggggggtggagacgaggagatgccaagtggggccagggccaagtctcaagtggcagagaaagggtcccaagtgctggtcccaacctgaagctgtggagtgactagatcacaggagcactggaggaggagtgggctctctgtgcagcctcacagggctttgccacggagccacagagagatgctgggtccccgaggcctgtgggcaggccgatcagtgtggccccagatcaagtcatgggaggaagctaagcccttggttcttgccatcctgaggaaagatagcaacagggagggggagatttcatcagtgtggacagcctgtcaacttaggatggatggctgagagggcttcctaggagccagtcagcagggtggggtggggccagaggagctctccagccctgcctagtgggcgccctcagccccttgtcgtgtgctgagcatggcatgaggctgaagtggcaaccctggggtctttgatgtcttgacagattgaccatctgtctccagccaggccacccctttccaaaattccctcttctgccagtactccccctgtaccacccattgctgatggcacacccatccttaagctaagacaggacgattgtggtcctcccacactaaggccacagcccatccgcgtgctgtgtgtccctcttccaccccaacccctgctggctcctctgggagcatccatgtcccggagaggggtccctcaacagtcagcctcacctgtcagaccggggttctcccggatctggatggcgccgccctctcagcagcgggcacgggtggggcggggccgggccgcagagcatgtgctggatctgttctgtgtgtctgtctgtgggtggggggaggggagggaagtcttgtgaaaccgctgattgctgacttttgtgtgaagaatcgtgttcttggagcaggaaataaagcttgccccggggca

SEQ ID NO: 158640 - DNA, 1530 bp, Homo sapiens
  Payload ID: 11040
  Gene Symbol: NXPH3
  Gene Name: neurexophilin 3
  ENST ID: ENST00000513748
  CDS Start-End: 99-1163
agcatgggacggcgcgcctgaaggagcaggaaggggaaggaggcctgggaccccgaaaagagaaggggagagcgaggggacgagagcggaggaggaagatgcaactgactcgctgctgcttcgtgttcctggtgcagggtagcctctatctggtcatctgtggccaggatgatggtcctcccggctcagaggaccctgagcgtgatgaccacgagggccagccccggccccgggtgcctcggaagcggggccacatctcacctaagtcccgccccatggccaattccactctcctagggctgctggccccgcctggggaggcttggggcattcttgggcagccccccaaccgcccgaaccacagccccccaccctcagccaaggtgaagaaaatctttggctggggcgacttctactccaacatcaagacggtggccctgaacctgctcgtcacagggaagattgtggaccatggcaatgggaccttcagcgtccacttccaacacaatgccacaggccagggaaacatctccatcagcctcgtgccccccagtaaagctgtagagttccaccaggaacagcagatcttcatcgaagccaaggcctccaaaatcttcaactgccggatggagtgggagaaggtagaacggggccgccggacctcgctttgcacccacgacccagccaagatctgctcccgagaccacgctcagagctcagccacctggagctgctcccagcccttcaaagtcgtctgtgtctacatcgccttctacagcacggactatcggctggtccagaaggggccgtctctcctgagtggagatgtgagacacacacccctcctccagaccaccctccgctccccaccctggaggcttgagactgctggcactggagcagcccaccaatggacacccaccgtgtgccgttcagcctcccacagtgctgtggagactgcaggaaggaggaggaagcaatggggccagaggccctgggcgccctccccacctcccctggctgaactctcagcaggcactgggggcactttgacccccctcctgctcctctcctcctgtggagagccagatgctggcgacagctggagggcccggccttcctggcacacagttctgcctgcaccagggatggattcattttaataacttcatttcaccctcatgcacactgccgcctcatccctcctttccaccttccccagtagcctggctgctctcctcagctaggacttcgctaacagatttcctcccaaaccttaattctttggaatagccctctggtccctactgttcttgccagatacttctgtgcccgcttggtcctcacaagggcaaggggtccatccaacttcctctggctaagaagacgtcacctctgccccattggcgagcagtgtccccatggtgatgcccccccaccatcacgacgaagtgcgctggcctcccactcttgccatgcacacactcacaggagattcctctgaagaaacctgtccccactctgcccaga

SEQ ID NO: 158641 - DNA, 1804 bp, Homo sapiens
  Payload ID: 11041
  Gene Symbol: NXPH4
  Gene Name: neurexophilin 4
  Uniprot ID: O95158
  ENST ID: ENST00000349394
  CDS Start-End: 176-1102
gcgccggctccgcgcctcgcgcccagtccgcgggccgcgccgccgctcccgccgctcccgccgctcccgccgctcccgcagccgccccgccgcccgcccggagccccgcgtccctaggcctggctcccgcctgcccgagacccgcccagcctgccccgctcagccgccagagaagatgcggctgctcccggaatggttcctcttgctctttggcccgtggctccttaggaaggccgtcagtgcccagataccagagtccggaaggccgcagtacctggggctgcgccccgccgcggccggagcgggtgcccccggccagcagctcccagagccaaggtcttcggacggcctaggcgtgggccgcgcctggagctgggcctggccgaccaaccacacgggggcgctggcccgggcaggggcagccggggcgttgcccgcgcagcgcaccaagaggaagccgtccatcaaggcggcgcgcgccaaaaagatcttcggctggggggacttctactttcgggtgcataccctcaagttttcgctgctggtgaccggcaagatcgtggaccatgtgaacggtaccttcagtgtgtatttccgccacaactcgtccagcctgggcaacctcagtgtcagcatcgtgccgccctccaagcgtgtcgagttcggaggagtctggctgcccgggcctgtcccccaccctctgcagtctacgctcgccctggagggggtgcttcctgggctggggcccccgctggggatggcagcagcagcggcggggcccgggcttgggggctccctcgggggcgcactggcggggccgcttgggggcgcgttgggagtgcctggggccaaagagtcacgcgctttcaattgccacgtggagtatgagaagacaaaccgcgcgcgcaagcaccgaccgtgcctgtacgacccgtcgcaggtgtgcttcaccgagcacacgcagagccaggccgcctggctctgtgccaagcccttcaaagtcatctgtatcttcgtctctttcctcagctttgactacaaactggtgcagaaggtgtgcccagactataacttccagagtgagcacccctacttcggatagcgcccctccccagccagtcctgagcctcccgccaaatcccagcctcactaggtgggacccccttcccagtgttctgccgctcctgtggccatgtcgcccactccttccactctgggggcggaggggaatggcttctcgggaccctcagctagcgtgggtgcccttttccttatgcggagtgcccgcaaggctggggtagccccctccagtacaccccaaagtgaaagggataagagtgcagccccagaataggcggggcttggaggcggtcccaatgtcccctgggtccacagtgggtccccttttcacccttggcgctaggctgcgcactccctttccccgcagctttaataactcctggcctggcaccctcaccccaccctgactttcccatcccccagcgcttgtcctgcttcaccctaccccgcctaagactgtaaaggcctaaaaacctcggcctgtcctcccaccattctgcctgccatatgcctgtccccttttcctccaaaccctattagggtaccggaagcagaacccctgggctgaggccctggccctgcccccggcccctgcccctgcccgcccccctccagtccaggcagtcgagctccacctgccctctcctgctgcttcctctcggtgatattttttctacgccaaaacagacgggaaagggaacaaaataaagtgaaatccaataca

SEQ ID NO: 158642 - DNA, 2007 bp, Homo sapiens
  Payload ID: 11041
  Gene Symbol: NXPH4
  Gene Name: neurexophilin 4
  ENST ID: ENST00000556415
  CDS Start-End: 142-252
ccgcgccgccgctcccgccgctcccgccgctcccgccgctcccgcagccgccccgccgcccgcccggagccccgcgtccctaggcctggctcccgcctgcccgagacccgcccagcctgccccgctcagccgccagagaagatgcggctgctcccggaatggttcctcttgctctttggcccgtggctccttaggaagcccaggcctggactgtcccttcctccggccagatcctgggagcaccctgcctgacccaggtggtaggggaaaagcaacgggccagcctggaggcccaggggaggtgcaccctgcaatgcggctggggggctgacagcctgatcctcccccaatcccagcagtgtcatccccaaagagccactccccgaagtggagtttgttgcccccagcagcaggaggccacctcaactccctgcaggccgtcagtgcccagataccagagtccggaaggccgcagtacctggggctgcgccccgccgcggccggagcgggtgcccccggccagcagctcccagagccaaggtcttcggacggcctaggcgtgggccgcgcctggagctgggcctggccgaccaaccacacgggggcgctggcccgggcaggggcagccggggcgttgcccgcgcagcgcaccaagaggaagccgtccatcaaggcggcgcgcgccaaaaagatcttcggctggggggacttctactttcgggtgcataccctcaagttttcgctgctggtgaccggcaagatcgtggaccatgtgaacggtaccttcagtgtgtatttccgccacaactcgtccagcctgggcaacctcagtgtcagcatcgtgccgccctccaagcgtgtcgagttcggaggagtctggctgcccgggcctgtcccccaccctctgcagtctacgctcgccctggagggggtgcttcctgggctggggcccccgctggggatggcagcagcagcggcggggcccgggcttgggggctccctcgggggcgcactggcggggccgcttgggggcgcgttgggagtgcctggggccaaagagtcacgcgctttcaattgccacgtggagtatgagaagacaaaccgcgcgcgcaagcaccgaccgtgcctgtacgacccgtcgcaggtgtgcttcaccgagcacacgcagagccaggccgcctggctctgtgccaagcccttcaaagtcatctgtatcttcgtctctttcctcagctttgactacaaactggtgcagaaggtgtgcccagactataacttccagagtgagcacccctacttcggatagcgcccctccccagccagtcctgagcctcccgccaaatcccagcctcactaggtgggacccccttcccagtgttctgccgctcctgtggccatgtcgcccactccttccactctgggggcggaggggaatggcttctcgggaccctcagctagcgtgggtgcccttttccttatgcggagtgcccgcaaggctggggtagccccctccagtacaccccaaagtgaaagggataagagtgcagccccagaataggcggggcttggaggcggtcccaatgtcccctgggtccacagtgggtccccttttcacccttggcgctaggctgcgcactccctttccccgcagctttaataactcctggcctggcaccctcaccccaccctgactttcccatcccccagcgcttgtcctgcttcaccctaccccgcctaagactgtaaaggcctaaaaacctcggcctgtcctcccaccattctgcctgccatatgcctgtccccttttcctccaaaccctattagggtaccggaagcagaacccctgggctgaggccctggccctgcccccggcccctgcccctgcccgcccccctccagtccaggcagtcgagctccacctgccctctcctgctgcttcctctcggtgatattttttctacgccaaaacagacgggaaagggaacaaaataaagtgaaatccaatac

SEQ ID NO: 158643 - DNA, 1888 bp, Homo sapiens
  Payload ID: 11042
  Gene Symbol: NXPE1
  Gene Name: neurexophilin and PC-esterase domain family, member 1
  Uniprot ID: Q8N323
  ENST ID: ENST00000251921
  CDS Start-End: 418-1635
gccagttaagaactcacaggtacttttccagccacccagataggagagatcattaaaacagtgcattctgtgctacctgacacctattggctttggtctgctctaaacttatccatctctgtccattactggaacaactccgcaaagtccttattccctaaaacatcactgataccattaaagccactaacagagactgaactcagaataaaggaaatcatagagaaactagatcagcagatcccacccagacctttcacccatgtgaacaccaccaccagtgccacacacagcacagccaccatcctcaaccctcgagatacatactgcaggggagaccagctggacatcctactggaggtgagggaccacttgggacagaggaagcaatatggtggggatttcctgagggccaggatgtcctccccagcactgacggcaggtgcttcaggaaaggtgatggacttcaacaatggcacctacctggtcagcttcactctgttctgggagggccaggtctccctgtctctgctgctcatccaccccagtgaaggggcgtcggctctctggagggcaaggaaccaaggctatgataaaattattttcaaaggcaaatttgttaatggcacctctcatgtcttcactgaatgtggcctgaccctaaactcaaatgctgaactctgtgaatatctggatgacagagaccaagaagccttctattgtatgaagcctcaacacatgccctgtgaggctctgacctacatgaccacccggaatagagaggtatcttatcttacagacaaggaaaacagccttttccacaggtccaaagtgggagttgaaatgatgaaggatcgtaaacacattgatgtcactaattgtaacaagagagaaaaaatagaagagacatgccaagttggaatgaagcctcctgtccctggtggttatactttacaaggaaaatggataacaacattttgcaaccaggttcagttagacacaattaagataaatggctgtttgaaaggcaaactcatttacctcctgggagactctacactacgtcagtggatctactacttccccaaagttgtaaaaacactgaagttttttgatcttcatgaaactggaatctttaagaaacatttgcttctggatgcagaaagacacactcagattcaatggaaaaaacatagctatcccttcgtcactttccagctctactctctgatagatcatgattatatccctcgggaaattgaccggctatcaggtgacaaaaacacagccatcgtcatcacctttggccagcactttagaccatttcccattgacatttttattcgcagggccatcggtgttcaaaaggctattgaaagactgttcctaagaagcccagccactaaagtgattattaagacagaaaacatcagggagatgcacatagagacagagaggtttggagacttccatggttatattcactatcttatcatgaaggatattttcaaagacctcaacgtgggcatcattgatgcctgggacatgaccattgcatatggcactgacactatccacccacctgatcatgtgattggaaatcagattaacatgttcttaaactacatttgctaagggataaatactatacaaaatcactaggaaccaatctctgcacataatcccacatgtattgtaaagtaagttttactcattttaggaactaaggaaaataaatttaaaagaatctgtttggggaggaaggctatgtaaggacaatgacaactgataagggatgcaaaaccaagagaatcattcatgaagaatgactataccatgcctggttctgatgctcgtttaaaatattaaaaaagttttttaaaagcca

SEQ ID NO: 158644 - DNA, 1896 bp, Homo sapiens
  Payload ID: 11042
  Gene Symbol: NXPE1
  Gene Name: neurexophilin and PC-esterase domain family, member 1
  Uniprot ID: Q8N323
  ENST ID: ENST00000424269
  CDS Start-End: 1-1644
atgtcctcaaatacaatgcttcaaaaaacgctgctgatcttgatctctttttcagtagtaacctggatgatttttataatttctcagaacttcacaaagctttggtctgctctaaacttatccatctctgtccattactggaacaactccgcaaagtccttattccctaaaacatcactgataccattaaagccactaacagagactgaactcagaataaaggaaatcatagagaaactagatcagcagatcccacccagacctttcacccatgtgaacaccaccaccagtgccacacacagcacagccaccatcctcaaccctcgagatacatactgcaggggagaccagctggacatcctactggaggtgagggaccacttgggacagaggaagcaatatggtggggatttcctgagggccaggatgtcctccccagcactgacggcaggtgcttcaggaaaggtgatggacttcaacaatggcacctacctggtcagcttcactctgttctgggagggccaggtctccctgtctctgctgctcatccaccccagtgaaggggcgtcggctctctggagggcaaggaaccaaggctatgataaaattattttcaaaggcaaatttgttaatggcacctctcatgtcttcactgaatgtggcctgaccctaaactcaaatgctgaactctgtgaatatctggatgacagagaccaagaagccttctattgtatgaagcctcaacacatgccctgtgaggctctgacctacatgaccacccggaatagagaggtatcttatcttacagacaaggaaaacagccttttccacaggtccaaagtgggagttgaaatgatgaaggatcgtaaacacattgatgtcactaattgtaacaagagagaaaaaatagaagagacatgccaagttggaatgaagcctcctgtccctggtggttatactttacaaggaaaatggataacaacattttgcaaccaggttcagttagacacaattaagataaatggctgtttgaaaggcaaactcatttacctcctgggagactctacactacgtcagtggatctactacttccccaaagttgtaaaaacactgaagttttttgatcttcatgaaactggaatctttaagaaacatttgcttctggatgcagaaagacacactcagattcaatggaaaaaacatagctatcccttcgtcactttccagctctactctctgatagatcatgattatatccctcgggaaattgaccggctatcaggtgacaaaaacacagccatcgtcatcacctttggccagcactttagaccatttcccattgacatttttattcgcagggccatcggtgttcaaaaggctattgaaagactgttcctaagaagcccagccactaaagtgattattaagacagaaaacatcagggagatgcacatagagacagagaggtttggagacttccatggttatattcactatcttatcatgaaggatattttcaaagacctcaacgtgggcatcattgatgcctgggacatgaccattgcatatggcactgacactatccacccacctgatcatgtgattggaaatcagattaacatgttcttaaactacatttgctaagggataaatactatacaaaatcactaggaaccaatctctgcacataatcccacatgtattgtaaagtaagttttactcattttaggaactaaggaaaataaatttaaaagaatctgtttggggaggaaggctatgtaaggacaatgacaactgataagggatgcaaaaccaagagaatcattcatgaagaatgactataccatgcctggttctgatgctcgtttaaaatattaaaaaagttttttaaaagcc

SEQ ID NO: 158645 - DNA, 495 bp, Homo sapiens
  Payload ID: 11042
  Gene Symbol: NXPE1
  Gene Name: neurexophilin and PC-esterase domain family, member 1
  ENST ID: ENST00000534921
  CDS Start-End: 309-495
cagacaaggaacaaaaacattttacacagccacaagagccagttaagaactcacaggtacttttccagccacccagataggagagatcattaaaacagtgcattctgtgctacctgacacctattggtatctaaattgctctgcgcatccagattcaaaacacagaactttttggattccacaaaacgaaaccactcacacaaaacctttcacacaattgagacttcactgaggatttgggtcctggaaggaggaagcaacaatcctgagtgaaacctcgacaagaagtatccaataggacattcgtcatgtcctcaaatacaatgcttcaaaaaacgctgctgatcttgatctctttttcagtagtaacctggatgatttttataatttctcagaacttcacaaagctttggtctgctctaaacttatccatctctgtccattactggaacaactccgcaaagtccttattccctaaaacatcactgataccat

SEQ ID NO: 158646 - DNA, 543 bp, Homo sapiens
  Payload ID: 11042
  Gene Symbol: NXPE1
  Gene Name: neurexophilin and PC-esterase domain family, member 1
  ENST ID: ENST00000539878
  CDS Start-End: 179-543
tcatcacctctgtggtctaagctaggctgctgccccctctcatttacacaagtaggaagaggaaagagaacctggaggagtgcattctgtgctacctgacacctattggggtcctggaaggaggaagcaacaatcctgagtgaaacctcgacaagaagtatccaataggacattcgtcatgtcctcaaatacaatgcttcaaaaaacgctgctgatcttgatctctttttcagtagtaacctggatgatttttataatttctcagaacttcacaaagctttggtctgctctaaacttatccatctctgtccattactggaacaactccgcaaagtccttattccctaaaacatcactgataccattaaagccactaacagagactgaactcagaataaaggaaatcatagagaaactagatcagcagatcccacccagacctttcacccatgtgaacaccaccaccagtgccacacacagcacagccaccatcctcaaccctcgagatacatactgcaggggagaccagctggacatcctact

SEQ ID NO: 158647 - DNA, 2006 bp, Homo sapiens
  Payload ID: 11042
  Gene Symbol: NXPE1
  Gene Name: neurexophilin and PC-esterase domain family, member 1
  ENST ID: ENST00000536312
  CDS Start-End: 894-1781
aggctgctgccccctctcatttacacaagtaggaagaggaaagagaacctggaggaggtatggcacacatggcctctgcttacatatcagagaactcagtgtcctggccacagtcaaatacaatagaggccaggaaaggttgtgtatctcggctaacacatgtccagctacaagtttctattacagctgatgaaagagacaactagcgggctctgtacattgattcaatcctgtctgaggatgaccatatagaagcataaggagaggagacaagtgagtcagatagtggccaagtttctgatttgggataccattcacaaagatggggagaagaaaaagtagaagacatttggaagaagaaaaaacattgcaattggacaagttgactttgagattcctatgagcaggggtatactgacaaacctgctctcccagaaaacaaaaacaaaaatcctgtttatagcctttgatgacttccacgatctaaatgtacccatcatggcctatttcaagctaccaagatgatgtcactgaatgagcagttggaaagaaatgtgcatgaataggctttcataagccagcaaaggctgggttcagctcacctctaccagtgaggatttccaaatggaggcatcttaaagacactgggatatgcagagctcaagctaaggagtagaatctagtgcattctgtgctacctgacacctattggtatctaaattgctctgcgcatccagattcaaaacacagaactttttggattccacaaaacgaaaccactcacacaaaacctttcacacaattgagacttcactgaggatttgggtcctggaaggaggaagcaacaatcctgagtgaaacctcgacaagaagtatccaataggacattcgtcatgtcctcaaatacaatgcttcaaaaaacgctgctgatcttgatctctttttcagtagtaacctggatgatttttataatttctcagaacttcacaaagctttggtctgctctaaacttatccatctctgtccattactggaacaactccgcaaagtccttattccctaaaacatcactgataccattaaagccactaacagagactgaactcagaataaaggaaatcatagagaaactagatcagcagatcccacccagacctttcacccatgtgaacaccaccaccagtgccacacacagcacagccaccatcctcaaccctcgagatacatactgcaggggagaccagctggacatcctactggaggtgagggaccacttgggacagaggaagcaatatggtggggatttcctgagggccaggatgtcctccccagcactgacggcaggtgcttcaggaaaggtgatggacttcaacaatggcacctacctggtcagcttcactctgttctgggagggccaggtctccctgtctctgctgctcatccaccccagtgaaggggcgtcggctctctggagggcaaggaaccaaggctatgataaaattattttcaaaggcaaatttgttaatggcacctctcatgtcttcactgaatgtggcctgaccctaaactcaaatgctgaactctgtgaatatctggatgacagagaccaagaagccttctattgtatgaagcctcaacacatgccctgtgaggctctgacctacatgaccacccggaatagagaggtatcttatcttacagacaaggaaaacagccttttccacaggatggcacctggagagacatctatagcaggaaatcaggtccaaagtgggagttgaaatgatgaaggatcgtaaacacattgatgtcactaattgtaacacaaagtcatcatggacttcttcaataggccaatggggtgagcatattgtggaatgcagcagaggataagcctagaaagagaggaagaacctaatcatgaaggttctcaagtgtcatgctgaggatttcagtgattattcagtagacttgaaagccacagaaaccaactgaggaagagagtg

SEQ ID NO: 158648 - DNA, 2289 bp, Homo sapiens
  Payload ID: 11042
  Gene Symbol: NXPE1
  Gene Name: neurexophilin and PC-esterase domain family, member 1
  ENST ID: ENST00000536271
  CDS Start-End: 1245-2036
aggccaaagtttgcattttcactatattgtcccattcagtcatgtgttttgctataaccgttcttctatgtgttcacagatgttccactgaaaaaaagattccttgataagtgtatgataacatccatgctccttcacctcccatatcatattttgttaattttgccccttaaatatctttgcgttgatccatttccccccacgcacagtgctgctattcaagttcagaccatcatcatcttatctagattacccataccagcttcccaactggtctctctcccagcagtcataccctctctaatccattctctacactgagtgatctttctaaaaagccaattcctactggttttctccagttgatcccatgatcagatattcctcagtatatacctctcagggtggaggagtccttcttactcctcatgttgtgacctagtgattcctgcaaacccctggttcaacaggcctccacaaactgggatggaagcatgtttcctctatcaatcatggctgtggcaatgccatgcttttctcccccgactcacagaggctcacttcctggtttccctgttatccactaacctgaaaaccactttgttgattagaatgaaacatcagggttccttcatgggctactttgaggatttgcaaaggataactatctgttatcacaaatcccagaactgtgagccaagccctaagacttctatcagttccagagacttttgctcatttgctaactttgcataagtctcagaggctcagtccatttccttttctctttcaattctgccagtacccttttattttcccccacgaagatttatttttcctcagcttggtgacagagtagaatgctaggttcacagaaatccctttctagcagttttcaaagtcaagtttagagtcttttttccataagctttcaaaaaaaatatgctaagagtaggcaccaaacatgacaaaataacatgcattccagaatcttacctcattatccaagttttggctcctgatctatagtccctggctcccttctgaaaagtaaaagcacagttaagtttctgttccctcccttttatctctgatggtacatctcatcaaatctcttcctacccatcaaccatccttatgcctaaatcctagtaaggatgaaaacatgctgatcctttctcttctcaggatggcacctggagagacatctatagcaggaaatcaggtccaaagtgggagttgaaatgatgaaggatcgtaaacacattgatgtcactaattgtaacaagagagaaaaaatagaagagacatgccaagttggaatgaagcctcctgtccctggtggttatactttacaaggaaaatggataacaacattttgcaaccaggttcagttagacacaattaagataaatggctgtttgaaaggcaaactcatttacctcctgggagactctacactacgtcagtggatctactacttccccaaagttgtaaaaacactgaagttttttgatcttcatgaaactggaatctttaagaaacatttgcttctggatgcagaaagacacactcagattcaatggaaaaaacatagctatcccttcgtcactttccagctctactctctgatagatcatgattatatccctcgggaaattgaccggctatcaggtgacaaaaacacagccatcgtcatcacctttggccagcactttagaccatttcccattgacatttttattcgcagggccatcggtgttcaaaaggctattgaaagactgttcctaagaagcccagccactaaagtgattattaagacagaaaacatcagggagatgcacatagagacagagaggtttggagacttccatggttatattcactatcttatcatgaaggatattttcaaagacctcaacgtgggcatcattgatgcctgggacatgaccattgcatatggcactgacactatccacccacctgatcatgtgattggaaatcagattaacatgttcttaaactacatttgctaagggataaatactatacaaaatcactaggaaccaatctctgcacataatcccacatgtattgtaaagtaagttttactcattttaggaactaaggaaaataaatttaaaagaatctgtttggggaggaaggctatgtaaggacaatgacaactgataagggatgcaaaaccaagagaatcattcatgaagaatgactataccatgcctggttctgatgctcgtttaaaatattaaaaaagttttttaaaagcca

SEQ ID NO: 158649 - DNA, 1873 bp, Homo sapiens
  Payload ID: 11043
  Gene Symbol: NXPE2
  Gene Name: neurexophilin and PC-esterase domain family, member 2
  Uniprot ID: Q96DL1
  ENST ID: ENST00000389586
  CDS Start-End: 191-1870
gtgggttgggcaggaacagatcataataagggaggtttatgattccagctggcacgctgtggccacaaataggatgtcagcttttgatcaatgaagctcatagggaaactccaaccctaagataaatgcaaagactgctttaatcaaggagagtctctggacactataattcctgtgagaacacgagaagatggtggagaaaatactcatccataggatactcactttgtttccaaatgccatagctcgaaaattactgctgatgttgacatttatcttaattttctggatcatttacttggcttcaaaagaccacacaaagttctcgttcaacttggaaaaccatattatcctgaaccaagggaacatcttcaaaaaatattcacactctgaaacaccactgtgtccagcagtttcaccaaaagagactgaacttagaataaaggacattatggagaaactagaccagcagatcccacccagacctttcacccatgtgaataccaccaccagtgccacacacagcacagccaccatcctcaaccctcaagatacgtactgcaggggggatcagctggacatccttctggaggtgagggaccacttgggacacaggaagcaatatggtggggatttcctgagggccaggatgtactccacagcactaatggcaggtgcttcaggaaaggtgactgacttcaacaacggcacctacctggtcagcttcactctgttctgggagggccaggtttccctgtctctgctgctcatccaccccagtgaaggggtatcagctctctggagggcaaggaaccaaggatgtgataggatcatcttcactggcctgtttgccaacagaagctccaatgtcttcactgaatgtggcctgaccctaaacacaaatgctgaactgtgccagtacatggatgacagagaccaagaagccttctactgtgtgaggcctcaacatatgccctgtgaggccttgacccacatgaccactaggacaagaaatatttcctatcttagcaaggaagaatggaggcttttccacaggtccaacataggagttgaaatgatgaagaactttacccccattgaggtcataccatgcaacaagagcgagaacataaaaaagaactgccagattggaatgaagactcctttccccagtggttatactttgaaaaaaatgtggattacagcattttgtaaacagatcaagttcaatgaaacaaaaaatataaatgactgcttggaaagaaaacttatttatctcatgggagattcaacactgcatcagtggatttactacttacaaaaagctgtgaaaaccctaaaatattttgatcatcatggagctgggatctttaaaacacatgttcttctggatgttgaaagacatattttgattcagtggaaaaaacatggtcatccatttgttaccaaaaaattattctcagtgaaagatgaaaactatatcccacgggaaattgaccaggtagcaggagacaaaaacacagccattgtcattaccctcggccaacacttcagaccctttcccatcaacattttcatccgtagggccatcaatattcaaaaggccattgaacgtctattcttgcgaagcccggagaccaaggtgatacttaaaactgaaaacaccagagagatagaacaaaatgcagagatgttcagtgactttcatggctatattcagaatcttatcataagagatatttttgtggatcttaatgtgggtattattgatgcctgggacatgacgattgcatattgcaccaacaatgcccatccaccggattatgtgattcaaaatcagattggcatgttcttaaactacatttgttagagg

SEQ ID NO: 158650 - DNA, 3941 bp, Homo sapiens
  Payload ID: 11044
  Gene Symbol: NXPE3
  Gene Name: neurexophilin and PC-esterase domain family, member 3
  Uniprot ID: Q969Y0
  ENST ID: ENST00000273347
  CDS Start-End: 593-2272
aggaagcggggggctagcggcctggcgctgcggcgaccgaccggggcgtcaggatccctggcccccggagagcgaagggcgggcgggtcccggagcaagaagaattgtatagaaatgtaaaaaacatttatgtgtgcttcacatgtggcatgaaaaaaatgaggacctctggtcaaaattgcctgagttcagaatttcatgctggaaggaaagttagacgtaacttctaatttctagttccagtaagcatctcttcttggaaaatttccaaaaaagagtcctgctctgttgcccaggctggagtacattggtgtgatgatcatggttcactgcagcctcgacctcccaggctcaagcaattctcctacctcagcctcctgagtaactgggactataggatttctttgaagaaaaatgtgcttcttgaatcaactgcagtctctcctctgcataagagctcttaagggtactagcaggatagaagcaaatgaaactgaaagctcatctgcagctcagaaaagcaaagacatggaattttaaagagtgaaggtagcatggtgtcggccatgggtgaacaagacacagccagacaatgtggaccaatttcttcaaactacggcttttctgctgtctgcttgcagtgttgatggtggtggtgctggtcatcaatgttactcaggtagagtacttggaccatgagactgtttcagccactttcatcgacagcagtggacagtttgtttcctcccaggtgacaggaattagccgaaatccctactgtggctatgatcagcagaccctgtccagccaggagcgcatggaggaggactccttgctggctgccttgcaccggcaggttcctgatgtgggcccagtcccctttgtgaagagcactgacccttcttccagctactttgtcatcttgaactctgctgccttctttaaggtgggaagccagcttgaggtgctggttcatgtgcaggattttcaaagaaagcccaagaagtatggtggagactacctgcaggccagaattcactccctcaagctgcaggctggggctgtgggcagggtggtggattaccagaatgggttttacaaggttttctttactttgctatggccaggcaaagttaaagtatccgtatctctggtccaccccagtgaagggatcagagttcttcagcgcttacaggaagataaaccagacagggtctatttcaagagtctcttccgttcaggaagaatttctgaaactactgagtgcaacgtgtgtcttcctgggaatctgcccctgtgtaactttacagacctctacactggggagccctggttctgcttcaaaccaaagaagctcccttgcagcagcagaattacccatttcaaaggtggatacctgaaaggtctcctaaccgctgcagagagtgctttcttccagagtggtgtcaatatcaaaatgccagtcaactccagtggacctgattgggtaactgtgattcccaggagaataaaagaaactaacagtctagaactatctcaaggctcaggaacttttccttctgggtattattataaagaccagtggaggcccagaaagtttaagatgcgtcagtttaatgaccctgacaacattacagagtgcttacaaagaaaagtggtgcatttatttggtgactcaacaatcaggcaatggtttgaataccttactacatttgttccagatttagtggagtttaacttgggtagtcccaagaatgtgggtcccttccttgcagtggaccagaagcacaacatcctgctcaaataccgctgccatggtccacccatccgcttcacgactgtctttagcaatgagctccattatgtggcgaatgagctgaatggcattgtgggagggaagaacacagtggttgccatagctgtatggtctcacttcagcaccttccctttggaagtgtacatccggcggctcaggaacatccgtcgagcagtggttcggctcctcgatcgaagcccaaagaccgtggtggtcatccggacggccaacgcccaagagctgggacctgaggtgagccttttcaacagcgactggtacaactttcagctggacaccatccttcggaggatgttctcaggggttggagtatatctcgtcgatgcctgggagatgaccctggcccattatctaccgcacaagctgcatccagatgaagttattgtgaagaaccagctggacatgttcttgtcctttgtgtgccccttggaaacctagcctgtcttggaagggactggaggaatcatattcaatgaccttctcaattgacctgagttacagaaagtggccccagtgagagatgactgcccttaataagtataaaatttcaaaaagatctggacttaatatgatgacttataaggagcttagaaaatgcaggttacatttatatctacctataggattttatccaatgttgacttagccatggtagaactcttaactgcatctacacactatattgctcttgtaaccaaagatgctaatgagtgtatttgaattagcttctcctaggaggggtgactactttgctaaagagtatgaaaaatgttttgatggaagggacaagtttggttggtagtagagtgtttgtagcttatctggtaaaggaaattgagtgcatctgcatgcatagcacaagtaatccatcttctggcggttaactagagaaagcttatagtcagaggctcttgtgaatgcactgaagactgctgtgtctcaggagtttctcttgatgatctaccttttctgaattacttgaaaaggccaatgtgcttggttcgagttttttagtgaatatttacaatttcctgcttttatctagaaaagaagcaaaagggaaatatgaaagcagtatatataaaatctgtgctttggaattgatatttgcatttggtgattgttttttatttgattcagctaaattttatgtgttgaatacttactctagaataactacttttggaactggaagggggaaatctgtaaatggaaatttatttttatgttctgaaatttgagggtttaggaattgacttttgtgtaaagaatgctacgatattataaagctgtggaagttttttccactagtttcaggtgtttttttttttgttgttgttgttgttattttgaactacttaccaaaattagaagttaaaatctaattagaaattaataagatactaaaattcatgacagttttttgtttgtttgtttgtttgttttttggtatttcttgatttgggcataaaaggcacacccattctctcatgcttggaagaagctgctattcctactggctatctaagaagaatggaattattaattttatttgacttattaattttaaacgagtttaatttgggatcatttagtaagtactcttttctttttgagctgtgatagattatagtctagtttaagttgctcctaagtagacagatgaagaaactagggaggctttagagaggaagacagatgcttgaagtatgaacaatatatacccttagaagaatgggtcaaataatttgggtttttaatttaaaataggagggccccagatcttactttcctgtccttgaggaacaccttcaagtttttaaagtattttagggggaaagaagatttttaattgtttctgagcctaatgaggtaataaaatatattaaaatagtttaattttaatggtccttacgctttacagtacctaaggatcacttgtagtatctgacaaaaatgcagaattaaagagtcatggcagggtgtggtagctcaagcctgtaatcccagcactttgggaggccaggcaggaggattgcttgaggccaggagtttgagaccagcctgggcaacatagtaagacctcatctctacaaaaaataaaaaa

SEQ ID NO: 158651 - DNA, 8152 bp, Homo sapiens
  Payload ID: 11044
  Gene Symbol: NXPE3
  Gene Name: neurexophilin and PC-esterase domain family, member 3
  Uniprot ID: Q969Y0
  ENST ID: ENST00000422132
  CDS Start-End: 198-1877
aggatttctttgaagaaaaatgtgcttcttgaatcaactgcagtctctcctctgcataagagctcttaagggtactagcaggatagaagcaaatgaaactgaaagctcatctgcagctcagaaaagcaaagacatggaattttaaagagtgaaggtagcatggtgtcggccatgggtgaacaagacacagccagacaatgtggaccaatttcttcaaactacggcttttctgctgtctgcttgcagtgttgatggtggtggtgctggtcatcaatgttactcaggtagagtacttggaccatgagactgtttcagccactttcatcgacagcagtggacagtttgtttcctcccaggtgacaggaattagccgaaatccctactgtggctatgatcagcagaccctgtccagccaggagcgcatggaggaggactccttgctggctgccttgcaccggcaggttcctgatgtgggcccagtcccctttgtgaagagcactgacccttcttccagctactttgtcatcttgaactctgctgccttctttaaggtgggaagccagcttgaggtgctggttcatgtgcaggattttcaaagaaagcccaagaagtatggtggagactacctgcaggccagaattcactccctcaagctgcaggctggggctgtgggcagggtggtggattaccagaatgggttttacaaggttttctttactttgctatggccaggcaaagttaaagtatccgtatctctggtccaccccagtgaagggatcagagttcttcagcgcttacaggaagataaaccagacagggtctatttcaagagtctcttccgttcaggaagaatttctgaaactactgagtgcaacgtgtgtcttcctgggaatctgcccctgtgtaactttacagacctctacactggggagccctggttctgcttcaaaccaaagaagctcccttgcagcagcagaattacccatttcaaaggtggatacctgaaaggtctcctaaccgctgcagagagtgctttcttccagagtggtgtcaatatcaaaatgccagtcaactccagtggacctgattgggtaactgtgattcccaggagaataaaagaaactaacagtctagaactatctcaaggctcaggaacttttccttctgggtattattataaagaccagtggaggcccagaaagtttaagatgcgtcagtttaatgaccctgacaacattacagagtgcttacaaagaaaagtggtgcatttatttggtgactcaacaatcaggcaatggtttgaataccttactacatttgttccagatttagtggagtttaacttgggtagtcccaagaatgtgggtcccttccttgcagtggaccagaagcacaacatcctgctcaaataccgctgccatggtccacccatccgcttcacgactgtctttagcaatgagctccattatgtggcgaatgagctgaatggcattgtgggagggaagaacacagtggttgccatagctgtatggtctcacttcagcaccttccctttggaagtgtacatccggcggctcaggaacatccgtcgagcagtggttcggctcctcgatcgaagcccaaagaccgtggtggtcatccggacggccaacgcccaagagctgggacctgaggtgagccttttcaacagcgactggtacaactttcagctggacaccatccttcggaggatgttctcaggggttggagtatatctcgtcgatgcctgggagatgaccctggcccattatctaccgcacaagctgcatccagatgaagttattgtgaagaaccagctggacatgttcttgtcctttgtgtgccccttggaaacctagcctgtcttggaagggactggaggaatcatattcaatgaccttctcaattgacctgagttacagaaagtggccccagtgagagatgactgcccttaataagtataaaatttcaaaaagatctggacttaatatgatgacttataaggagcttagaaaatgcaggttacatttatatctacctataggattttatccaatgttgacttagccatggtagaactcttaactgcatctacacactatattgctcttgtaaccaaagatgctaatgagtgtatttgaattagcttctcctaggaggggtgactactttgctaaagagtatgaaaaatgttttgatggaagggacaagtttggttggtagtagagtgtttgtagcttatctggtaaaggaaattgagtgcatctgcatgcatagcacaagtaatccatcttctggcggttaactagagaaagcttatagtcagaggctcttgtgaatgcactgaagactgctgtgtctcaggagtttctcttgatgatctaccttttctgaattacttgaaaaggccaatgtgcttggttcgagttttttagtgaatatttacaatttcctgcttttatctagaaaagaagcaaaagggaaatatgaaagcagtatatataaaatctgtgctttggaattgatatttgcatttggtgattgttttttatttgattcagctaaattttatgtgttgaatacttactctagaataactacttttggaactggaagggggaaatctgtaaatggaaatttatttttatgttctgaaatttgagggtttaggaattgacttttgtgtaaagaatgctacgatattataaagctgtggaagttttttccactagtttcaggtgtttttttttttgttgttgttgttgttattttgaactacttaccaaaattagaagttaaaatctaattagaaattaataagatactaaaattcatgacagttttttgtttgtttgtttgtttgttttttggtatttcttgatttgggcataaaaggcacacccattctctcatgcttggaagaagctgctattcctactggctatctaagaagaatggaattattaattttatttgacttattaattttaaacgagtttaatttgggatcatttagtaagtactcttttctttttgagctgtgatagattatagtctagtttaagttgctcctaagtagacagatgaagaaactagggaggctttagagaggaagacagatgcttgaagtatgaacaatatatacccttagaagaatgggtcaaataatttgggtttttaatttaaaataggagggccccagatcttactttcctgtccttgaggaacaccttcaagtttttaaagtattttagggggaaagaagatttttaattgtttctgagcctaatgaggtaataaaatatattaaaatagtttaattttaatggtccttacgctttacagtacctaaggatcacttgtagtatctgacaaaaatgcagaattaaagagtcatggcagggtgtggtagctcaagcctgtaatcccagcactttgggaggccaggcaggaggattgcttgaggccaggagtttgagaccagcctgggcaacatagtaagacctcatctctacaaaaaataaaaaattatccaggtgtgggccgacagtcccagctactagggaggctaaggcagggtgattgattgagcccagtagtttgaggctgcagtgagttatgattgcgccactacactcccacttgggcaacagacaagagatcttatctctaaaaaatttttgttaaataataaaagaattaaggccagggatgttggctcacatctgtaatcccagcagggattatagtctcgggaggctgaggtgggcggattgcttgagcccggaaggtcaagaccagcctgggtgccatggtgaaaccccatctctacaaaaaaatacaaaaactagctgggtgtggtggcaccacctgtagtccccgctacttaggaggctgaggtgggaggattgcttgagcccaggaggcagaaggttgcagaggttgcagtgagccttgattgtgccactgtactccagtctgggcaacagggcaagaccctgtctctaaaaaaaaaaaaaaaaaaaaaagagggaccatgatgcctctgggatttatgaaaccaacctttgtggcgagtgctcagtgattctgatgcaatggtggtattccacactgtgagaaacactaagagaagaggtaagatagaatgagggaataaacatggcttgtttattattttgggggatttaccaataactggtttaattctgttcatgatccaatagtattggtgatattagctccattttatagatgaggaactcatgtttagatctgaaataaggtatgtgagagtccatatctcttttcagctaaacttgtgagactttcgtaaagaagcgtttgtatttatttatttgtttttgagacagggtcttgctcttttgcccaggctggagtgcagtggcatgatatggctcactgcagccttgacttcctgggctcaagggatccttctgcctcagcctcctgagtagctgggactacaggtatgtaccaccatgcccagctaatttttgtatctttttgtagagactacattttgccatgttgtccaggctggtcttaaactcctgagctcaagcatctgcccacctcagcttcccaaagtgctgggattacaggtgtgagccactgtgcccagctgagagtttttcttgtcgtgaaagaacttgacatttcctcaaggatttataaaggaggctgaggagtaattttcccaggagaattttaaaaagaaagcgggcattgctcctccagtggtttggaatgatgccacttgattgtgcaaatgatttcttatgatcttgtctggttttctgttattttttgatttggtgacatagctctcaaagatttggtgacacagcttcttgagtcactttcatctctcttaaaaaaattttttttttaacaacttttaagttcaggggtacatgtgccagtttgtttcataggtaaacttacgtcatgggggtttgttgtatagatgatttcatcacccaggtgttaagcctagtacccattagtaatttttcctgatcctctccctcctcctaccctccaccctccaatagaccccagtgtgtgttgttgccctttatgtgtccatgtgttctcatcatttagctctcacttatcagtgagaacaactttcatcccacatctaatttgtctttcttcactctggtgtggaaattttgatagagattccaatatcacttaaacgtttcccagaatatttagatagaataatttagtttcttctgaaaagtttattttaggctagtgccacatggttgtgaatattagcatggtagccaaataatagtttgtttaaatgtatatttcccaatataaatataaggggcatcataatttttaaaaactataaaatctagaagaaaaatctatggataaaatccataattctatcatctgaatgcaatgaacattagcatttaggtatattttcttgcaggttttttaaccatatacttatagagaatatgtaatttgggtctgtgttttttacatataaatatttttctatgttaaatagtcttcataagttaattataaagatctgcttaatagttctgctactgcagttttcattattagataagttggtcattatagttggacatttaggtttacaatattaaagcagtggtttatatcaatttcagtggtttaaaatatgaatttctattttggaatgaaagtattaatttaatgtagtgaatctcatattccagaactgagatgattgatttgatgctatttgtgacagacagaacccataataaagcctttctatgcaagttacattttatagaattatcctactaaaagtaacctttcttcagcgaatgcaaaacagacctttggtgttccagtatgattcattttgccattctgaacaactatcattttaattaagaccatttaactgacacttcctggattcagttattaagtttcagattgaaacttgatccagtttaataactgaatccagtttcacatttatcaatctgaaaacttagtttgcagattggtaaatcagggtacttgacaagaataaatatggtacgcctttatatattcatgtgttacatgccagaaatgagtctgtttctggaccctgttcaaggaaatagtgatgactgagagaggtacagggaaataaacacccaagggaaacaacagaaataagcctccccaactttctaaaaaactgctcagcattatctctgtggattctgggtaaattcagctttttaacatcagctagtcactaatgccagaaattccacttcaagtgtatttattttcttgtgttaagcattattctacctggtttatgtctacaatgtagtattagtgtacttaggattcttgacacctcagtgtgcaataaataaaattttgaagttgttgtttttcatttgaaggtgagaccacagcccctgagtgctaaggggacctgggaatcctaggggaatggaggtggtggacgataagaggatggttgagggcaggagtttaaaggacacagaagctaggagagcagaaaatgtactccaccaccttctgtctaacttgtctcttaaaagtgcttttacattttaactttttaaaaaaatgtgggccgggcatagtggctcatgcctgtaatcccagcactttgggaggccgaggtgggcggatcacctgaggtcaagagttcaagaccagcctgaccaatatgatgaaaccccatctctactaaaaatacaaaaatagccaggtgtggtggcacatgcctgtcatcccagctactcaggaggctgaggtgggagaatcgcttgaacccgggaggtggaggttgcagtgagccgagatcatgccattgcactctagcctgggcaacgagagtgaaactctgtctcaataaataaataaataaataaaaaataaaaaagtgtgaacttaaatatatttatatgtgtgtacatatattttcttttttaatattctggttaaatgagaggccatcgggcctctttttaagagtctaatgatgtgtatatctaatgcccattccagctggattgtaacactgcttggggaagataacttaaaaaaaagtagtaccgagattacagcagctagtgtcctaaatggaaaagaagtgaaactaaatgtcataggagaaatcctttcagttttgtgcagtggttcatttgctgttaaatctaccccattaccattccccttactccttgaaaataaagtgatcttcatgttacaggaccattgctttatttatgtcacagatttcttgtcctttaattagtcagtgaaggcacatgattgcgatactactttttgattgccgtattgtaaaagctatatggtaaaaggtaactccctccacccgcccactgcaccctcacgtttaggggccacacagaaaaagcgaaataagatgaggtgaatctaatgagaaggcaactctaatgcccatcaggagattcactaggacattttaaaaggacgtctttaaggaaaaagttttgtttgtagatgttgcctctgattcctccctgcggctccagtccaggtcttggagccggccctcgaggggaatgtccgggactcgggtcggtacctttttggtctgggaatttccagtgtgcagaaaaaaaatccacaaatctaggcctcgctgccccctccctgcctcctctggccctcctcagtgcccacgcaacccggttcgaaagagaggatgaccgtattctgcattttagaaaacaggctcttagcttcccccgcccccgtcctcactagagtggagaactgaaagcgaacgctataaagggcgccagtgagaggggctggcctcctcttgccacgaggtcagacggcgagttcttagagaaaaaggctgcttagctgctgcttatcatgtaacctcaaaaggaaactgatcgtctttctcatgctgtcacgtacttgggttattatcgctgattacagctggaaacaattgatttgctcttacgtatttgtgtgacttgactcttcaaacacaaaggtatatttttattatctgatattttattaaaatatcttaaatggt

SEQ ID NO: 158652 - DNA, 8074 bp, Homo sapiens
  Payload ID: 11044
  Gene Symbol: NXPE3
  Gene Name: neurexophilin and PC-esterase domain family, member 3
  Uniprot ID: Q969Y0
  ENST ID: ENST00000491511
  CDS Start-End: 957-2636
atctgctcccgagtccccagccccgtgctgataggtgcagcccctggagtcgtggctgtgggcataggtgccagggaggggaggcccgggtcgaaggcataggcagaattggagccctgggttgccaaagcgtcgcagctaagaagccggagcccaggctagtaccggcggggcggggcggggcggggccgggagcgagcatctccatcctcagtttcctccacttgcggcaacgccacagctcggtacagttcggacctccacgccgcagcgaaagacttctgtcctccaggcaccttcactaacccggtgcggagcacttggcgacgcctccctgcccatctcatatctctcggctcatcgctgctctgggcaccagctgcctcttggctggcgctgctgtcacacggtggactgttctggccttactgagctgccgtttggggacatcagattcagcaagaagaattgtatagaaatgtaaaaaacatttatgtgtgcttcacatgtggcatgaaaaaaatgaggacctctggtcaaaattgcctgagttcagaatttcatgctggaaggaaagttagacgtaacttctaatttctagttccagtaagcatctcttcttggaaaatttccaaaaaagagtcctgctctgttgcccaggctggagtacattggtgtgatgatcatggttcactgcagcctcgacctcccaggctcaagcaattctcctacctcagcctcctgagtaactgggactataggatttctttgaagaaaaatgtgcttcttgaatcaactgcagtctctcctctgcataagagctcttaagggtactagcaggatagaagcaaatgaaactgaaagctcatctgcagctcagaaaagcaaagacatggaattttaaagagtgaaggtagcatggtgtcggccatgggtgaacaagacacagccagacaatgtggaccaatttcttcaaactacggcttttctgctgtctgcttgcagtgttgatggtggtggtgctggtcatcaatgttactcaggtagagtacttggaccatgagactgtttcagccactttcatcgacagcagtggacagtttgtttcctcccaggtgacaggaattagccgaaatccctactgtggctatgatcagcagaccctgtccagccaggagcgcatggaggaggactccttgctggctgccttgcaccggcaggttcctgatgtgggcccagtcccctttgtgaagagcactgacccttcttccagctactttgtcatcttgaactctgctgccttctttaaggtgggaagccagcttgaggtgctggttcatgtgcaggattttcaaagaaagcccaagaagtatggtggagactacctgcaggccagaattcactccctcaagctgcaggctggggctgtgggcagggtggtggattaccagaatgggttttacaaggttttctttactttgctatggccaggcaaagttaaagtatccgtatctctggtccaccccagtgaagggatcagagttcttcagcgcttacaggaagataaaccagacagggtctatttcaagagtctcttccgttcaggaagaatttctgaaactactgagtgcaacgtgtgtcttcctgggaatctgcccctgtgtaactttacagacctctacactggggagccctggttctgcttcaaaccaaagaagctcccttgcagcagcagaattacccatttcaaaggtggatacctgaaaggtctcctaaccgctgcagagagtgctttcttccagagtggtgtcaatatcaaaatgccagtcaactccagtggacctgattgggtaactgtgattcccaggagaataaaagaaactaacagtctagaactatctcaaggctcaggaacttttccttctgggtattattataaagaccagtggaggcccagaaagtttaagatgcgtcagtttaatgaccctgacaacattacagagtgcttacaaagaaaagtggtgcatttatttggtgactcaacaatcaggcaatggtttgaataccttactacatttgttccagatttagtggagtttaacttgggtagtcccaagaatgtgggtcccttccttgcagtggaccagaagcacaacatcctgctcaaataccgctgccatggtccacccatccgcttcacgactgtctttagcaatgagctccattatgtggcgaatgagctgaatggcattgtgggagggaagaacacagtggttgccatagctgtatggtctcacttcagcaccttccctttggaagtgtacatccggcggctcaggaacatccgtcgagcagtggttcggctcctcgatcgaagcccaaagaccgtggtggtcatccggacggccaacgcccaagagctgggacctgaggtgagccttttcaacagcgactggtacaactttcagctggacaccatccttcggaggatgttctcaggggttggagtatatctcgtcgatgcctgggagatgaccctggcccattatctaccgcacaagctgcatccagatgaagttattgtgaagaaccagctggacatgttcttgtcctttgtgtgccccttggaaacctagcctgtcttggaagggactggaggaatcatattcaatgaccttctcaattgacctgagttacagaaagtggccccagtgagagatgactgcccttaataagtataaaatttcaaaaagatctggacttaatatgatgacttataaggagcttagaaaatgcaggttacatttatatctacctataggattttatccaatgttgacttagccatggtagaactcttaactgcatctacacactatattgctcttgtaaccaaagatgctaatgagtgtatttgaattagcttctcctaggaggggtgactactttgctaaagagtatgaaaaatgttttgatggaagggacaagtttggttggtagtagagtgtttgtagcttatctggtaaaggaaattgagtgcatctgcatgcatagcacaagtaatccatcttctggcggttaactagagaaagcttatagtcagaggctcttgtgaatgcactgaagactgctgtgtctcaggagtttctcttgatgatctaccttttctgaattacttgaaaaggccaatgtgcttggttcgagttttttagtgaatatttacaatttcctgcttttatctagaaaagaagcaaaagggaaatatgaaagcagtatatataaaatctgtgctttggaattgatatttgcatttggtgattgttttttatttgattcagctaaattttatgtgttgaatacttactctagaataactacttttggaactggaagggggaaatctgtaaatggaaatttatttttatgttctgaaatttgagggtttaggaattgacttttgtgtaaagaatgctacgatattataaagctgtggaagttttttccactagtttcaggtgtttttttttttgttgttgttgttgttattttgaactacttaccaaaattagaagttaaaatctaattagaaattaataagatactaaaattcatgacagttttttgtttgtttgtttgtttgttttttggtatttcttgatttgggcataaaaggcacacccattctctcatgcttggaagaagctgctattcctactggctatctaagaagaatggaattattaattttatttgacttattaattttaaacgagtttaatttgggatcatttagtaagtactcttttctttttgagctgtgatagattatagtctagtttaagttgctcctaagtagacagatgaagaaactagggaggctttagagaggaagacagatgcttgaagtatgaacaatatatacccttagaagaatgggtcaaataatttgggtttttaatttaaaataggagggccccagatcttactttcctgtccttgaggaacaccttcaagtttttaaagtattttagggggaaagaagatttttaattgtttctgagcctaatgaggtaataaaatatattaaaatagtttaattttaatggtccttacgctttacagtacctaaggatcacttgtagtatctgacaaaaatgcagaattaaagagtcatggcagggtgtggtagctcaagcctgtaatcccagcactttgggaggccaggcaggaggattgcttgaggccaggagtttgagaccagcctgggcaacatagtaagacctcatctctacaaaaaataaaaaattatccaggtgtgggccgacagtcccagctactagggaggctaaggcagggtgattgattgagcccagtagtttgaggctgcagtgagttatgattgcgccactacactcccacttgggcaacagacaagagatcttatctctaaaaaatttttgttaaataataaaagaattaaggccagggatgttggctcacatctgtaatcccagcagggattatagtctcgggaggctgaggtgggcggattgcttgagcccggaaggtcaagaccagcctgggtgccatggtgaaaccccatctctacaaaaaaatacaaaaactagctgggtgtggtggcaccacctgtagtccccgctacttaggaggctgaggtgggaggattgcttgagcccaggaggcagaaggttgcagaggttgcagtgagccttgattgtgccactgtactccagtctgggcaacagggcaagaccctgtctctaaaaaaaaaaaaaaaaaaaaaagagggaccatgatgcctctgggatttatgaaaccaacctttgtggcgagtgctcagtgattctgatgcaatggtggtattccacactgtgagaaacactaagagaagaggtaagatagaatgagggaataaacatggcttgtttattattttgggggatttaccaataactggtttaattctgttcatgatccaatagtattggtgatattagctccattttatagatgaggaactcatgtttagatctgaaataaggtatgtgagagtccatatctcttttcagctaaacttgtgagactttcgtaaagaagcgtttgtatttatttatttgtttttgagacagggtcttgctcttttgcccaggctggagtgcagtggcatgatatggctcactgcagccttgacttcctgggctcaagggatccttctgcctcagcctcctgagtagctgggactacaggtatgtaccaccatgcccagctaatttttgtatctttttgtagagactacattttgccatgttgtccaggctggtcttaaactcctgagctcaagcatctgcccacctcagcttcccaaagtgctgggattacaggtgtgagccactgtgcccagctgagagtttttcttgtcgtgaaagaacttgacatttcctcaaggatttataaaggaggctgaggagtaattttcccaggagaattttaaaaagaaagcgggcattgctcctccagtggtttggaatgatgccacttgattgtgcaaatgatttcttatgatcttgtctggttttctgttattttttgatttggtgacatagctctcaaagatttggtgacacagcttcttgagtcactttcatctctcttaaaaaaattttttttttaacaacttttaagttcaggggtacatgtgccagtttgtttcataggtaaacttacgtcatgggggtttgttgtatagatgatttcatcacccaggtgttaagcctagtacccattagtaatttttcctgatcctctccctcctcctaccctccaccctccaatagaccccagtgtgtgttgttgccctttatgtgtccatgtgttctcatcatttagctctcacttatcagtgagaacaactttcatcccacatctaatttgtctttcttcactctggtgtggaaattttgatagagattccaatatcacttaaacgtttcccagaatatttagatagaataatttagtttcttctgaaaagtttattttaggctagtgccacatggttgtgaatattagcatggtagccaaataatagtttgtttaaatgtatatttcccaatataaatataaggggcatcataatttttaaaaactataaaatctagaagaaaaatctatggataaaatccataattctatcatctgaatgcaatgaacattagcatttaggtatattttcttgcaggttttttaaccatatacttatagagaatatgtaatttgggtctgtgttttttacatataaatatttttctatgttaaatagtcttcataagttaattataaagatctgcttaatagttctgctactgcagttttcattattagataagttggtcattatagttggacatttaggtttacaatattaaagcagtggtttatatcaatttcagtggtttaaaatatgaatttctattttggaatgaaagtattaatttaatgtagtgaatctcatattccagaactgagatgattgatttgatgctatttgtgacagacagaacccataataaagcctttctatgcaagttacattttatagaattatcctactaaaagtaacctttcttcagcgaatgcaaaacagacctttggtgttccagtatgattcattttgccattctgaacaactatcattttaattaagaccatttaactgacacttcctggattcagttattaagtttcagattgaaacttgatccagtttaataactgaatccagtttcacatttatcaatctgaaaacttagtttgcagattggtaaatcagggtacttgacaagaataaatatggtacgcctttatatattcatgtgttacatgccagaaatgagtctgtttctggaccctgttcaaggaaatagtgatgactgagagaggtacagggaaataaacacccaagggaaacaacagaaataagcctccccaactttctaaaaaactgctcagcattatctctgtggattctgggtaaattcagctttttaacatcagctagtcactaatgccagaaattccacttcaagtgtatttattttcttgtgttaagcattattctacctggtttatgtctacaatgtagtattagtgtacttaggattcttgacacctcagtgtgcaataaataaaattttgaagttgttgtttttcatttgaaggtgagaccacagcccctgagtgctaaggggacctgggaatcctaggggaatggaggtggtggacgataagaggatggttgagggcaggagtttaaaggacacagaagctaggagagcagaaaatgtactccaccaccttctgtctaacttgtctcttaaaagtgcttttacattttaactttttaaaaaaatgtgggccgggcatagtggctcatgcctgtaatcccagcactttgggaggccgaggtgggcggatcacctgaggtcaagagttcaagaccagcctgaccaatatgatgaaaccccatctctactaaaaatacaaaaatagccaggtgtggtggcacatgcctgtcatcccagctactcaggaggctgaggtgggagaatcgcttgaacccgggaggtggaggttgcagtgagccgagatcatgccattgcactctagcctgggcaacgagagtgaaactctgtctcaataaataaataaataaataaaaaataaaaaagtgtgaacttaaatatatttatatgtgtgtacatatattttcttttttaatattctggttaaatgagaggccatcgggcctctttttaagagtctaatgatgtgtatatctaatgcccattccagctggattgtaacactgcttggggaagataacttaaaaaaaagtagtaccgagattacagcagctagtgtcctaaatggaaaagaagtgaaactaaatgtcataggagaaatcctttcagttttgtgcagtggttcatttgctgttaaatctaccccattaccattccccttactccttgaaaataaagtgatcttcatgtta

SEQ ID NO: 158653 - DNA, 3450 bp, Homo sapiens
  Payload ID: 11044
  Gene Symbol: NXPE3
  Gene Name: neurexophilin and PC-esterase domain family, member 3
  Uniprot ID: Q969Y0
  ENST ID: ENST00000477909
  CDS Start-End: 902-2581
gaataataacttttagatctgtacagataccccttttttctgtaggggaaaacaagatcattggatcattgaactaaataattataatagtttttaagaaaaataacatttggagcttttatctttggtttatattttttcacttatatcgctgtttataaagttttgaccttcagccaaggtctgagagtgatttaccatgttgaagttcatgtatttaaatagactatttaaattactgttttttattagtaaggaaaaggaaacgttcctatgcccactcctcccactatatcatgtataactctcttgcctgtaaaattgtactcttaatttctaatgtttttctttacttcattttcagtatctttaacctttatatcatatgcatatttttgtttcagcaagaagaattgtatagaaatgtaaaaaacatttatgtgtgcttcacatgtggcatgaaaaaaatgaggacctctggtcaaaattgcctgagttcagaatttcatgctggaaggaaagttagacgtaacttctaatttctagttccagtaagcatctcttcttggaaaatttccaaaaaagagtcctgctctgttgcccaggctggagtacattggtgtgatgatcatggttcactgcagcctcgacctcccaggctcaagcaattctcctacctcagcctcctgagtaactgggactataggatttctttgaagaaaaatgtgcttcttgaatcaactgcagtctctcctctgcataagagctcttaagggtactagcaggatagaagcaaatgaaactgaaagctcatctgcagctcagaaaagcaaagacatggaattttaaagagtgaaggtagcatggtgtcggccatgggtgaacaagacacagccagacaatgtggaccaatttcttcaaactacggcttttctgctgtctgcttgcagtgttgatggtggtggtgctggtcatcaatgttactcaggtagagtacttggaccatgagactgtttcagccactttcatcgacagcagtggacagtttgtttcctcccaggtgacaggaattagccgaaatccctactgtggctatgatcagcagaccctgtccagccaggagcgcatggaggaggactccttgctggctgccttgcaccggcaggttcctgatgtgggcccagtcccctttgtgaagagcactgacccttcttccagctactttgtcatcttgaactctgctgccttctttaaggtgggaagccagcttgaggtgctggttcatgtgcaggattttcaaagaaagcccaagaagtatggtggagactacctgcaggccagaattcactccctcaagctgcaggctggggctgtgggcagggtggtggattaccagaatgggttttacaaggttttctttactttgctatggccaggcaaagttaaagtatccgtatctctggtccaccccagtgaagggatcagagttcttcagcgcttacaggaagataaaccagacagggtctatttcaagagtctcttccgttcaggaagaatttctgaaactactgagtgcaacgtgtgtcttcctgggaatctgcccctgtgtaactttacagacctctacactggggagccctggttctgcttcaaaccaaagaagctcccttgcagcagcagaattacccatttcaaaggtggatacctgaaaggtctcctaaccgctgcagagagtgctttcttccagagtggtgtcaatatcaaaatgccagtcaactccagtggacctgattgggtaactgtgattcccaggagaataaaagaaactaacagtctagaactatctcaaggctcaggaacttttccttctgggtattattataaagaccagtggaggcccagaaagtttaagatgcgtcagtttaatgaccctgacaacattacagagtgcttacaaagaaaagtggtgcatttatttggtgactcaacaatcaggcaatggtttgaataccttactacatttgttccagatttagtggagtttaacttgggtagtcccaagaatgtgggtcccttccttgcagtggaccagaagcacaacatcctgctcaaataccgctgccatggtccacccatccgcttcacgactgtctttagcaatgagctccattatgtggcgaatgagctgaatggcattgtgggagggaagaacacagtggttgccatagctgtatggtctcacttcagcaccttccctttggaagtgtacatccggcggctcaggaacatccgtcgagcagtggttcggctcctcgatcgaagcccaaagaccgtggtggtcatccggacggccaacgcccaagagctgggacctgaggtgagccttttcaacagcgactggtacaactttcagctggacaccatccttcggaggatgttctcaggggttggagtatatctcgtcgatgcctgggagatgaccctggcccattatctaccgcacaagctgcatccagatgaagttattgtgaagaaccagctggacatgttcttgtcctttgtgtgccccttggaaacctagcctgtcttggaagggactggaggaatcatattcaatgaccttctcaattgacctgagttacagaaagtggccccagtgagagatgactgcccttaataagtataaaatttcaaaaagatctggacttaatatgatgacttataaggagcttagaaaatgcaggttacatttatatctacctataggattttatccaatgttgacttagccatggtagaactcttaactgcatctacacactatattgctcttgtaaccaaagatgctaatgagtgtatttgaattagcttctcctaggaggggtgactactttgctaaagagtatgaaaaatgttttgatggaagggacaagtttggttggtagtagagtgtttgtagcttatctggtaaaggaaattgagtgcatctgcatgcatagcacaagtaatccatcttctggcggttaactagagaaagcttatagtcagaggctcttgtgaatgcactgaagactgctgtgtctcaggagtttctcttgatgatctaccttttctgaattacttgaaaaggccaatgtgcttggttcgagttttttagtgaatatttacaatttcctgcttttatctagaaaagaagcaaaagggaaatatgaaagcagtatatataaaatctgtgctttggaattgatatttgcatttggtgattgttttttatttgattcagctaaattttatgtgttgaatacttactctagaataactacttttggaactggaagggggaaatctgtaaatggaaatttatttttatgttctgaaatttgagggtttaggaattgacttttgtgtaaagaatgctacgatattataaagctgtggaagttttttcca

SEQ ID NO: 158654 - DNA, 797 bp, Homo sapiens
  Payload ID: 11044
  Gene Symbol: NXPE3
  Gene Name: neurexophilin and PC-esterase domain family, member 3
  ENST ID: ENST00000495842
  CDS Start-End: 788-797
gtcggaggtgaggagacgtcgccgggtgaggaagcggggggctagcggcctggcgctgcggcgaccgaccggggcgtcaggatccctggcccccggagagcgaagggcgggcgggtcccggaggcaccttcactaacccggtgcggagcacttggcgacgcctccctgcccatctcatatctctcggctcatcgctgctctgggcaccagctgcctcttggctggcgctgctgtcacacggtggactgttctggccttactgagctgccgtttggggacatcagattcagcaagaagaattgtatagaaatgtaaaaaacatttatgtgtgcttcacatgtggcatgaaaaaaatgaggacctctggtcaaaattgcctgagttcagaatttcatgctggaaggaaagttagacgtaacttctaatttctagttccagtaagcatctcttcttggaaaatttccaaaaaagagtcctgctctgttgcccaggctggagtacattggtgtgatgatcatggttcactgcagcctcgacctcccaggctcaagcaattctcctacctcagcctcctgagtaactgggactataggatttctttgaagaaaaatgtgcttcttgaatcaactgcagtctctcctctgcataagagctcttaagggtactagcaggatagaagcaaatgaaactgaaagctcatctgcagctcagaaaagcaaagacatggaattttaaagagtgaaggtagcatggtgtcggccatgggtgaacaagacacagccagacaatgtggacca

SEQ ID NO: 158655 - DNA, 936 bp, Homo sapiens
  Payload ID: 11044
  Gene Symbol: NXPE3
  Gene Name: neurexophilin and PC-esterase domain family, member 3
  ENST ID: ENST00000474165
  CDS Start-End: 778-936
gcggcctggcgctgcggcgaccgaccggggcgtcaggatccctggcccccggagagcgaagggcgggcgggtcccggaggcaccttcactaacccggtgcggagcacttggcgacgcctccctgcccatctcatatctctcggctcatcgctgctctgggcaccagctgcctcttggctggcgctgctgtcacacggtggactgttctggccttactgagctgccgtttggggacatcagattcaggtcgtatggggagaaacgagtgtaactttacaagcaagaagaattgtatagaaatgtaaaaaacatttatgtgtgcttcacatgtggcatgaaaaaaatgaggacctctggtcaaaattgcctgagttcagaatttcatgctggaaggaaagttagacgtaacttctaatttctagttccagtaagcatctcttcttggaaaatttccaaaaaagagtcctgctctgttgcccaggctggagtacattggtgtgatgatcatggttcactgcagcctcgacctcccaggctcaagcaattctcctacctcagcctcctgagtaactgggactataggatttctttgaagaaaaatgtgcttcttgaatcaactgcagtctctcctctgcataagagctcttaagggtactagcaggatagaagcaaatgaaactgaaagctcatctgcagctcagaaaagcaaagacatggaattttaaagagtgaaggtagcatggtgtcggccatgggtgaacaagacacagccagacaatgtggaccaatttcttcaaactacggcttttctgctgtctgcttgcagtgttgatggtggtggtgctggtcatcaatgttactcaggtagagtacttggaccatgagactgtttcagccactttcatcgacagcagtggacagtttgtttcctcccag

SEQ ID NO: 158656 - DNA, 1832 bp, Homo sapiens
  Payload ID: 11044
  Gene Symbol: NXPE3
  Gene Name: neurexophilin and PC-esterase domain family, member 3
  ENST ID: ENST00000616286
  CDS Start-End: 147-416
acctctacactggggagccctggttctgcttcaaaccaaagaagctcccttgcagcagcagaattacccatttcaaaggtggatacctgaaaggtctcctaaccgctgcagagagtgctttcttccagagtggtgtcaatatcaaaatgccagtcaactccagtggacctgattgggtaactgtgattcccaggagaataaaagaaactaacagtctagaactatctcaaggctcaggaacttttccttctgggtattattataaagaccagtggaggcccagaaagtttaagatgcgtcagtttaatgaccctacaacattacagagtgcttacaaagaaaagtggtgcatttatttggtgactcaacaatcaggcaatggtttgaataccttactacatttgttccagatttagtggagtttaacttgggtagtcccaagaatgtgggtcccttccttgcagtggaccagaagcacaacatcctgctcaaataccgctgccatggtccacccatccgcttcacgactgtctttagcaatgagctccattatgtggcgaatgagctgaatggcattgtgggagggaagaacacagtggttgccatagctgtatggtctcacttcagcaccttccctttggaagtgtacatccggcggctcaggaacatccgtcgagcagtggttcggctcctcgatcgaagcccaaagaccgtggtggtcatccggacggccaacgcccaagagctgggacctgaggtgagccttttcaacagcgactggtacaactttcagctggacaccatccttcggaggatgttctcaggggttggagtatatctcgtcgatgcctgggagatgaccctggcccattatctaccgcacaagctgcatccagatgaagttattgtgaagaaccagctggacatgttcttgtcctttgtgtgccccttggaaacctagcctgtcttggaagggactggaggaatcatattcaatgaccttctcaattgacctgagttacagaaagtggccccagtgagagatgactgcccttaataagtataaaatttcaaaaagatctggacttaatatgatgacttataaggagcttagaaaatgcaggttacatttatatctacctataggattttatccaatgttgacttagccatggtagaactcttaactgcatctacacactatattgctcttgtaaccaaagatgctaatgagtgtatttgaattagcttctcctaggaggggtgactactttgctaaagagtatgaaaaatgttttgatggaagggacaagtttggttggtagtagagtgtttgtagcttatctggtaaaggaaattgagtgcatctgcatgcatagcacaagtaatccatcttctggcggttaactagagaaagcttatagtcagaggctcttgtgaatgcactgaagactgctgtgtctcaggagtttctcttgatgatctaccttttctgaattacttgaaaaggccaatgtgcttggttcgagttttttagtgaatatttacaatttcctgcttttatctagaaaagaagcaaaagggaaatatgaaagcagtatatataaaatctgtgctttggaattgatatttgcatttggtgattgttttttatttgattcagctaaattttatgtgttgaatacttactctagaataactacttttggaactggaagggggaaatctgtaaatggaaatttatttttatgttctgaaatttgagggtttaggaattgacttttgtgtaaagaatgctacgatattataaagctgtggaagttttttccact

SEQ ID NO: 158657 - DNA, 1822 bp, Homo sapiens
  Payload ID: 11045
  Gene Symbol: NXPE4
  Gene Name: neurexophilin and PC-esterase domain family, member 4
  Uniprot ID: Q6UWF7
  ENST ID: ENST00000375478
  CDS Start-End: 182-1816
agaaggttgtgaatccatgctaaaggtaaacaaactgcaacttatatctgcaatttattttggtatagacaagaggtatgccagtagcacactggtggcttcagaagaaattctcaacacctagctcgccagagagtctatgtatgggattgaacaatctgtaaactaaaggatcctaatcatgaaaataagtatgataaattataagtcactattggcactgttgtttatattagcctcctggatcatttttacagttttccagaactccacaaaggtttggtctgctctaaacttatccatctccctccattactggaacaactccacaaagtccttattccctaaaacaccactgatatcattaaagccactaacagagactgaactcagaataaaggaaatcatagagaaactagatcagcagatcccacccagacctttcacccacgtgaacaccaccaccagcgccacacatagcacagccaccatcctcaaccctcgagatacgtactgcaggggagaccagctgcacatcctgctggaggtgagggaccacttgggacgcaggaagcaatatggcggggatttcctgagggccaggatgtcttccccagcgctgatggcaggtgcttcaggaaaggtgactgacttcaacaacggcacctacctggtcagcttcactctgttctgggagggccaggtctctctgtctctgctgctcatccaccccagtgaaggggtgtcagctctctggagtgcaaggaaccaaggctatgacagggtgatcttcactggccagtttgtcaatggcacttcccaagtccactctgaatgtggcctgatcctaaacacaaatgctgaattgtgccagtacctggacaacagagaccaagaaggcttctactgtgtgaggcctcaacacatgccctgtgctgcactcactcacatgtattctaagaacaagaaagtttcttatcttagcaaacaagaaaagagcctctttgaaaggtcaaatgtgggtgtagagattatggaaaaattcaatacaattagtgtctccaaatgcaacaaagaaacagttgcaatgaaagagaaatgcaagtttggaatgacatccacaatccccagtgggcatgtctggagaaacacatggaatcctgtctcctgtagtttggctacagtcaaaatgaaggaatgcctgagaggaaaactcatatacctaatgggagattccacgatccgccagtggatggaatacttcaaagccagtatcaacacactgaagtcagtggatctgcatgaatctggaaaattgcaacaccagcttgctgtggatttggataggaacatcaacatccagtggcaaaaatattgttatcccttgataggatcaatgacctattcagtcaaagagatggagtacctcacccgggccattgacagaactggaggagaaaaaaatactgtcattgttatttccctgggccagcatttcagaccctttcccattgatgtttttatccgaagggccctcaatgtccacaaagccattcagcatcttcttctgagaagcccagacactatggttatcatcaaaacagaaaacatcagggagatgtacaatgatgcagaaagatttagtgactttcatggttacattcaatatctcatcataaaggacattttccaggatctcagtgtgagtatcattgatgcctgggatataacaattgcatatggcacaaataatgtacacccacctcaacatgtagtcggaaatcagattaatatattattaaactatatttgttaaataaca

SEQ ID NO: 158658 - DNA, 1687 bp, Homo sapiens
  Payload ID: 11045
  Gene Symbol: NXPE4
  Gene Name: neurexophilin and PC-esterase domain family, member 4
  Uniprot ID: Q6UWF7
  ENST ID: ENST00000424261
  CDS Start-End: 558-1340
atccatgctaaaggtaaacaaactgcaacttatatctgcaatttattttggtatagacaagaggtatgccagtagcacactggtggcttcagaagaaattctcaacacctagctcgccagagagtctatgtatgggattgaacaatctgtaaactaaaggatcctaatcatgaaaataagtatgataaattataagtcactattggcactgttgtttatattagcctcctggatcatttttacagttttccagaactccacaaaggtttggtctgctctaaacttatccatctccctccattactggaacaactccacaaagtccttattccctaaaacaccactgatatcattaaagccactaacagagactgaactcagaataaaggaaatcatagagaaactagatcagcagatcccacccagacctttcacccacgtgaacaccaccaccagcgccacacatagcacagccaccatcctcaaccctcgagatacgtactgcaggggagaccagctgcacatcctgctggaggtcaaatgtgggtgtagagattatggaaaaattcaatacaattagtgtctccaaatgcaacaaagaaacagttgcaatgaaagagaaatgcaagtttggaatgacatccacaatccccagtgggcatgtctggagaaacacatggaatcctgtctcctgtagtttggctacagtcaaaatgaaggaatgcctgagaggaaaactcatatacctaatgggagattccacgatccgccagtggatggaatacttcaaagccagtatcaacacactgaagtcagtggatctgcatgaatctggaaaattgcaacaccagcttgctgtggatttggataggaacatcaacatccagtggcaaaaatattgttatcccttgataggatcaatgacctattcagtcaaagagatggagtacctcacccgggccattgacagaactggaggagaaaaaaatactgtcattgttatttccctgggccagcatttcagaccctttcccattgatgtttttatccgaagggccctcaatgtccacaaagccattcagcatcttcttctgagaagcccagacactatggttatcatcaaaacagaaaacatcagggagatgtacaatgatgcagaaagatttagtgactttcatggttacattcaatatctcatcataaaggacattttccaggatctcagtgtgagtatcattgatgcctgggatataacaattgcatatggcacaaataatgtacacccacctcaacatgtagtcggaaatcagattaatatattattaaactatatttgttaaataacacaaaagtctgaaattcattcacttaagtaaaaaaatttattgactgtctactagcaggccagatgctgtgtttggctctgaattcccaactagcaagagcagagaatctacattatggctgatccataagccaccaattcagctaaatgagatgtttctaatctgggcttccacttaaaaataaaactaaaaatactcatgaaaagagcctacccttcttgatcagagccatacccctcttcaccaatgggaagtcaagacacctatgggtaaaagttctctctgatgcatgaaaactcagagtgataaagtaattttaaaataaaaatttggagaaagca

SEQ ID NO: 158659 - DNA, 1624 bp, Homo sapiens
  Payload ID: 11046
  Gene Symbol: NRN1
  Gene Name: neuritin 1
  Uniprot ID: Q9NPD7
  ENST ID: ENST00000244766
  CDS Start-End: 219-647
ccccctcagcctctctctctctctctctttctctctctctctctctttctgtctcttcctcgctccctctctttctctcctccctctgccttcccagtgcataaagtctctgtcgctcccggaacttgttggcaatgcctattttttggctttcccccgcgttctctaaactaactatttaaaggtctgcggtcgcaaatggtttgactaaacgtaggatgggacttaagttgaacggcagatatatttcactgatcctcgcggtgcaaatagcgtatctggtgcaggccgtgagagcagcgggcaagtgcgatgcggtcttcaagggcttttcggactgtttgctcaagctgggcgacagcatggccaactacccgcagggcctggacgacaagacgaacatcaagaccgtgtgcacatactgggaggatttccacagctgcacggtcacagcccttacggattgccaggaaggggcgaaagatatgtgggataaactgagaaaagaatccaaaaacctcaacatccaaggcagcttattcgaactctgcggcagcggcaacggggcggcggggtccctgctcccggcgttcccggtgctcctggtgtctctctcggcagctttagcgacctggctttccttctgagcgtggggccagctccccccgcgcgcccacccacactcactccatgctcccggaaatcgagaggaagatccattagttctttggggacgttgtgattctctgtgatgctgaaaacactcatataggattgtgggaaatcctgattctcttttttatttcgtttgatttcttgtgttttatttgccaaatgttaccaatcagtgagcaagcaagcacagccaaaatcggacctcagctttagtccgtcttcacacacaaataagaaaacggcaaacccaccccattttttaattttattattattaattttttttgttggcaaaagaatctcaggaacggccctgggccacctactatattaatcatgctagtaacatgaaaaatgatgggctcctcctaataggaaggcgaggagaggagaaggccaggggaatgaattcaagagagatgtccacggacgaaacatacggtgaataattcacgctcacgtcgttcttccacagtatcttgttttgatcatttccactgcacatttctcctcaagaaaagcgaaaggacagactgttggctttgtgtttggaggataggagggagagagggaaggggctgaggaaatctctggggtaagagtaaaggcttccagaagacatgctgctatggtcactgaggggttagctttatctgctgttgttgatgcatccgtccaagttcactgcctttattttccctcctccctcttgttttagctgttacacacacagtaatacctgaatatccaacggtatagatcacaagggggggatgttaaatgttaatctaaaatatagctaaaaaaagattttgacataaaagagccttgattttaaaaaaaaaagagagagagatgtaatttaaaaagtttattataaattaaattcagcaaaaaaagatttgctacaaagtatagagaagtataaaataaaagttattgtttgaaa

SEQ ID NO: 158660 - DNA, 1795 bp, Homo sapiens
  Payload ID: 11046
  Gene Symbol: NRN1
  Gene Name: neuritin 1
  ENST ID: ENST00000622188
  CDS Start-End: 315-821
tacgggttcggtcaccttcctcttcggcgtctggcccggcgctcgcggacaggcgcccgcgttgggggccgggggattgaggtgtccggtcctcccgggacacattcacacacaagcgcagccgccagaaagctgccgaggaccaggccggcgcccagggtcgtgggcgccagtgcggatttcgattctgagattcaccctttcttccccgccctaacgctgtgcttctctggcgccctcccggcgcccgggctgctttgggccgctaggcactcagcttccagccgggttcgtcggcctcagggcggaaagagatggccacagccgcgcgcccgcagcctgaccactcatcatccgcgccaggtctcaggacgtccaggctgccctctttccagcggggcgggagagggtgcatccgagggtctcactcggaatacagagtccacgcgtatctggtgcaggccgtgagagcagcgggcaagtgcgatgcggtcttcaagggcttttcggactgtttgctcaagctgggcgacagcatggccaactacccgcagggcctggacgacaagacgaacatcaagaccgtgtgcacatactgggaggatttccacagctgcacggtcacagcccttacggattgccaggaaggggcgaaagatatgtgggataaactgagaaaagaatccaaaaacctcaacatccaaggcagcttattcgaactctgcggcagcggcaacggggcggcggggtccctgctcccggcgttcccggtgctcctggtgtctctctcggcagctttagcgacctggctttccttctgagcgtggggccagctccccccgcgcgcccacccacactcactccatgctcccggaaatcgagaggaagatccattagttctttggggacgttgtgattctctgtgatgctgaaaacactcatataggattgtgggaaatcctgattctcttttttatttcgtttgatttcttgtgttttatttgccaaatgttaccaatcagtgagcaagcaagcacagccaaaatcggacctcagctttagtccgtcttcacacacaaataagaaaacggcaaacccaccccattttttaattttattattattaattttttttgttggcaaaagaatctcaggaacggccctgggccacctactatattaatcatgctagtaacatgaaaaatgatgggctcctcctaataggaaggcgaggagaggagaaggccaggggaatgaattcaagagagatgtccacggacgaaacatacggtgaataattcacgctcacgtcgttcttccacagtatcttgttttgatcatttccactgcacatttctcctcaagaaaagcgaaaggacagactgttggctttgtgtttggaggataggagggagagagggaaggggctgaggaaatctctggggtaagagtaaaggcttccagaagacatgctgctatggtcactgaggggttagctttatctgctgttgttgatgcatccgtccaagttcactgcctttattttccctcctccctcttgttttagctgttacacacacagtaatacctgaatatccaacggtatagatcacaagggggggatgttaaatgttaatctaaaatatagctaaaaaaagattttgacataaaagagccttgattttaaaaaaaaaagagagagagatgtaatttaaaaagtttattataaattaaattcagcaaaaaaagatttgctacaaagtatagagaagtataaaataaaagttattgtttg

SEQ ID NO: 158661 - DNA, 1556 bp, Homo sapiens
  Payload ID: 11046
  Gene Symbol: NRN1
  Gene Name: neuritin 1
  Uniprot ID: Q9NPD7
  ENST ID: ENST00000616243
  CDS Start-End: 154-582
gcgcgtttgtgtgtgtgtgtgtgtgtgtgtgtgtgtgtgctcgtgcggggggccgggctgcgtgctcacgcgctccaggctgcgcccagagctcagctgctgggttggagaaaaagagggtctgcggtcgcaaatggtttgactaaacgtaggatgggacttaagttgaacggcagatatatttcactgatcctcgcggtgcaaatagcgtatctggtgcaggccgtgagagcagcgggcaagtgcgatgcggtcttcaagggcttttcggactgtttgctcaagctgggcgacagcatggccaactacccgcagggcctggacgacaagacgaacatcaagaccgtgtgcacatactgggaggatttccacagctgcacggtcacagcccttacggattgccaggaaggggcgaaagatatgtgggataaactgagaaaagaatccaaaaacctcaacatccaaggcagcttattcgaactctgcggcagcggcaacggggcggcggggtccctgctcccggcgttcccggtgctcctggtgtctctctcggcagctttagcgacctggctttccttctgagcgtggggccagctccccccgcgcgcccacccacactcactccatgctcccggaaatcgagaggaagatccattagttctttggggacgttgtgattctctgtgatgctgaaaacactcatataggattgtgggaaatcctgattctcttttttatttcgtttgatttcttgtgttttatttgccaaatgttaccaatcagtgagcaagcaagcacagccaaaatcggacctcagctttagtccgtcttcacacacaaataagaaaacggcaaacccaccccattttttaattttattattattaattttttttgttggcaaaagaatctcaggaacggccctgggccacctactatattaatcatgctagtaacatgaaaaatgatgggctcctcctaataggaaggcgaggagaggagaaggccaggggaatgaattcaagagagatgtccacggacgaaacatacggtgaataattcacgctcacgtcgttcttccacagtatcttgttttgatcatttccactgcacatttctcctcaagaaaagcgaaaggacagactgttggctttgtgtttggaggataggagggagagagggaaggggctgaggaaatctctggggtaagagtaaaggcttccagaagacatgctgctatggtcactgaggggttagctttatctgctgttgttgatgcatccgtccaagttcactgcctttattttccctcctccctcttgttttagctgttacacacacagtaatacctgaatatccaacggtatagatcacaagggggggatgttaaatgttaatctaaaatatagctaaaaaaagattttgacataaaagagccttgattttaaaaaaaaaagagagagagatgtaatttaaaaagtttattataaattaaattcagcaaaaaaagatttgctacaaagtatagagaagtataaaataaaagttattgtttg

SEQ ID NO: 158662 - DNA, 710 bp, Homo sapiens
  Payload ID: 11047
  Gene Symbol: NRN1L
  Gene Name: neuritin 1-like
  Uniprot ID: Q496H8
  ENST ID: ENST00000339176
  CDS Start-End: 100-597
acccccagctcccatccaatcaccgtccctccctccgggggctgggcggacgggctgcactccaagcagctagctcctgcactaggctctcagccagggatgatgcgctgctgccgccgccgctgctgctgccggcaaccaccccatgccctgaggccgttgctgttgctgcccctcgtccttttacctcccctggcagcagctgcagcgggcccaaaccgatgtgacaccatataccagggcttcgccgagtgtctcatccgcttgggggacagcatgggccgcggaggcgagctggagaccatctgcaggtcttggaatgacttccatgcctgtgcctctcaggtcctgtcaggctgtccggaggaggcagctgcagtgtgggaatcactacagcaagaagctcgccaggccccccgtccgaataacttgcacactctgtgcggtgccccggtgcatgttcgggagcgcggcacaggctccgaaaccaaccaggagacgctgcgggctacagcgcctgcactccccatggcccctgcgcccccactgctggcggctgctctggctctggcctacctcctgaggcctctggcctagcttgttgggttgggtagcagcgcccgtacctccagccctgctctggcggtggttgtccaggctctgcagagcgcagcagggcttttcattaaaggtatttatatttgtagtaa

SEQ ID NO: 158663 - DNA, 397 bp, Homo sapiens
  Payload ID: 11047
  Gene Symbol: NRN1L
  Gene Name: neuritin 1-like
  ENST ID: ENST00000576758
  CDS Start-End: 1-266
tgcgctgctgccgccgccgctgctgctgccggcaaccaccccatgccctgaggccgttgctgttgctgcccctcgtccttttacctcccctggcagcagctgcagcgggcccaaaccgatgtgacaccatataccagggcttcgccgagtgtctcatccgcttgggggacagcatgggccgcggaggcgagctggagaccatctgcagcaccgtggacaaggagtaccttattgttctgagagagcctgggggatggatgtcctgagcccagtcccctctgcattaatatatctcttcacctaaggacctccctcctgctcttctccagagcccagaccagcacatagtaagggttcaataaatatttgttaattaatgcgctgaatgtctgtaaaa

SEQ ID NO: 158664 - DNA, 681 bp, Homo sapiens
  Payload ID: 11047
  Gene Symbol: NRN1L
  Gene Name: neuritin 1-like
  ENST ID: ENST00000576147
  CDS Start-End: 295-558
cagacttgccctttagttccctggggcaccctttttccgctgagtcacatccccagagtgctcccaggtaaacaagcccctgggggctgggggatgagcctggctcatcctatctaccattccttccccaccccacccccgccccacttctagtccttttacctcccctggcagcagctgcagcgggcccaaaccgatgtgacaccatataccagggcttcgccgagtgtctcatccgcttgggggacagcatgggccgcggaggcgagctggagaccatctgcaggtcttggaatgacttccatgcctgtgcctctcaggtcctgtcaggctgtccggaggaggcagctgcagtgtgggaatcactacagcaagaagctcgccaggccccccgtccgaataacttgcacactctgtgcggtgccccggtgcatgttcgggagcgcggcacaggctccgaaaccaaccaggagacgctgcgggctacagcgcctgcactccccatggcccctgcgcccccactgctggcggctgctctggctctggcctacctcctgaggcctctggcctagcttgttgggttgggtagcagcgcccgtacctccagccctgctctggcggtggttgtccaggctctgcagagcgcagcagggcttttcattaaaggtatttatatttgta

SEQ ID NO: 158665 - DNA, 10794 bp, Homo sapiens
  Payload ID: 11048
  Gene Symbol: NBEA
  Gene Name: neurobeachin
  ENST ID: ENST00000310336
  CDS Start-End: 207-9050
gcggcgtcggggcttcacaacaacagtggtggccgtagcagcggccgggccgggctgaggcgcaggcggggagcgggcccggcgccgcggcgctggtggatgctggggctccgaggcgacggccggggggcgggggccgaggcaggtataacggtaccggcggcggcagcgccgctgctcttcccttctcctcaggaggggggccaatggctagcgagaagccgggcccgggcccggggctcgagcctcagcccgtggggctcattgccgtcggggccgctggcggaggcggcgggggcagcggtggtggcggcaccgggggcagcgggatgggggagctaaggggggcgtccggctccggctcggtgatgctccccgcggggatgattaacccttcggtgccgatccgcaacatccggatgaaattcgcagtgttgattggactcatacaggtcggagaggtcagcaacagggacatcgtggagacggtgctcaacctgctggttggtggagaatttgacttggagatgaactttattatccaggatgctgagagtataacatgtatgacagagcttttggagcactgtgatgtaacatgtcaagcagaaatatggagcatgtttacagccattctacgaaaaagtgttcggaatttacagactagcacagaagttgggctaattgaacaagtattgctgaaaatgagtgctgtagatgacatgatagcagatcttctagttgatatgttgggggttcttgccagctacagcatcactgtcaaggagttgaagcttttgttcagcatgcttcgaggagaaagtggaatctggccaagacatgcagtaaaattattatcagttcttaatcagatgccacagagacacggtcctgatacttttttcaatttccctggttgtagcgctgcggcaattgccttgcctcctattgcaaagtggccttatcagaatggcttcaccttaaacacttggtttcgtatggatccattaaataatattaatgttgataaggataaaccttatctttattgttttcgtactagcaaaggagttggttactctgctcattttgttggcaactgtttaatagtcacatcattgaagtccaaaggaaaaggttttcagcattgtgtgaaatatgattttcaaccacgcaagtggtacatgatcagcattgtccacatttacaatcgatggaggaacagtgaaattcggtgttatgttaatggacaactggtatcttatggtgatatggcttggcatgttaacacaaatgatagctatgacaagtgctttcttggatcatcagaaactgctgatgcaaatagggtattctgtggtcaacttggtgccgtgtatgtgttcagtgaagcactcaacccagcacagatatttgcaattcatcagttaggacctggatataagagtaccttcaagtttaaatctgagagtgatattcatttggcagaacatcataaacaggtgttatatgatgggaaacttgcaagtagcattgcctttacatataatgctaaggccactgatgctcagctctgcctggaatcatcaccaaaagagaatgcatcaatttttgtgcattccccacatgctctaatgcttcaggatgtgaaagcgatagtaacacattcaattcatagtgcaattcattcaattggagggattcaagtgctttttccactttttgcccaattggataataggcagctcaatgacagtcaagtggaaacaactgtctgtgctactctgttggcattcctggttgaactacttaaaagttcagtagccatgcaagaacagatgctgggtggaaaaggctttttagtcattggctacttacttgaaaagtcatcaagagttcatataactagagctgtcctggagcaatttttatcttttgcaaaataccttgatggtttatctcatggagcacctttgctgaagcagctttgtgatcacattttatttaacccagccatctggatacatacacctgcaaaggttcagctttccctatacacatatttgtctgctgaatttattggaactgctaccatctacaccaccatacgcagagtaggaacagtattacagctaatgcacaccttaaaatattactactgggttattaatcctgctgacagtagtggcattacacctaaaggattagatggtccccggccatcacaaaaagaaattatatcactgagggcatttatgctactttttctgaaacagctgatactaaaggatcgaggggtcaaggaagatgaacttcagagtatattaaattacctacttacgatgcatgaggatgaaaatattcatgatgtgctacagttactggtggctttaatgtcggaacacccagcctcaatgataccagcatttgatcaaagaaatggaataagggtgatctacaaattattggcttctaaaagtgaaagtatttgggttcaagctttgaaggttctgggatactttctgaagcatttaggtcacaagagaaaagttgaaattatgcacacccatagtcttttcactcttcttggagaaaggctgatgttgcatacaaacactgtgactgtcaccacatacaacacactttatgagatcttgacagaacaagtatgtactcaggtcgtacacaaaccacatccagagccagattctacagtgaaaattcagaatccaatgattcttaaagtggtggcaactttgttaaaaaactctacaccaagtgcagagctgatggaagttcgtcgtttatttttatctgatatgataaaacttttcagtaacagccgtgaaaatagaagatgcttattgcagtgttcagtgtggcaggattggatgttttctcttggctatatcaatcctaaaaattctgaggaacagaagattaccgaaatggtctacaatatcttccggattcttttgtatcatgcaataaaatatgaatggggaggctggagagtctgggtggataccctctcaatagcccattccaaggtcacttatgaagctcataaggaatacctagccaaaatgtatgaggaatatcaaagacaagaggaggaaaacattaaaaagggaaagaaagggaatgtgagcaccatctctggtctttcatcacagacaacaggagcaaaaggtggaatggaaattcgagagatagaagatctttcacaaagccagagcccagaaagtgagaccgattaccctgtcagcacagatactcgagacttactcatgtcaacaaaagtgtcagatgatattcttggaaattcagatagaccaggaagtggtgtacatgtggaagtacatgatcttttagtagatataaaagcagagaaagtggaagcaacagaagtaaagctcgatgatatggatttatcaccggagactttagtaggtggagagaatggtgcccttgtggaggttgaatctctgttggataatgtatatagtgctgctgttgagaaactccagaacaatgtacatggaagtgttggtatcattaaaaaaaatgaagaaaaggataatggtccattgataacattagcagatgagaaagaagaccttcccaatagtagtacatcatttctctttgataaaatacccaaacaggaggaaaaactacttcctgaactttctagcaatcacattattccaaatattcaggacacacaagtacatcttggtgttagtgatgatcttggattgcttgctcacatgaccggtagcgtagacttaacttgtacatccagtataatagaagaaaaagaattcaaaatccatacaacttcagatggaatgagcagtatttctgaaagagacttagcgtcatcaactaaggggctggagtatgctgaaatgactgctacaactctggaaactgagtcttctagtagcaaaattgtaccaaatattgatgcaggaagtataatttcagatactgaaaggtctgacgatggcaaagaatcaggaaaagaaatccgaaaaatccaaacaactactacgacacaagctgtgcagggtcggtctatcacccaacaagaccgagatctccgagttgatttaggatttcgaggaatgccaatgactgaggaacagcgacgccagtttagcccaggtccacggactacaatgtttcgtattcctgagtttaaatggtctccaatgcaccagcggcttctcactgatttactatttgcattagaaactgatgtacatgtttggaggagccattctacaaagtctgtaatggattttgtcaatagcaatgaaaatattatttttgtacataacacaattcacctcatttcccaaatggtagacaacatcatcattgcttgtggaggaattttacctttgctctctgctgctacatcaccaactgtaagtactaagacggaattggaaaatattgaagtgacacaaggcatgtcagctgagacagcagtaactttcctcagccggctgatggctatggttgatgtacttgtgtttgcaagctctctaaattttagtgagattgaagctgagaaaaacatgtcttctggaggtttaatgcgacagtgcctaagattagtttgttgtgttgctgtgagaaactgtttagaatgtcggcaaagacagagagacaggggaaataaatcttcccatggaagcagtaaacctcaggaagttcctcaaagtgtgactgctacagcagcttcgaagactccattggaaaatgttccaggtaacctttctcctattaaggatccggatagacttcttcaggatgttgatatcaatcgccttcgtgctgttgtctttcgggatgtggatgatagcaaacaagcacagttcttagctctggctgttgtttacttcatttcggttctgatggtttccaagtatcgtgacatattagaaccccagagagagactacaagaactggaagccaaccaggtagaaacatcaggcaagaaataaattcaccaacaagtacagttgtggtcataccatctatccctcatccaagtttgaaccatggattccttgccaagttaattcctgagcagagctttggccactcattttacaaagaaacacctgctgcatttccagacaccataaaagaaaaagaaacaccaactcctggtgaagatattcaggtagaaagttcaattccccatacagattcaggaattggagaggagcaagtggctagcatcctgaatggggcagaattagaaacaagtacaggccctgatgccatgagtgaactcttatccactttgtcatccgaagtgaagaaatcacaagagagcttaactgaaaatcctagtgaaacgttgaagcctgcaacatccatatctagcattagtcaaaccaaaggcatcaatgtgaaggaaatactgaaaagtcttgtggctgctccagttgaaatagcagaatgtggccctgaacctatcccatacccagatccagcattgaagagagaaacacaagctattcttcctatgcagtttcattcctttgacaggagtgttgtggtgcctgtaaagaaaccacctccaggtagtttagctgtaaccactgtgggagccactactgctggaagtgggctgccaacaggcagtacctctaatatatttgctgctactggagctacaccaaaaagtatgattaatacaacaggtgccgtggattcagggtcctcctcctcttcctcctcttctagttttgtgaatggtgctactagcaaaaaccttccagctgtacaaactgttgctccaatgccagaagattcagctgaaaatatgagcatcactgcaaaacttgaaagagcgttagaaaaagttgctcctcttcttcgtgaaatttttgtagactttgccccattcctatctcgtacacttcttggcagtcatggacaagagctattgatagaaggccttgtttgtatgaagtccagcacatctgtggttgagcttgttatgctgctttgttctcaggaatggcaaaactctattcagaagaatgcaggacttgcatttattgagctcatcaatgaaggaagattactgtgccatgctatgaaggaccatatagtccgtgttgcaaatgaagctgagtttattttgaacagacaaagagccgaggatgtacataaacatgcagagtttgagtcacagtgtgcccaatatgctgctgatagaagagaggaagaaaagatgtgtgaccatcttatcagtgctgctaaacatcgagatcatgtaacagcaaatcagctgaaacagaagattctcaatattctcacaaataaacatggtgcttggggagcagtttctcatagccaattgcatgatttctggcgtttggattactgggaagatgatcttcgtcgaaggagacgatttgttcgcaatgcatttggctccactcatgctgaagcattgctgaaagctgcaatagaatatggcacggaagaagatgtagtaaagtcaaagaaaacattcagaagtcaagcaatagtgaaccaaaatgcagagacagaacttatgctggaaggagacgatgatgcagtcagtctgctacaggagaaagaaattgacaaccttgcaggcccagtggttctcagcacccctgcccagctcatcgctcccgtggtggtggccaaggggactctctccatcaccacgacagaaatctacttcgaggtagatgaggatgattctgccttcaagaagatcgacacgaaagttcttgcatacactgagggacttcacggaaaatggatgttcagcgagatacgagctgtattttcaagacgttaccttctacaaaacactgctttggaagtatttatggcaaaccgaacctcagttatgtttaatttccctgatcaagcaacagtaaaaaaagttgtctatagcttgcctcgggttggagtagggaccagctatggtctgccacaagccaggaggatatcattggccactcctcgacagctttataaatcttccaatatgactcagcgctggcaaagaagggaaatttcaaacttcgaatatttgatgttccttaatactattgcaggacggacatataatgatctgaaccaatatccagtgtttccgtgggtgttaaccaactatgaatcagaagagttggacctgactcttccaggaaacttcagggatctatcaaagccaattggtgctttgaaccccaagagagctgtgttttatgcagagcgttatgagacatgggaagatgatcaaagcccaccctaccattataatacccattattcaacagcaacatctactttatcctggcttgttcgaattgaacctttcacaaccttcttcctcaatgcaaatgatggaaaatttgatcatccagatcgaaccttctcatccgttgcaaggtcttggagaactagtcagagagatacttctgatgtaaaggaactaattccagagttctactacctaccagagatgtttgtcaacagtaatggatataatcttggagtcagagaagatgaagtagtggtaaatgatgttgatcttcccccttgggcaaaaaaacctgaagactttgtgcggatcaacaggatggccctagaaagtgaatttgtttcttgccaacttcatcagtggatcgaccttatatttggctataagcagcgaggaccagaagcagttcgtgctctgaatgtttttcactacttgacttatgaaggctctgtgaacctggatagtatcactgatcctgtgctcagggaggccatggaggcacagatacagaactttggacagacgccatctcagttgcttattgagccacatccgcctcggagctctgccatgcacctgtgtttccttccacagagtccgctcatgtttaaagatcagatgcaacaggatgtgataatggtgctgaagtttccttcaaattctccagtaacccatgtggcagccaacactctgccccacttgaccatccccgcagtggtgacagtgacttgcagccgactctttgcagtgaatagatggcacaacacagtaggcctcagaggagctccaggatactccttggatcaagcccaccatcttcccattgaaatggatccattaatagccaataattcaggtgtaaacaaacggcagatcacagacctcgttgaccagagtatacaaatcaatgcacattgttttgtggtaacagcagataatcgctatattcttatctgtggattctgggataagagcttcagagtttattctacagaaacagggaaattgactcagattgtatttggccattgggatgtggtcacttgcttggccaggtccgagtcatacattggtggggactgctacatcgtgtccggatctcgagatgccaccctgctgctctggtactggagtgggcggcaccatatcataggagacaaccctaacagcagtgactatccggcaccaagagccgtcctcacaggccatgaccatgaagttgtctgtgtttctgtctgtgcagaacttgggcttgttatcagtggtgctaaagagggcccttgccttgtccacaccatcactggagatttgctgagagcccttgaaggaccagaaaactgcttattcccacgcttgatatctgtctccagcgaaggccactgtatcatatactatgaacgagggcgattcagtaatttcagcattaatgggaaacttttggctcaaatggagatcaatgattcaacacgggccattctcctgagcagtgacggccagaacctggtcaccggaggggacaatggggtagtagaggtctggcaggcctgtgacttcaagcaactgtacatttaccctggatgtgatgctggcattagagcaatggacttgtcccatgaccagaggactctgatcactggcatggcttctggtagcattgtagcttttaatatagattttaatcggtggcattatgagcatcagaacagatactgaagataaaggaagaaccaaaagccaagttaaagctgagagcacaagtgctgcatggaaaggcaatatctctggtggaaaaaactcgtctacatcgacctccgtttgtacattccatcacacccagcaatagctgtacattgtagtcagcaaccattttactttgtgtgttttttcacgactgaacaccagctgctatcaagcaagcttatatcatgtaaattatatgaattaggagatgttttggtaattatttcatatattgttgtttattgagaaaaggttgtaggatgtgtcacaagagacttttgacaattctgaggaaccttgtgtccagttgttacaaagtttaagctttgaacctaacctgcatcccatttccagcctcttttcaagctgagaaaaaaaaaaaaaaacacgtttgatactttgtacatcagatgcatcttatttaaaagggatacttttgtaaaagtaaaaccttgtataaagaacaaaatgtttcttaattttattgtggagttacaacttgcatgttccttactcctgttggcttgatggaacaggtgcattcacactatgaaacagaaagatctgtccaaggacacagcttgtatgaaagggttgaatttgggctccatcagtaatttttgacattttcaccaaaatatagtttgcactttttaatctaaagtcatcccttctgagtgaaatttgctcataaagcatttggatactaagccattatttgccattttgggtactttatacaaagaaaattcagccctaccctgcataatttgaagacacagcagaaagggggcttagggatgaggtcctggtttttcttgtataaataggagtcatgggcgttagttctgtagtaataacttcccagcacctggacatctcttccagagttatcccactggcttggtgtgtatacattaggggaggataatctgatgctaactttttttttctctttggttcttgaatagcttagtttctttaataacaagtcaaactttattacaacaataactgaagttattcttttaggttctcgtgaaattctcactgaaagccacattcttagcctaaggcatttcatcttttatgatataaaatgatggctatcaaatgattttccatacattgtactgatcaagttatacacccaggggtatatacactttcttcatgtttcttctttgtatatttggtgactgtatcgtcatagatgtacatattgtgtcggtagggctatgaggcatgttacaggaatgtaattttctcagaatttacactcactcgcagtcatttatttaaaaagataaaacaagataatgggttctttgtattggcactttgcaccagaaacatatcattatttattgatgtgattacttatttgttatccaccttgtactagtaagttttagcactgaattccttcttcactgttgtttgtatttatgaaattctgaaattatggggaatcagcgtaatgattaagttattcatcaccaggctgtaagcaatatcttgagtttgtagcttagaattgggaggatacttaacatctggaagacaagttcatttcatcttgagatcatggtgaaatattttggatatataaattccttaagctattgtaaccatgttttattgcaaagatgtaaaatatgccagatgtgtgtgagttggaaatcaaaaaaagaaaaataaaatatgcaaagaattc

SEQ ID NO: 158666 - DNA, 3794 bp, Homo sapiens
  Payload ID: 11048
  Gene Symbol: NBEA
  Gene Name: neurobeachin
  Uniprot ID: Q8NFP9
  ENST ID: ENST00000379922
  CDS Start-End: 476-2050
attcgaaagaaaaatccaacttatgaattgtcattaatgcaaaattatttatcagaaaatcgtagagcactggaaccccatcatttcacagatgagaagaccagaagcaaaatgacctgccagagttgcagactgacaactgctgccttggcctagtcaagcccagacaggcatctcctactgccttaatttgggggcatctttctaggaccctgatctgcctccacatcttgaaggattttcaagatagccatgtttcacaaaggaacgagggcagctgtgtttagagtggtcaaatttctgattctgtttttttgcttaggaacctttcacaaccttcttcctcaatgcaaatgatggaaaatttgatcatccagatcgaaccttctcatccgttgcaaggtcttggagaactagtcagagagatacttctgatgtaaaggaactaattccagagttctactacctaccagagatgtttgtcaacagtaatggatataatcttggagtcagagaagatgaagtagtggtaaatgatgttgatcttcccccttgggcaaaaaaacctgaagactttgtgcggatcaacaggatggccctagaaagtgaatttgtttcttgccaacttcatcagtggatcgaccttatatttggctataagcagcgaggaccagaagcagttcgtgctctgaatgtttttcactacttgacttatgaaggctctgtgaacctggatagtatcactgatcctgtgctcagggagattccagaagcttatttcattagagacccccacactttccttcttacaaaggactttattaaggccatggaggcacagatacagaactttggacagacgccatctcagttgcttattgagccacatccgcctcggagctctgccatgcacctgtgtttccttccacagagtccgctcatgtttaaagatcagatgcaacaggatgtgataatggtgctgaagtttccttcaaattctccagtaacccatgtggcagccaacactctgccccacttgaccatccccgcagtggtgacagtgacttgcagccgactctttgcagtgaatagatggcacaacacagtaggcctcagaggagctccaggatactccttggatcaagcccaccatcttcccattgaaatggatccattaatagccaataattcaggtgtaaacaaacggcagatcacagacctcgttgaccagagtatacaaatcaatgcacattgttttgtggtaacagcagataatcgctatattcttatctgtggattctgggataagagcttcagagtttattctacagaaacagggaaattgactcagattgtatttggccattgggatgtggtcacttgcttggccaggtccgagtcatacattggtggggactgctacatcgtgtccggatctcgagatgccaccctgctgctctggtactggagtgggcggcaccatatcataggagacaaccctaacagcagtgactatccggcaccaagagccgtcctcacaggccatgaccatgaagttgtctgtgtttctgtctgtgcagaacttgggcttgttatcagtggtgctaaagagggcccttgccttgtccacaccatcactggagatttgctgagagcccttgaaggaccagaaaactgcttattcccacgcttgatatctgtctccagcgaaggccactgtatcatatactatgaacgagggcgattcagtaatttcagcattaatgggaaacttttggctcaaatggagatcaatgattcaacacgggccattctcctgagcagtgacggccagaacctggtcaccggaggggacaatggggtagtagaggtctggcaggcctgtgacttcaagcaactgtacatttaccctggatgtgatgctggcattagagcaatggacttgtcccatgaccagaggactctgatcactggcatggcttctggtagcattgtagcttttaatatagattttaatcggtggcattatgagcatcagaacagatactgaagataaaggaagaaccaaaagccaagttaaagctgagagcacaagtgctgcatggaaaggcaatatctctggtggaaaaaactcgtctacatcgacctccgtttgtacattccatcacacccagcaatagctgtacattgtagtcagcaaccattttactttgtgtgttttttcacgactgaacaccagctgctatcaagcaagcttatatcatgtaaattatatgaattaggagatgttttggtaattatttcatatattgttgtttattgagaaaaggttgtaggatgtgtcacaagagacttttgacaattctgaggaaccttgtgtccagttgttacaaagtttaagctttgaacctaacctgcatcccatttccagcctcttttcaagctgagaaaaaaaaaaaaaaacacgtttgatactttgtacatcagatgcatcttatttaaaagggatacttttgtaaaagtaaaaccttgtataaagaacaaaatgtttcttaattttattgtggagttacaacttgcatgttccttactcctgttggcttgatggaacaggtgcattcacactatgaaacagaaagatctgtccaaggacacagcttgtatgaaagggttgaatttgggctccatcagtaatttttgacattttcaccaaaatatagtttgcactttttaatctaaagtcatcccttctgagtgaaatttgctcataaagcatttggatactaagccattatttgccattttgggtactttatacaaagaaaattcagccctaccctgcataatttgaagacacagcagaaagggggcttagggatgaggtcctggtttttcttgtataaataggagtcatgggcgttagttctgtagtaataacttcccagcacctggacatctcttccagagttatcccactggcttggtgtgtatacattaggggaggataatctgatgctaactttttttttctctttggttcttgaatagcttagtttctttaataacaagtcaaactttattacaacaataactgaagttattcttttaggttctcgtgaaattctcactgaaagccacattcttagcctaaggcatttcatcttttatgatataaaatgatggctatcaaatgattttccatacattgtactgatcaagttatacacccaggggtatatacactttcttcatgtttcttctttgtatatttggtgactgtatcgtcatagatgtacatattgtgtcggtagggctatgaggcatgttacaggaatgtaattttctcagaatttacactcactcgcagtcatttatttaaaaagataaaacaagataatgggttctttgtattggcactttgcaccagaaacatatcattatttattgatgtgattacttatttgttatccaccttgtactagtaagttttagcactgaattccttcttcactgttgtttgtatttatgaaattctgaaattatggggaatcagcgtaatgattaagttattcatcaccaggctgtaagcaatatcttgagtttgtagcttagaattgggaggatacttaacatctggaagacaagttcatttcatcttgagatcatggtgaaatattttggatatataaattccttaagctattgtaaccatgttttattgcaaagatgtaaaatatgccagatgtgtgtgagttggaaatcaaaaaaagaaaaataaaatatgcaaagaattc

SEQ ID NO: 158667 - DNA, 10738 bp, Homo sapiens
  Payload ID: 11048
  Gene Symbol: NBEA
  Gene Name: neurobeachin
  ENST ID: ENST00000379939
  CDS Start-End: 162-8993
cgggccgggctgaggcgcaggcggggagcgggcccggcgccgcggcgctggtggatgctggggctccgaggcgacggccggggggcgggggccgaggcaggtataacggtaccggcggcggcagcgccgctgctcttcccttctcctcaggaggggggccaatggctagcgagaagccgggcccgggcccggggctcgagcctcagcccgtggggctcattgccgtcggggccgctggcggaggcggcgggggcagcggtggtggcggcaccgggggcagcgggatgggggagctaaggggggcgtccggctccggctcggtgatgctccccgcggggatgattaacccttcggtgccgatccgcaacatccggatgaaattcgcagtgttgattggactcatacaggtcggagaggtcagcaacagggacatcgtggagacggtgctcaacctgctggttggtggagaatttgacttggagatgaactttattatccaggatgctgagagtataacatgtatgacagagcttttggagcactgtgatgtaacatgtcaagcagaaatatggagcatgtttacagccattctacgaaaaagtgttcggaatttacagactagcacagaagttgggctaattgaacaagtattgctgaaaatgagtgctgtagatgacatgatagcagatcttctagttgatatgttgggggttcttgccagctacagcatcactgtcaaggagttgaagcttttgttcagcatgcttcgaggagaaagtggaatctggccaagacatgcagtaaaattattatcagttcttaatcagatgccacagagacacggtcctgatacttttttcaatttccctggttgtagcgctgcggcaattgccttgcctcctattgcaaagtggccttatcagaatggcttcaccttaaacacttggtttcgtatggatccattaaataatattaatgttgataaggataaaccttatctttattgttttcgtactagcaaaggagttggttactctgctcattttgttggcaactgtttaatagtcacatcattgaagtccaaaggaaaaggttttcagcattgtgtgaaatatgattttcaaccacgcaagtggtacatgatcagcattgtccacatttacaatcgatggaggaacagtgaaattcggtgttatgttaatggacaactggtatcttatggtgatatggcttggcatgttaacacaaatgatagctatgacaagtgctttcttggatcatcagaaactgctgatgcaaatagggtattctgtggtcaacttggtgccgtgtatgtgttcagtgaagcactcaacccagcacagatatttgcaattcatcagttaggacctggatataagagtaccttcaagtttaaatctgagagtgatattcatttggcagaacatcataaacaggtgttatatgatgggaaacttgcaagtagcattgcctttacatataatgctaaggccactgatgctcagctctgcctggaatcatcaccaaaagagaatgcatcaatttttgtgcattccccacatgctctaatgcttcaggatgtgaaagcgatagtaacacattcaattcatagtgcaattcattcaattggagggattcaagtgctttttccactttttgcccaattggataataggcagctcaatgacagtcaagtggaaacaactgtctgtgctactctgttggcattcctggttgaactacttaaaagttcagtagccatgcaagaacagatgctgggtggaaaaggctttttagtcattggctacttacttgaaaagtcatcaagagttcatataactagagctgtcctggagcaatttttatcttttgcaaaataccttgatggtttatctcatggagcacctttgctgaagcagctttgtgatcacattttatttaacccagccatctggatacatacacctgcaaaggttcagctttccctatacacatatttgtctgctgaatttattggaactgctaccatctacaccaccatacgcagagtaggaacagtattacagctaatgcacaccttaaaatattactactgggttattaatcctgctgacagtagtggcattacacctaaaggattagatggtccccggccatcacaaaaagaaattatatcactgagggcatttatgctactttttctgaaacagctgatactaaaggatcgaggggtcaaggaagatgaacttcagagtatattaaattacctacttacgatgcatgaggatgaaaatattcatgatgtgctacagttactggtggctttaatgtcggaacacccagcctcaatgataccagcatttgatcaaagaaatggaataagggtgatctacaaattattggcttctaaaagtgaaagtatttgggttcaagctttgaaggttctgggatactttctgaagcatttaggtcacaagagaaaagttgaaattatgcacacccatagtcttttcactcttcttggagaaaggctgatgttgcatacaaacactgtgactgtcaccacatacaacacactttatgagatcttgacagaacaagtatgtactcaggtcgtacacaaaccacatccagagccagattctacagtgaaaattcagaatccaatgattcttaaagtggtggcaactttgttaaaaaactctacaccaagtgcagagctgatggaagttcgtcgtttatttttatctgatatgataaaacttttcagtaacagccgtgaaaatagaagatgcttattgcagtgttcagtgtggcaggattggatgttttctcttggctatatcaatcctaaaaattctgaggaacagaagattaccgaaatggtctacaatatcttccggattcttttgtatcatgcaataaaatatgaatggggaggctggagagtctgggtggataccctctcaatagcccattccaaggtcacttatgaagctcataaggaatacctagccaaaatgtatgaggaatatcaaagacaagaggaggaaaacattaaaaagggaaagaaagggaatgtgagcaccatctctggtctttcatcacagacaacaggagcaaaaggtggaatggaaattcgagagatagaagatctttcacaaagccagagcccagaaagtgagaccgattaccctgtcagcacagatactcgagacttactcatgtcaacaaaagtgtcagatgatattcttggaaattcagatagaccaggaagtggtgtacatgtggaagtacatgatcttttagtagatataaaagcagagaaagtggaagcaacagaagtaaagctcgatgatatggatttatcaccggagactttagtaggtggagagaatggtgcccttgtggaggttgaatctctgttggataatgtatatagtgctgctgttgagaaactccagaacaatgtacatggaagtgttggtatcattaaaaaaaatgaagaaaaggataatggtccattgataacattagcagatgagaaagaagaccttcccaatagtagtacatcatttctctttgataaaatacccaaacaggaggaaaaactacttcctgaactttctagcaatcacattattccaaatattcaggacacacaagtacatcttggtgttagtgatgatcttggattgcttgctcacatgaccggtagcgtagacttaacttgtacatccagtataatagaagaaaaagaattcaaaatccatacaacttcagatggaatgagcagtatttctgaaagagacttagcgtcatcaactaaggggctggagtatgctgaaatgactgctacaactctggaaactgagtcttctagtagcaaaattgtaccaaatattgatgcaggaagtataatttcagatactgaaaggtctgacgatggcaaagaatcaggaaaagaaatccgaaaaatccaaacaactactacgacacaagctgtgcagggtcggtctatcacccaacaagaccgagatctccgagttgatttaggatttcgaggaatgccaatgactgaggaacagcgacgccagtttagcccaggtccacggactacaatgtttcgtattcctgagtttaaatggtctccaatgcaccagcggcttctcactgatttactatttgcattagaaactgatgtacatgtttggaggagccattctacaaagtctgtaatggattttgtcaatagcaatgaaaatattatttttgtacataacacaattcacctcatttcccaaatggtagacaacatcatcattgcttgtggaggaattttacctttgctctctgctgctacatcaccaactacggaattggaaaatattgaagtgacacaaggcatgtcagctgagacagcagtaactttcctcagccggctgatggctatggttgatgtacttgtgtttgcaagctctctaaattttagtgagattgaagctgagaaaaacatgtcttctggaggtttaatgcgacagtgcctaagattagtttgttgtgttgctgtgagaaactgtttagaatgtcggcaaagacagagagacaggggaaataaatcttcccatggaagcagtaaacctcaggaagttcctcaaagtgtgactgctacagcagcttcgaagactccattggaaaatgttccaggtaacctttctcctattaaggatccggatagacttcttcaggatgttgatatcaatcgccttcgtgctgttgtctttcgggatgtggatgatagcaaacaagcacagttcttagctctggctgttgtttacttcatttcggttctgatggtttccaagtatcgtgacatattagaaccccagagagagactacaagaactggaagccaaccaggtagaaacatcaggcaagaaataaattcaccaacaagtacagttgtggtcataccatctatccctcatccaagtttgaaccatggattccttgccaagttaattcctgagcagagctttggccactcattttacaaagaaacacctgctgcatttccagacaccataaaagaaaaagaaacaccaactcctggtgaagatattcaggtagaaagttcaattccccatacagattcaggaattggagaggagcaagtggctagcatcctgaatggggcagaattagaaacaagtacaggccctgatgccatgagtgaactcttatccactttgtcatccgaagtgaagaaatcacaagagagcttaactgaaaatcctagtgaaacgttgaagcctgcaacatccatatctagcattagtcaaaccaaaggcatcaatgtgaaggaaatactgaaaagtcttgtggctgctccagttgaaatagcagaatgtggccctgaacctatcccatacccagatccagcattgaagagagaaacacaagctattcttcctatgcagtttcattcctttgacaggagtgttgtggtgcctgtaaagaaaccacctccaggtagtttagctgtaaccactgtgggagccactactgctggaagtgggctgccaacaggcagtacctctaatatatttgctgctactggagctacaccaaaaagtatgattaatacaacaggtgccgtggattcagggtcctcctcctcttcctcctcttctagttttgtgaatggtgctactagcaaaaaccttccagctgtacaaactgttgctccaatgccagaagattcagctgaaaatatgagcatcactgcaaaacttgaaagagcgttagaaaaagttgctcctcttcttcgtgaaatttttgtagactttgccccattcctatctcgtacacttcttggcagtcatggacaagagctattgatagaaggccttgtttgtatgaagtccagcacatctgtggttgagcttgttatgctgctttgttctcaggaatggcaaaactctattcagaagaatgcaggacttgcatttattgagctcatcaatgaaggaagattactgtgccatgctatgaaggaccatatagtccgtgttgcaaatgaagctgagtttattttgaacagacaaagagccgaggatgtacataaacatgcagagtttgagtcacagtgtgcccaatatgctgctgatagaagagaggaagaaaagatgtgtgaccatcttatcagtgctgctaaacatcgagatcatgtaacagcaaatcagctgaaacagaagattctcaatattctcacaaataaacatggtgcttggggagcagtttctcatagccaattgcatgatttctggcgtttggattactgggaagatgatcttcgtcgaaggagacgatttgttcgcaatgcatttggctccactcatgctgaagcattgctgaaagctgcaatagaatatggcacggaagaagatgtagtaaagtcaaagaaaacattcagaagtcaagcaatagtgaaccaaaatgcagagacagaacttatgctggaaggagacgatgatgcagtcagtctgctacaggagaaagaaattgacaaccttgcaggcccagtggttctcagcacccctgcccagctcatcgctcccgtggtggtggccaaggggactctctccatcaccacgacagaaatctacttcgaggtagatgaggatgattctgccttcaagaagatcgacacgaaagttcttgcatacactgagggacttcacggaaaatggatgttcagcgagatacgagctgtattttcaagacgttaccttctacaaaacactgctttggaagtatttatggcaaaccgaacctcagttatgtttaatttccctgatcaagcaacagtaaaaaaagttgtctatagcttgcctcgggttggagtagggaccagctatggtctgccacaagccaggaggatatcattggccactcctcgacagctttataaatcttccaatatgactcagcgctggcaaagaagggaaatttcaaacttcgaatatttgatgttccttaatactattgcaggacggacatataatgatctgaaccaatatccagtgtttccgtgggtgttaaccaactatgaatcagaagagttggacctgactcttccaggaaacttcagggatctatcaaagccaattggtgctttgaaccccaagagagctgtgttttatgcagagcgttatgagacatgggaagatgatcaaagcccaccctaccattataatacccattattcaacagcaacatctactttatcctggcttgttcgaattgaacctttcacaaccttcttcctcaatgcaaatgatggaaaatttgatcatccagatcgaaccttctcatccgttgcaaggtcttggagaactagtcagagagatacttctgatgtaaaggaactaattccagagttctactacctaccagagatgtttgtcaacagtaatggatataatcttggagtcagagaagatgaagtagtggtaaatgatgttgatcttcccccttgggcaaaaaaacctgaagactttgtgcggatcaacaggatggccctagaaagtgaatttgtttcttgccaacttcatcagtggatcgaccttatatttggctataagcagcgaggaccagaagcagttcgtgctctgaatgtttttcactacttgacttatgaaggctctgtgaacctggatagtatcactgatcctgtgctcagggaggccatggaggcacagatacagaactttggacagacgccatctcagttgcttattgagccacatccgcctcggagctctgccatgcacctgtgtttccttccacagagtccgctcatgtttaaagatcagatgcaacaggatgtgataatggtgctgaagtttccttcaaattctccagtaacccatgtggcagccaacactctgccccacttgaccatccccgcagtggtgacagtgacttgcagccgactctttgcagtgaatagatggcacaacacagtaggcctcagaggagctccaggatactccttggatcaagcccaccatcttcccattgaaatggatccattaatagccaataattcaggtgtaaacaaacggcagatcacagacctcgttgaccagagtatacaaatcaatgcacattgttttgtggtaacagcagataatcgctatattcttatctgtggattctgggataagagcttcagagtttattctacagaaacagggaaattgactcagattgtatttggccattgggatgtggtcacttgcttggccaggtccgagtcatacattggtggggactgctacatcgtgtccggatctcgagatgccaccctgctgctctggtactggagtgggcggcaccatatcataggagacaaccctaacagcagtgactatccggcaccaagagccgtcctcacaggccatgaccatgaagttgtctgtgtttctgtctgtgcagaacttgggcttgttatcagtggtgctaaagagggcccttgccttgtccacaccatcactggagatttgctgagagcccttgaaggaccagaaaactgcttattcccacgcttgatatctgtctccagcgaaggccactgtatcatatactatgaacgagggcgattcagtaatttcagcattaatgggaaacttttggctcaaatggagatcaatgattcaacacgggccattctcctgagcagtgacggccagaacctggtcaccggaggggacaatggggtagtagaggtctggcaggcctgtgacttcaagcaactgtacatttaccctggatgtgatgctggcattagagcaatggacttgtcccatgaccagaggactctgatcactggcatggcttctggtagcattgtagcttttaatatagattttaatcggtggcattatgagcatcagaacagatactgaagataaaggaagaaccaaaagccaagttaaagctgagagcacaagtgctgcatggaaaggcaatatctctggtggaaaaaactcgtctacatcgacctccgtttgtacattccatcacacccagcaatagctgtacattgtagtcagcaaccattttactttgtgtgttttttcacgactgaacaccagctgctatcaagcaagcttatatcatgtaaattatatgaattaggagatgttttggtaattatttcatatattgttgtttattgagaaaaggttgtaggatgtgtcacaagagacttttgacaattctgaggaaccttgtgtccagttgttacaaagtttaagctttgaacctaacctgcatcccatttccagcctcttttcaagctgagaaaaaaaaaaaaaaacacgtttgatactttgtacatcagatgcatcttatttaaaagggatacttttgtaaaagtaaaaccttgtataaagaacaaaatgtttcttaattttattgtggagttacaacttgcatgttccttactcctgttggcttgatggaacaggtgcattcacactatgaaacagaaagatctgtccaaggacacagcttgtatgaaagggttgaatttgggctccatcagtaatttttgacattttcaccaaaatatagtttgcactttttaatctaaagtcatcccttctgagtgaaatttgctcataaagcatttggatactaagccattatttgccattttgggtactttatacaaagaaaattcagccctaccctgcataatttgaagacacagcagaaagggggcttagggatgaggtcctggtttttcttgtataaataggagtcatgggcgttagttctgtagtaataacttcccagcacctggacatctcttccagagttatcccactggcttggtgtgtatacattaggggaggataatctgatgctaactttttttttctctttggttcttgaatagcttagtttctttaataacaagtcaaactttattacaacaataactgaagttattcttttaggttctcgtgaaattctcactgaaagccacattcttagcctaaggcatttcatcttttatgatataaaatgatggctatcaaatgattttccatacattgtactgatcaagttatacacccaggggtatatacactttcttcatgtttcttctttgtatatttggtgactgtatcgtcatagatgtacatattgtgtcggtagggctatgaggcatgttacaggaatgtaattttctcagaatttacactcactcgcagtcatttatttaaaaagataaaacaagataatgggttctttgtattggcactttgcaccagaaacatatcattatttattgatgtgattacttatttgttatccaccttgtactagtaagttttagcactgaattccttcttcactgttgtttgtatttatgaaattctgaaattatggggaatcagcgtaatgattaagttattcatcaccaggctgtaagcaatatcttgagtttgtagcttagaattgggaggatacttaacatctggaagacaagttcatttcatcttgagatcatggtgaaatattttggatatataaattccttaagctattgtaaccatgttttattgcaaagatgtaaaatatgccagatgtgtgtgagttggaaatcaaaaaaagaaaaataaaatatgcaaagaattca

SEQ ID NO: 158668 - DNA, 11119 bp, Homo sapiens
  Payload ID: 11048
  Gene Symbol: NBEA
  Gene Name: neurobeachin
  Uniprot ID: Q8NFP9
  ENST ID: ENST00000400445
  CDS Start-End: 535-9375
aggcagggggcggcaacatggcggagtgagcggcggcgtcggggcttcacaacaacagtggtggccgtagcagcggcggcagcagcgtcaatagcatcggccacagcctgagcttcagcaccggccagcgtcgtggccagctgctcgcgtcctcgggcttctcggagcggctgcagcatctccgcggggggcgggccgggccggacagaccgggagagggagagagcagaggcagcggcggcggcagcggcagcggcagcggcacacctgctgggcgggcacagccgcttgcccggcagcggttagcggtaccgccaccgccgagaataagcctgcggatcccccgccgcctccgcgggggagagcgccggagcgggccgggctgaggcgcaggcggggagcgggcccggcgccgcggcgctggtggatgctggggctccgaggcgacggccggggggcgggggccgaggcaggtataacggtaccggcggcggcagcgccgctgctcttcccttctcctcaggaggggggccaatggctagcgagaagccgggcccgggcccggggctcgagcctcagcccgtggggctcattgccgtcggggccgctggcggaggcggcgggggcagcggtggtggcggcaccgggggcagcgggatgggggagctaaggggggcgtccggctccggctcggtgatgctccccgcggggatgattaacccttcggtgccgatccgcaacatccggatgaaattcgcagtgttgattggactcatacaggtcggagaggtcagcaacagggacatcgtggagacggtgctcaacctgctggttggtggagaatttgacttggagatgaactttattatccaggatgctgagagtataacatgtatgacagagcttttggagcactgtgatgtaacatgtcaagcagaaatatggagcatgtttacagccattctacgaaaaagtgttcggaatttacagactagcacagaagttgggctaattgaacaagtattgctgaaaatgagtgctgtagatgacatgatagcagatcttctagttgatatgttgggggttcttgccagctacagcatcactgtcaaggagttgaagcttttgttcagcatgcttcgaggagaaagtggaatctggccaagacatgcagtaaaattattatcagttcttaatcagatgccacagagacacggtcctgatacttttttcaatttccctggttgtagcgctgcggcaattgccttgcctcctattgcaaagtggccttatcagaatggcttcaccttaaacacttggtttcgtatggatccattaaataatattaatgttgataaggataaaccttatctttattgttttcgtactagcaaaggagttggttactctgctcattttgttggcaactgtttaatagtcacatcattgaagtccaaaggaaaaggttttcagcattgtgtgaaatatgattttcaaccacgcaagtggtacatgatcagcattgtccacatttacaatcgatggaggaacagtgaaattcggtgttatgttaatggacaactggtatcttatggtgatatggcttggcatgttaacacaaatgatagctatgacaagtgctttcttggatcatcagaaactgctgatgcaaatagggtattctgtggtcaacttggtgccgtgtatgtgttcagtgaagcactcaacccagcacagatatttgcaattcatcagttaggacctggatataagagtaccttcaagtttaaatctgagagtgatattcatttggcagaacatcataaacaggtgttatatgatgggaaacttgcaagtagcattgcctttacatataatgctaaggccactgatgctcagctctgcctggaatcatcaccaaaagagaatgcatcaatttttgtgcattccccacatgctctaatgcttcaggatgtgaaagcgatagtaacacattcaattcatagtgcaattcattcaattggagggattcaagtgctttttccactttttgcccaattggataataggcagctcaatgacagtcaagtggaaacaactgtctgtgctactctgttggcattcctggttgaactacttaaaagttcagtagccatgcaagaacagatgctgggtggaaaaggctttttagtcattggctacttacttgaaaagtcatcaagagttcatataactagagctgtcctggagcaatttttatcttttgcaaaataccttgatggtttatctcatggagcacctttgctgaagcagctttgtgatcacattttatttaacccagccatctggatacatacacctgcaaaggttcagctttccctatacacatatttgtctgctgaatttattggaactgctaccatctacaccaccatacgcagagtaggaacagtattacagctaatgcacaccttaaaatattactactgggttattaatcctgctgacagtagtggcattacacctaaaggattagatggtccccggccatcacaaaaagaaattatatcactgagggcatttatgctactttttctgaaacagctgatactaaaggatcgaggggtcaaggaagatgaacttcagagtatattaaattacctacttacgatgcatgaggatgaaaatattcatgatgtgctacagttactggtggctttaatgtcggaacacccagcctcaatgataccagcatttgatcaaagaaatggaataagggtgatctacaaattattggcttctaaaagtgaaagtatttgggttcaagctttgaaggttctgggatactttctgaagcatttaggtcacaagagaaaagttgaaattatgcacacccatagtcttttcactcttcttggagaaaggctgatgttgcatacaaacactgtgactgtcaccacatacaacacactttatgagatcttgacagaacaagtatgtactcaggtcgtacacaaaccacatccagagccagattctacagtgaaaattcagaatccaatgattcttaaagtggtggcaactttgttaaaaaactctacaccaagtgcagagctgatggaagttcgtcgtttatttttatctgatatgataaaacttttcagtaacagccgtgaaaatagaagatgcttattgcagtgttcagtgtggcaggattggatgttttctcttggctatatcaatcctaaaaattctgaggaacagaagattaccgaaatggtctacaatatcttccggattcttttgtatcatgcaataaaatatgaatggggaggctggagagtctgggtggataccctctcaatagcccattccaaggtcacttatgaagctcataaggaatacctagccaaaatgtatgaggaatatcaaagacaagaggaggaaaacattaaaaagggaaagaaagggaatgtgagcaccatctctggtctttcatcacagacaacaggagcaaaaggtggaatggaaattcgagagatagaagatctttcacaaagccagagcccagaaagtgagaccgattaccctgtcagcacagatactcgagacttactcatgtcaacaaaagtgtcagatgatattcttggaaattcagatagaccaggaagtggtgtacatgtggaagtacatgatcttttagtagatataaaagcagagaaagtggaagcaacagaagtaaagctcgatgatatggatttatcaccggagactttagtaggtggagagaatggtgcccttgtggaggttgaatctctgttggataatgtatatagtgctgctgttgagaaactccagaacaatgtacatggaagtgttggtatcattaaaaaaaatgaagaaaaggataatggtccattgataacattagcagatgagaaagaagaccttcccaatagtagtacatcatttctctttgataaaatacccaaacaggaggaaaaactacttcctgaactttctagcaatcacattattccaaatattcaggacacacaagtacatcttggtgttagtgatgatcttggattgcttgctcacatgaccggtagcgtagacttaacttgtacatccagtataatagaagaaaaagaattcaaaatccatacaacttcagatggaatgagcagtatttctgaaagagacttagcgtcatcaactaaggggctggagtatgctgaaatgactgctacaactctggaaactgagtcttctagtagcaaaattgtaccaaatattgatgcaggaagtataatttcagatactgaaaggtctgacgatggcaaagaatcaggaaaagaaatccgaaaaatccaaacaactactacgacacaagctgtgcagggtcggtctatcacccaacaagaccgagatctccgagttgatttaggatttcgaggaatgccaatgactgaggaacagcgacgccagtttagcccaggtccacggactacaatgtttcgtattcctgagtttaaatggtctccaatgcaccagcggcttctcactgatttactatttgcattagaaactgatgtacatgtttggaggagccattctacaaagtctgtaatggattttgtcaatagcaatgaaaatattatttttgtacataacacaattcacctcatttcccaaatggtagacaacatcatcattgcttgtggaggaattttacctttgctctctgctgctacatcaccaactggttctaagacggaattggaaaatattgaagtgacacaaggcatgtcagctgagacagcagtaactttcctcagccggctgatggctatggttgatgtacttgtgtttgcaagctctctaaattttagtgagattgaagctgagaaaaacatgtcttctggaggtttaatgcgacagtgcctaagattagtttgttgtgttgctgtgagaaactgtttagaatgtcggcaaagacagagagacaggggaaataaatcttcccatggaagcagtaaacctcaggaagttcctcaaagtgtgactgctacagcagcttcgaagactccattggaaaatgttccaggtaacctttctcctattaaggatccggatagacttcttcaggatgttgatatcaatcgccttcgtgctgttgtctttcgggatgtggatgatagcaaacaagcacagttcttagctctggctgttgtttacttcatttcggttctgatggtttccaagtatcgtgacatattagaaccccagagagagactacaagaactggaagccaaccaggtagaaacatcaggcaagaaataaattcaccaacaagtacagttgtggtcataccatctatccctcatccaagtttgaaccatggattccttgccaagttaattcctgagcagagctttggccactcattttacaaagaaacacctgctgcatttccagacaccataaaagaaaaagaaacaccaactcctggtgaagatattcaggtagaaagttcaattccccatacagattcaggaattggagaggagcaagtggctagcatcctgaatggggcagaattagaaacaagtacaggccctgatgccatgagtgaactcttatccactttgtcatccgaagtgaagaaatcacaagagagcttaactgaaaatcctagtgaaacgttgaagcctgcaacatccatatctagcattagtcaaaccaaaggcatcaatgtgaaggaaatactgaaaagtcttgtggctgctccagttgaaatagcagaatgtggccctgaacctatcccatacccagatccagcattgaagagagaaacacaagctattcttcctatgcagtttcattcctttgacaggagtgttgtggtgcctgtaaagaaaccacctccaggtagtttagctgtaaccactgtgggagccactactgctggaagtgggctgccaacaggcagtacctctaatatatttgctgctactggagctacaccaaaaagtatgattaatacaacaggtgccgtggattcagggtcctcctcctcttcctcctcttctagttttgtgaatggtgctactagcaaaaaccttccagctgtacaaactgttgctccaatgccagaagattcagctgaaaatatgagcatcactgcaaaacttgaaagagcgttagaaaaagttgctcctcttcttcgtgaaatttttgtagactttgccccattcctatctcgtacacttcttggcagtcatggacaagagctattgatagaaggccttgtttgtatgaagtccagcacatctgtggttgagcttgttatgctgctttgttctcaggaatggcaaaactctattcagaagaatgcaggacttgcatttattgagctcatcaatgaaggaagattactgtgccatgctatgaaggaccatatagtccgtgttgcaaatgaagctgagtttattttgaacagacaaagagccgaggatgtacataaacatgcagagtttgagtcacagtgtgcccaatatgctgctgatagaagagaggaagaaaagatgtgtgaccatcttatcagtgctgctaaacatcgagatcatgtaacagcaaatcagctgaaacagaagattctcaatattctcacaaataaacatggtgcttggggagcagtttctcatagccaattgcatgatttctggcgtttggattactgggaagatgatcttcgtcgaaggagacgatttgttcgcaatgcatttggctccactcatgctgaagcattgctgaaagctgcaatagaatatggcacggaagaagatgtagtaaagtcaaagaaaacattcagaagtcaagcaatagtgaaccaaaatgcagagacagaacttatgctggaaggagacgatgatgcagtcagtctgctacaggagaaagaaattgacaaccttgcaggcccagtggttctcagcacccctgcccagctcatcgctcccgtggtggtggccaaggggactctctccatcaccacgacagaaatctacttcgaggtagatgaggatgattctgccttcaagaagatcgacacgaaagttcttgcatacactgagggacttcacggaaaatggatgttcagcgagatacgagctgtattttcaagacgttaccttctacaaaacactgctttggaagtatttatggcaaaccgaacctcagttatgtttaatttccctgatcaagcaacagtaaaaaaagttgtctatagcttgcctcgggttggagtagggaccagctatggtctgccacaagccaggaggatatcattggccactcctcgacagctttataaatcttccaatatgactcagcgctggcaaagaagggaaatttcaaacttcgaatatttgatgttccttaatactattgcaggacggacatataatgatctgaaccaatatccagtgtttccgtgggtgttaaccaactatgaatcagaagagttggacctgactcttccaggaaacttcagggatctatcaaagccaattggtgctttgaaccccaagagagctgtgttttatgcagagcgttatgagacatgggaagatgatcaaagcccaccctaccattataatacccattattcaacagcaacatctactttatcctggcttgttcgaattgaacctttcacaaccttcttcctcaatgcaaatgatggaaaatttgatcatccagatcgaaccttctcatccgttgcaaggtcttggagaactagtcagagagatacttctgatgtaaaggaactaattccagagttctactacctaccagagatgtttgtcaacagtaatggatataatcttggagtcagagaagatgaagtagtggtaaatgatgttgatcttcccccttgggcaaaaaaacctgaagactttgtgcggatcaacaggatggccctagaaagtgaatttgtttcttgccaacttcatcagtggatcgaccttatatttggctataagcagcgaggaccagaagcagttcgtgctctgaatgtttttcactacttgacttatgaaggctctgtgaacctggatagtatcactgatcctgtgctcagggaggccatggaggcacagatacagaactttggacagacgccatctcagttgcttattgagccacatccgcctcggagctctgccatgcacctgtgtttccttccacagagtccgctcatgtttaaagatcagatgcaacaggatgtgataatggtgctgaagtttccttcaaattctccagtaacccatgtggcagccaacactctgccccacttgaccatccccgcagtggtgacagtgacttgcagccgactctttgcagtgaatagatggcacaacacagtaggcctcagaggagctccaggatactccttggatcaagcccaccatcttcccattgaaatggatccattaatagccaataattcaggtgtaaacaaacggcagatcacagacctcgttgaccagagtatacaaatcaatgcacattgttttgtggtaacagcagataatcgctatattcttatctgtggattctgggataagagcttcagagtttattctacagaaacagggaaattgactcagattgtatttggccattgggatgtggtcacttgcttggccaggtccgagtcatacattggtggggactgctacatcgtgtccggatctcgagatgccaccctgctgctctggtactggagtgggcggcaccatatcataggagacaaccctaacagcagtgactatccggcaccaagagccgtcctcacaggccatgaccatgaagttgtctgtgtttctgtctgtgcagaacttgggcttgttatcagtggtgctaaagagggcccttgccttgtccacaccatcactggagatttgctgagagcccttgaaggaccagaaaactgcttattcccacgcttgatatctgtctccagcgaaggccactgtatcatatactatgaacgagggcgattcagtaatttcagcattaatgggaaacttttggctcaaatggagatcaatgattcaacacgggccattctcctgagcagtgacggccagaacctggtcaccggaggggacaatggggtagtagaggtctggcaggcctgtgacttcaagcaactgtacatttaccctggatgtgatgctggcattagagcaatggacttgtcccatgaccagaggactctgatcactggcatggcttctggtagcattgtagcttttaatatagattttaatcggtggcattatgagcatcagaacagatactgaagataaaggaagaaccaaaagccaagttaaagctgagagcacaagtgctgcatggaaaggcaatatctctggtggaaaaaactcgtctacatcgacctccgtttgtacattccatcacacccagcaatagctgtacattgtagtcagcaaccattttactttgtgtgttttttcacgactgaacaccagctgctatcaagcaagcttatatcatgtaaattatatgaattaggagatgttttggtaattatttcatatattgttgtttattgagaaaaggttgtaggatgtgtcacaagagacttttgacaattctgaggaaccttgtgtccagttgttacaaagtttaagctttgaacctaacctgcatcccatttccagcctcttttcaagctgagaaaaaaaaaaaaaaacacgtttgatactttgtacatcagatgcatcttatttaaaagggatacttttgtaaaagtaaaaccttgtataaagaacaaaatgtttcttaattttattgtggagttacaacttgcatgttccttactcctgttggcttgatggaacaggtgcattcacactatgaaacagaaagatctgtccaaggacacagcttgtatgaaagggttgaatttgggctccatcagtaatttttgacattttcaccaaaatatagtttgcactttttaatctaaagtcatcccttctgagtgaaatttgctcataaagcatttggatactaagccattatttgccattttgggtactttatacaaagaaaattcagccctaccctgcataatttgaagacacagcagaaagggggcttagggatgaggtcctggtttttcttgtataaataggagtcatgggcgttagttctgtagtaataacttcccagcacctggacatctcttccagagttatcccactggcttggtgtgtatacattaggggaggataatctgatgctaactttttttttctctttggttcttgaatagcttagtttctttaataacaagtcaaactttattacaacaataactgaagttattcttttaggttctcgtgaaattctcactgaaagccacattcttagcctaaggcatttcatcttttatgatataaaatgatggctatcaaatgattttccatacattgtactgatcaagttatacacccaggggtatatacactttcttcatgtttcttctttgtatatttggtgactgtatcgtcatagatgtacatattgtgtcggtagggctatgaggcatgttacaggaatgtaattttctcagaatttacactcactcgcagtcatttatttaaaaagataaaacaagataatgggttctttgtattggcactttgcaccagaaacatatcattatttattgatgtgattacttatttgttatccaccttgtactagtaagttttagcactgaattccttcttcactgttgtttgtatttatgaaattctgaaattatggggaatcagcgtaatgattaagttattcatcaccaggctgtaagcaatatcttgagtttgtagcttagaattgggaggatacttaacatctggaagacaagttcatttcatcttgagatcatggtgaaatattttggatatataaattccttaagctattgtaaccatgttttattgcaaagatgtaaaatatgccagatgtgtgtgagttggaaatcaaaaaaagaaaaataaaatatgcaaagaattc

SEQ ID NO: 158669 - DNA, 4089 bp, Homo sapiens
  Payload ID: 11048
  Gene Symbol: NBEA
  Gene Name: neurobeachin
  Uniprot ID: Q8NFP9
  ENST ID: ENST00000537702
  CDS Start-End: 126-2345
aatcgccactgggctcgtcacgacagcctccttcagctccaacccggctaattaatccccactcatggatataggcacacaaactaaaggttcttgcatacactgagggacttcacggaaaatggatgttcagcgagatacgagctgtattttcaagacgttaccttctacaaaacactgctttggaagtatttatggcaaaccgaacctcagttatgtttaatttccctgatcaagcaacagtaaaaaaagttgtctatagcttgcctcgggttggagtagggaccagctatggtctgccacaagccaggaggatatcattggccactcctcgacagctttataaatcttccaatatgactcagcgctggcaaagaagggaaatttcaaacttcgaatatttgatgttccttaatactattgcaggacggacatataatgatctgaaccaatatccagtgtttccgtgggtgttaaccaactatgaatcagaagagttggacctgactcttccaggaaacttcagggatctatcaaagccaattggtgctttgaaccccaagagagctgtgttttatgcagagcgttatgagacatgggaagatgatcaaagcccaccctaccattataatacccattattcaacagcaacatctactttatcctggcttgttcgaattgaacctttcacaaccttcttcctcaatgcaaatgatggaaaatttgatcatccagatcgaaccttctcatccgttgcaaggtcttggagaactagtcagagagatacttctgatgtaaaggaactaattccagagttctactacctaccagagatgtttgtcaacagtaatggatataatcttggagtcagagaagatgaagtagtggtaaatgatgttgatcttcccccttgggcaaaaaaacctgaagactttgtgcggatcaacaggatggccctagaaagtgaatttgtttcttgccaacttcatcagtggatcgaccttatatttggctataagcagcgaggaccagaagcagttcgtgctctgaatgtttttcactacttgacttatgaaggctctgtgaacctggatagtatcactgatcctgtgctcagggaggccatggaggcacagatacagaactttggacagacgccatctcagttgcttattgagccacatccgcctcggagctctgccatgcacctgtgtttccttccacagagtccgctcatgtttaaagatcagatgcaacaggatgtgataatggtgctgaagtttccttcaaattctccagtaacccatgtggcagccaacactctgccccacttgaccatccccgcagtggtgacagtgacttgcagccgactctttgcagtgaatagatggcacaacacagtaggcctcagaggagctccaggatactccttggatcaagcccaccatcttcccattgaaatggatccattaatagccaataattcaggtgtaaacaaacggcagatcacagacctcgttgaccagagtatacaaatcaatgcacattgttttgtggtaacagcagataatcgctatattcttatctgtggattctgggataagagcttcagagtttattctacagaaacagggaaattgactcagattgtatttggccattgggatgtggtcacttgcttggccaggtccgagtcatacattggtggggactgctacatcgtgtccggatctcgagatgccaccctgctgctctggtactggagtgggcggcaccatatcataggagacaaccctaacagcagtgactatccggcaccaagagccgtcctcacaggccatgaccatgaagttgtctgtgtttctgtctgtgcagaacttgggcttgttatcagtggtgctaaagagggcccttgccttgtccacaccatcactggagatttgctgagagcccttgaaggaccagaaaactgcttattcccacgcttgatatctgtctccagcgaaggccactgtatcatatactatgaacgagggcgattcagtaatttcagcattaatgggaaacttttggctcaaatggagatcaatgattcaacacgggccattctcctgagcagtgacggccagaacctggtcaccggaggggacaatggggtagtagaggtctggcaggcctgtgacttcaagcaactgtacatttaccctggatgtgatgctggcattagagcaatggacttgtcccatgaccagaggactctgatcactggcatggcttctggtagcattgtagcttttaatatagattttaatcggtggcattatgagcatcagaacagatactgaagataaaggaagaaccaaaagccaagttaaagctgagagcacaagtgctgcatggaaaggcaatatctctggtggaaaaaactcgtctacatcgacctccgtttgtacattccatcacacccagcaatagctgtacattgtagtcagcaaccattttactttgtgtgttttttcacgactgaacaccagctgctatcaagcaagcttatatcatgtaaattatatgaattaggagatgttttggtaattatttcatatattgttgtttattgagaaaaggttgtaggatgtgtcacaagagacttttgacaattctgaggaaccttgtgtccagttgttacaaagtttaagctttgaacctaacctgcatcccatttccagcctcttttcaagctgagaaaaaaaaaaaaaaacacgtttgatactttgtacatcagatgcatcttatttaaaagggatacttttgtaaaagtaaaaccttgtataaagaacaaaatgtttcttaattttattgtggagttacaacttgcatgttccttactcctgttggcttgatggaacaggtgcattcacactatgaaacagaaagatctgtccaaggacacagcttgtatgaaagggttgaatttgggctccatcagtaatttttgacattttcaccaaaatatagtttgcactttttaatctaaagtcatcccttctgagtgaaatttgctcataaagcatttggatactaagccattatttgccattttgggtactttatacaaagaaaattcagccctaccctgcataatttgaagacacagcagaaagggggcttagggatgaggtcctggtttttcttgtataaataggagtcatgggcgttagttctgtagtaataacttcccagcacctggacatctcttccagagttatcccactggcttggtgtgtatacattaggggaggataatctgatgctaactttttttttctctttggttcttgaatagcttagtttctttaataacaagtcaaactttattacaacaataactgaagttattcttttaggttctcgtgaaattctcactgaaagccacattcttagcctaaggcatttcatcttttatgatataaaatgatggctatcaaatgattttccatacattgtactgatcaagttatacacccaggggtatatacactttcttcatgtttcttctttgtatatttggtgactgtatcgtcatagatgtacatattgtgtcggtagggctatgaggcatgttacaggaatgtaattttctcagaatttacactcactcgcagtcatttatttaaaaagataaaacaagataatgggttctttgtattggcactttgcaccagaaacatatcattatttattgatgtgattacttatttgttatccaccttgtactagtaagttttagcactgaattccttcttcactgttgtttgtatttatgaaattctgaaattatggggaatcagcgtaatgattaagttattcatcaccaggctgtaagcaatatcttgagtttgtagcttagaattgggaggatacttaacatctggaagacaagttcatttcatcttgagatcatggtgaaatattttggatatataaattccttaagctattgtaaccatgttttattgcaaagatgtaaaatatgccagatgtgtgtgagttggaaatcaaaaaaagaaaaataaaatatgcaaagaattc

SEQ ID NO: 158670 - DNA, 10791 bp, Homo sapiens
  Payload ID: 11048
  Gene Symbol: NBEA
  Gene Name: neurobeachin
  ENST ID: ENST00000629018
  CDS Start-End: 207-9047
gcggcgtcggggcttcacaacaacagtggtggccgtagcagcggccgggccgggctgaggcgcaggcggggagcgggcccggcgccgcggcgctggtggatgctggggctccgaggcgacggccggggggcgggggccgaggcaggtataacggtaccggcggcggcagcgccgctgctcttcccttctcctcaggaggggggccaatggctagcgagaagccgggcccgggcccggggctcgagcctcagcccgtggggctcattgccgtcggggccgctggcggaggcggcgggggcagcggtggtggcggcaccgggggcagcgggatgggggagctaaggggggcgtccggctccggctcggtgatgctccccgcggggatgattaacccttcggtgccgatccgcaacatccggatgaaattcgcagtgttgattggactcatacaggtcggagaggtcagcaacagggacatcgtggagacggtgctcaacctgctggttggtggagaatttgacttggagatgaactttattatccaggatgctgagagtataacatgtatgacagagcttttggagcactgtgatgtaacatgtcaagcagaaatatggagcatgtttacagccattctacgaaaaagtgttcggaatttacagactagcacagaagttgggctaattgaacaagtattgctgaaaatgagtgctgtagatgacatgatagcagatcttctagttgatatgttgggggttcttgccagctacagcatcactgtcaaggagttgaagcttttgttcagcatgcttcgaggagaaagtggaatctggccaagacatgcagtaaaattattatcagttcttaatcagatgccacagagacacggtcctgatacttttttcaatttccctggttgtagcgctgcggcaattgccttgcctcctattgcaaagtggccttatcagaatggcttcaccttaaacacttggtttcgtatggatccattaaataatattaatgttgataaggataaaccttatctttattgttttcgtactagcaaaggagttggttactctgctcattttgttggcaactgtttaatagtcacatcattgaagtccaaaggaaaaggttttcagcattgtgtgaaatatgattttcaaccacgcaagtggtacatgatcagcattgtccacatttacaatcgatggaggaacagtgaaattcggtgttatgttaatggacaactggtatcttatggtgatatggcttggcatgttaacacaaatgatagctatgacaagtgctttcttggatcatcagaaactgctgatgcaaatagggtattctgtggtcaacttggtgccgtgtatgtgttcagtgaagcactcaacccagcacagatatttgcaattcatcagttaggacctggatataagagtaccttcaagtttaaatctgagagtgatattcatttggcagaacatcataaacaggtgttatatgatgggaaacttgcaagtagcattgcctttacatataatgctaaggccactgatgctcagctctgcctggaatcatcaccaaaagagaatgcatcaatttttgtgcattccccacatgctctaatgcttcaggatgtgaaagcgatagtaacacattcaattcatagtgcaattcattcaattggagggattcaagtgctttttccactttttgcccaattggataataggcagctcaatgacagtcaagtggaaacaactgtctgtgctactctgttggcattcctggttgaactacttaaaagttcagtagccatgcaagaacagatgctgggtggaaaaggctttttagtcattggctacttacttgaaaagtcatcaagagttcatataactagagctgtcctggagcaatttttatcttttgcaaaataccttgatggtttatctcatggagcacctttgctgaagcagctttgtgatcacattttatttaacccagccatctggatacatacacctgcaaaggttcagctttccctatacacatatttgtctgctgaatttattggaactgctaccatctacaccaccatacgcagagtaggaacagtattacagctaatgcacaccttaaaatattactactgggttattaatcctgctgacagtagtggcattacacctaaaggattagatggtccccggccatcacaaaaagaaattatatcactgagggcatttatgctactttttctgaaacagctgatactaaaggatcgaggggtcaaggaagatgaacttcagagtatattaaattacctacttacgatgcatgaggatgaaaatattcatgatgtgctacagttactggtggctttaatgtcggaacacccagcctcaatgataccagcatttgatcaaagaaatggaataagggtgatctacaaattattggcttctaaaagtgaaagtatttgggttcaagctttgaaggttctgggatactttctgaagcatttaggtcacaagagaaaagttgaaattatgcacacccatagtcttttcactcttcttggagaaaggctgatgttgcatacaaacactgtgactgtcaccacatacaacacactttatgagatcttgacagaacaagtatgtactcaggtcgtacacaaaccacatccagagccagattctacagtgaaaattcagaatccaatgattcttaaagtggtggcaactttgttaaaaaactctacaccaagtgcagagctgatggaagttcgtcgtttatttttatctgatatgataaaacttttcagtaacagccgtgaaaatagaagatgcttattgcagtgttcagtgtggcaggattggatgttttctcttggctatatcaatcctaaaaattctgaggaacagaagattaccgaaatggtctacaatatcttccggattcttttgtatcatgcaataaaatatgaatggggaggctggagagtctgggtggataccctctcaatagcccattccaaggtcacttatgaagctcataaggaatacctagccaaaatgtatgaggaatatcaaagacaagaggaggaaaacattaaaaagggaaagaaagggaatgtgagcaccatctctggtctttcatcacagacaacaggagcaaaaggtggaatggaaattcgagagatagaagatctttcacaaagccagagcccagaaagtgagaccgattaccctgtcagcacagatactcgagacttactcatgtcaacaaaagtgtcagatgatattcttggaaattcagatagaccaggaagtggtgtacatgtggaagtacatgatcttttagtagatataaaagcagagaaagtggaagcaacagaagtaaagctcgatgatatggatttatcaccggagactttagtaggtggagagaatggtgcccttgtggaggttgaatctctgttggataatgtatatagtgctgctgttgagaaactccagaacaatgtacatggaagtgttggtatcattaaaaaaaatgaagaaaaggataatggtccattgataacattagcagatgagaaagaagaccttcccaatagtagtacatcatttctctttgataaaatacccaaacaggaggaaaaactacttcctgaactttctagcaatcacattattccaaatattcaggacacacaagtacatcttggtgttagtgatgatcttggattgcttgctcacatgaccggtagcgtagacttaacttgtacatccagtataatagaagaaaaagaattcaaaatccatacaacttcagatggaatgagcagtatttctgaaagagacttagcgtcatcaactaaggggctggagtatgctgaaatgactgctacaactctggaaactgagtcttctagtagcaaaattgtaccaaatattgatgcaggaagtataatttcagatactgaaaggtctgacgatggcaaagaatcaggaaaagaaatccgaaaaatccaaacaactactacgacacaagctgtgcagggtcggtctatcacccaacaagaccgagatctccgagttgatttaggatttcgaggaatgccaatgactgaggaacagcgacgccagtttagcccaggtccacggactacaatgtttcgtattcctgagtttaaatggtctccaatgcaccagcggcttctcactgatttactatttgcattagaaactgatgtacatgtttggaggagccattctacaaagtctgtaatggattttgtcaatagcaatgaaaatattatttttgtacataacacaattcacctcatttcccaaatggtagacaacatcatcattgcttgtggaggaattttacctttgctctctgctgctacatcaccaactgtaagtaaaacggaattggaaaatattgaagtgacacaaggcatgtcagctgagacagcagtaactttcctcagccggctgatggctatggttgatgtacttgtgtttgcaagctctctaaattttagtgagattgaagctgagaaaaacatgtcttctggaggtttaatgcgacagtgcctaagattagtttgttgtgttgctgtgagaaactgtttagaatgtcggcaaagacagagagacaggggaaataaatcttcccatggaagcagtaaacctcaggaagttcctcaaagtgtgactgctacagcagcttcgaagactccattggaaaatgttccaggtaacctttctcctattaaggatccggatagacttcttcaggatgttgatatcaatcgccttcgtgctgttgtctttcgggatgtggatgatagcaaacaagcacagttcttagctctggctgttgtttacttcatttcggttctgatggtttccaagtatcgtgacatattagaaccccagagagagactacaagaactggaagccaaccaggtagaaacatcaggcaagaaataaattcaccaacaagtacagttgtggtcataccatctatccctcatccaagtttgaaccatggattccttgccaagttaattcctgagcagagctttggccactcattttacaaagaaacacctgctgcatttccagacaccataaaagaaaaagaaacaccaactcctggtgaagatattcaggtagaaagttcaattccccatacagattcaggaattggagaggagcaagtggctagcatcctgaatggggcagaattagaaacaagtacaggccctgatgccatgagtgaactcttatccactttgtcatccgaagtgaagaaatcacaagagagcttaactgaaaatcctagtgaaacgttgaagcctgcaacatccatatctagcattagtcaaaccaaaggcatcaatgtgaaggaaatactgaaaagtcttgtggctgctccagttgaaatagcagaatgtggccctgaacctatcccatacccagatccagcattgaagagagaaacacaagctattcttcctatgcagtttcattcctttgacaggagtgttgtggtgcctgtaaagaaaccacctccaggtagtttagctgtaaccactgtgggagccactactgctggaagtgggctgccaacaggcagtacctctaatatatttgctgctactggagctacaccaaaaagtatgattaatacaacaggtgccgtggattcagggtcctcctcctcttcctcctcttctagttttgtgaatggtgctactagcaaaaaccttccagctgtacaaactgttgctccaatgccagaagattcagctgaaaatatgagcatcactgcaaaacttgaaagagcgttagaaaaagttgctcctcttcttcgtgaaatttttgtagactttgccccattcctatctcgtacacttcttggcagtcatggacaagagctattgatagaaggccttgtttgtatgaagtccagcacatctgtggttgagcttgttatgctgctttgttctcaggaatggcaaaactctattcagaagaatgcaggacttgcatttattgagctcatcaatgaaggaagattactgtgccatgctatgaaggaccatatagtccgtgttgcaaatgaagctgagtttattttgaacagacaaagagccgaggatgtacataaacatgcagagtttgagtcacagtgtgcccaatatgctgctgatagaagagaggaagaaaagatgtgtgaccatcttatcagtgctgctaaacatcgagatcatgtaacagcaaatcagctgaaacagaagattctcaatattctcacaaataaacatggtgcttggggagcagtttctcatagccaattgcatgatttctggcgtttggattactgggaagatgatcttcgtcgaaggagacgatttgttcgcaatgcatttggctccactcatgctgaagcattgctgaaagctgcaatagaatatggcacggaagaagatgtagtaaagtcaaagaaaacattcagaagtcaagcaatagtgaaccaaaatgcagagacagaacttatgctggaaggagacgatgatgcagtcagtctgctacaggagaaagaaattgacaaccttgcaggcccagtggttctcagcacccctgcccagctcatcgctcccgtggtggtggccaaggggactctctccatcaccacgacagaaatctacttcgaggtagatgaggatgattctgccttcaagaagatcgacacgaaagttcttgcatacactgagggacttcacggaaaatggatgttcagcgagatacgagctgtattttcaagacgttaccttctacaaaacactgctttggaagtatttatggcaaaccgaacctcagttatgtttaatttccctgatcaagcaacagtaaaaaaagttgtctatagcttgcctcgggttggagtagggaccagctatggtctgccacaagccaggaggatatcattggccactcctcgacagctttataaatcttccaatatgactcagcgctggcaaagaagggaaatttcaaacttcgaatatttgatgttccttaatactattgcaggacggacatataatgatctgaaccaatatccagtgtttccgtgggtgttaaccaactatgaatcagaagagttggacctgactcttccaggaaacttcagggatctatcaaagccaattggtgctttgaaccccaagagagctgtgttttatgcagagcgttatgagacatgggaagatgatcaaagcccaccctaccattataatacccattattcaacagcaacatctactttatcctggcttgttcgaattgaacctttcacaaccttcttcctcaatgcaaatgatggaaaatttgatcatccagatcgaaccttctcatccgttgcaaggtcttggagaactagtcagagagatacttctgatgtaaaggaactaattccagagttctactacctaccagagatgtttgtcaacagtaatggatataatcttggagtcagagaagatgaagtagtggtaaatgatgttgatcttcccccttgggcaaaaaaacctgaagactttgtgcggatcaacaggatggccctagaaagtgaatttgtttcttgccaacttcatcagtggatcgaccttatatttggctataagcagcgaggaccagaagcagttcgtgctctgaatgtttttcactacttgacttatgaaggctctgtgaacctggatagtatcactgatcctgtgctcagggaggccatggaggcacagatacagaactttggacagacgccatctcagttgcttattgagccacatccgcctcggagctctgccatgcacctgtgtttccttccacagagtccgctcatgtttaaagatcagatgcaacaggatgtgataatggtgctgaagtttccttcaaattctccagtaacccatgtggcagccaacactctgccccacttgaccatccccgcagtggtgacagtgacttgcagccgactctttgcagtgaatagatggcacaacacagtaggcctcagaggagctccaggatactccttggatcaagcccaccatcttcccattgaaatggatccattaatagccaataattcaggtgtaaacaaacggcagatcacagacctcgttgaccagagtatacaaatcaatgcacattgttttgtggtaacagcagataatcgctatattcttatctgtggattctgggataagagcttcagagtttattctacagaaacagggaaattgactcagattgtatttggccattgggatgtggtcacttgcttggccaggtccgagtcatacattggtggggactgctacatcgtgtccggatctcgagatgccaccctgctgctctggtactggagtgggcggcaccatatcataggagacaaccctaacagcagtgactatccggcaccaagagccgtcctcacaggccatgaccatgaagttgtctgtgtttctgtctgtgcagaacttgggcttgttatcagtggtgctaaagagggcccttgccttgtccacaccatcactggagatttgctgagagcccttgaaggaccagaaaactgcttattcccacgcttgatatctgtctccagcgaaggccactgtatcatatactatgaacgagggcgattcagtaatttcagcattaatgggaaacttttggctcaaatggagatcaatgattcaacacgggccattctcctgagcagtgacggccagaacctggtcaccggaggggacaatggggtagtagaggtctggcaggcctgtgacttcaagcaactgtacatttaccctggatgtgatgctggcattagagcaatggacttgtcccatgaccagaggactctgatcactggcatggcttctggtagcattgtagcttttaatatagattttaatcggtggcattatgagcatcagaacagatactgaagataaaggaagaaccaaaagccaagttaaagctgagagcacaagtgctgcatggaaaggcaatatctctggtggaaaaaactcgtctacatcgacctccgtttgtacattccatcacacccagcaatagctgtacattgtagtcagcaaccattttactttgtgtgttttttcacgactgaacaccagctgctatcaagcaagcttatatcatgtaaattatatgaattaggagatgttttggtaattatttcatatattgttgtttattgagaaaaggttgtaggatgtgtcacaagagacttttgacaattctgaggaaccttgtgtccagttgttacaaagtttaagctttgaacctaacctgcatcccatttccagcctcttttcaagctgagaaaaaaaaaaaaaaacacgtttgatactttgtacatcagatgcatcttatttaaaagggatacttttgtaaaagtaaaaccttgtataaagaacaaaatgtttcttaattttattgtggagttacaacttgcatgttccttactcctgttggcttgatggaacaggtgcattcacactatgaaacagaaagatctgtccaaggacacagcttgtatgaaagggttgaatttgggctccatcagtaatttttgacattttcaccaaaatatagtttgcactttttaatctaaagtcatcccttctgagtgaaatttgctcataaagcatttggatactaagccattatttgccattttgggtactttatacaaagaaaattcagccctaccctgcataatttgaagacacagcagaaagggggcttagggatgaggtcctggtttttcttgtataaataggagtcatgggcgttagttctgtagtaataacttcccagcacctggacatctcttccagagttatcccactggcttggtgtgtatacattaggggaggataatctgatgctaactttttttttctctttggttcttgaatagcttagtttctttaataacaagtcaaactttattacaacaataactgaagttattcttttaggttctcgtgaaattctcactgaaagccacattcttagcctaaggcatttcatcttttatgatataaaatgatggctatcaaatgattttccatacattgtactgatcaagttatacacccaggggtatatacactttcttcatgtttcttctttgtatatttggtgactgtatcgtcatagatgtacatattgtgtcggtagggctatgaggcatgttacaggaatgtaattttctcagaatttacactcactcgcagtcatttatttaaaaagataaaacaagataatgggttctttgtattggcactttgcaccagaaacatatcattatttattgatgtgattacttatttgttatccaccttgtactagtaagttttagcactgaattccttcttcactgttgtttgtatttatgaaattctgaaattatggggaatcagcgtaatgattaagttattcatcaccaggctgtaagcaatatcttgagtttgtagcttagaattgggaggatacttaacatctggaagacaagttcatttcatcttgagatcatggtgaaatattttggatatataaattccttaagctattgtaaccatgttttattgcaaagatgtaaaatatgccagatgtgtgtgagttggaaatcaaaaaaagaaaaataaaatatgcaaagaattc

SEQ ID NO: 158671 - DNA, 2240 bp, Homo sapiens
  Payload ID: 11049
  Gene Symbol: NBEAL1
  Gene Name: neurobeachin-like 1
  ENST ID: ENST00000414576
  CDS Start-End: 1-2130
gagatttttcatgttgaccaatccaactactttctcaatttcaaaaaagaggttagaaacaaaatatatagccgactgttgtcacttcattccccaaatagttattatggaagcagatcaccacaggagttattcaaagcatcaggattgacacagtttccctggattttacaagattatacttcggaagagttggaccttaataaccctgctgtatttcgagatctttccaaaccaattggggtagttaatgaaaaaaacgccaaagctatgagagaaaaatatgaaaattttgaggatcctatgggaactattgataagtttcactatggtactcactattcaaattctgcgggggtcatgcactatctcattcgtgtagaaccgttcaccaccctccacatccaacttcagagtggaaggtttgactgtgcagatcgacagttccattctattcctgctacctggcaagctcttatggataatccatatgatgttaaagaacttattcctgaattcttctatttcccagagtttttggaaaatcaaaatcaatttaacttgggtcgtctacagatttccaaagaattagtaaatgatgtcattctcccgaaatgggctaaatcagctgaagatttcatctataaacataggaaagctttggagtctgaatatgtttcagctcatcttcatgaatggatagatctgatctttggctataaacagaggggaccagctgcagtagaggcactcaacgttttctattattgtagttatgaaggagctgtggatctggatgccttaacagatgagaaagaaagaaaagccttagaagggatgattaataattttgggcaaacaccctgtcaattattaaaggaaccacaccctccaagattatcagcagaagaagcagtgcagaagccaaccaaaatagacacttcaaccctaaacctgtttcaacaccttcctgaactcaagtcattttttatagaggggattagtgatggtattccactattaaaggccaccatccccaaaaatcagtatcgttcttttatgtctcaaggcagccctgagttactgataacaataagcatgaattatgttattggaacccatggatggttgccttatgacagaaacatttctaattactttacattcatcaaggatcaaactgtgacaaatccaaaaactcagcgcagtataaatggttcttttgctcccgggctagagatcacttctaagctatttgtagtatcacatgatgcaaagttgctcttcagtgctggatactgggataatagcattcaagtgatgtcacttacaaaaggcaaaattatctcacacatcatccggcatatggatattgtgacttgcttagctacagattactgtggaatacatttgatttctggttccagagatactacatgtatgatatggcaaataacacaacagggaggtgttcctgtgggcttagcatctaaaccttttcagattctttatggacacaccaacgaggtactgagtgtcggcatcagcactgagctagacatggcagtgtcaggatcaagggatggaacggtgattatacataccattcagaaaggtcagtacatgaggactttacgaccaccttgtgagagttctctgttcctgaccattcctaatttggctatatcttgggaaggacatattgttgtctactccagcactgaagaaaagaccaccctcaaggataagaatgcattacatctgttttctataaatggcaagtatctagggtctcaaatcctgaaggaacaagtatcagatatatgtataatcggagaacacattgtcacaggcagcatacaaggattcctgtctataagagatctccacagcttgaatctcagcatcaacccattagccatgcgactgcctatccattgtgtttgtgtcaccaaagaatacagccatattcttgtaggtttagaagatggcaaattgattgtagtgggtgttggcaagcctgctgagatgcgttcaggtcagctttctcgaaaattttggggatcgagcaagcggctcagccagatttcagctggagaaactgaatataatactcaagattccaagtgattgttatttccattttctgttatgattactgaaacctgatttattgctttgtcactttaaccacatctctcaactctctgcaatgttgcaaggcttttatccctgaaaat

SEQ ID NO: 158672 - DNA, 10938 bp, Homo sapiens
  Payload ID: 11049
  Gene Symbol: NBEAL1
  Gene Name: neurobeachin-like 1
  Uniprot ID: Q6ZS30
  ENST ID: ENST00000449802
  CDS Start-End: 334-8418
gctcgtctgcctggctgcggggtgacacggggcttcgccttgggaaggggtcgagggaagcagttagacggctgccgggcggcggctgccgcgcggcacacaatatttatttaattgcccaactaccactgatgaagatatattggagtgactgctgaaattgcctttttgtttttaaccagaggacagtccatttgtttcacttctttttgctttctttactgctatgagctttactgaacggctgaaaaacttggaaaataaaatggacatgctgtagtcttgaacataatttttttaaggaaaacttaaagtgccagagtgaaagccagaatggcatccagagagaggctctttgaactttggatgctttattgtacaaagaaagatccagattacctgaagctgtggttggacacttttgtttctagctatgaacaatttttagacgttgactttgaaaagctgcctaccagggtagatgatatgcctccaggaatatctctgcttcctgataatattctgcaggttctgaggatccagcttctacagtgtgttcagaaaatggcagatgggttagaggaacaacagcaagccttgtcaattttgcttgtcaagttcttcattattctttgcagaaatctatcaaatgtggaagaaattgggacttgctcgtacattaattatgtcatcaccatgacaacactctatattcagcaattaaaaagcaaaaaaaaagagaaggaaatggcagatcagacatgtattgaagaatttgtgatccacgcattggcattttgtgaaagcttatatgatccatatcggaattggagacatagaatttcaggacgaatccttagtactgtggaaaagagcagacagaaatataaaccagcttctctcacagtggaattcgtccctttcttttatcaatgttttcaggaaagtgaacatctcaaggaaagtcttaaatgttgcttattgcatctctttggagccattgtagccggtgggcagaggaatgctttgcaagcaatttctccagccactatggaagttcttatgcgagtattggcagattgtgattcctgggaggatggagatcctgaagaagtgggtaggaaggcagaactaactctgaagtgccttacagaagtggtacatatccttctcagtagcaactctgatcagcgtcaagtggaaaccagtactattctggagaactattttaaattgctaaattcagatcattcagctttacctaatcaaaggaggtccagacagtgggaaaaccgatttattgctctacagatcaaaatgctgaataccatcacagccatgttagattgtacagatagacctgttcttcaggccatttttcttaacagcaattgctttgaacatctcatacgactgctacagaactgcaaggtgtttcagggacaattggattgtttggccatatcaaccattcaggctttgaccgcagtaatgaacaaatctccagctgctaaggaagtatttaaagaaagaattggttatacacatatgcttgaagtattaaaatccctgggtcagccaccactggaattacttaaagaacttatgaatatggctgtagagggtgaccacacttcagttgggattttgggcattagtaatgtccaacctctcttgcttcttatccagtggcttccagaactacaatcccatgacctgcaaatcttcatctctgattggctgaaaagaatttgttgtattaatagacagagtcgaactacttgtgtcaatgcaaacatggggattagaatcattgaaacccttgacttgcattcttccctccatcaaacttgtgctgagaacttgattgcaatccatggttccttggggagtcagtcagtgagctcagaagaaatccgtcgactactgagattgctgagagtggatgaatctgagtctgttcacccttatgtcactcccgtgactcgagcaatcctgacaatggcccgaaaactaagtctagagagtgccctccagtatttcaatttgtcacatagtatggcaggaatttctgtgcctcccatacagaaatggccagggtctgccttttctttcagtgcttggttttgcttagaccaggatcagttgactcttggcattgctaacaaaggagggaaaaggaaacaattgtacagtttttttacaggaagtggcatgggttttgaagcctttattacccattcaggtatgttggtcgtggcagtgtgcacaaaaagagaatatgcaacggttatgcttcctgaccacagtttctgtgattccctctggcacaacataactgttgtccacatgcctggaaaaaggccttttggtcagagcttcgtctatatctatgacaatggacaacagaaggtttctgcccctctcagatttcctgccatgaatgaaccctttacttcctgttgcattggttcagctgggcaaagaaccaccactcctccaccatcccaaatcccagatccacctttctcttctcccattacccctcatcggacatcatttggtggaattctgtcatcagcctcctggggaggaacaattgaaaaatcaaaattgattaccaaattgatatcagctggaacccaagacagtgaatgggggtgtcccacatctctggagggtcagctaggatctgttatcatcttttatgaaccactacaacctcctcaggtgaaggcattatatttagcaggtccaaattgtttaagcccttggaagtgtcaagagtctgacatggccgacctgcctggtaacatccttctttactacacagcaaaggcctgcaaaaattcaatctgtcttgatttatctactaattgtttgcatggaagattaacaggaaacaaagtagtgaactgggacattaaggatatcataaactgcataggtgggttaaatgtactctttcctttattggaacaaatcagccactttagtgaaggacagattcctgaagaaaagaatgaaagcacagttcctgaatcagtaacacctgttgaaggagattggctcgtatggacttccacaaaggcctcagagtcaagactagagagaaacctagttgcaacatttatcttaattgtgaaacattttattcagagacatcctatcaaccagggcaatcttattcactcccatggagttgcaactcttggtgctttacttcagaaggtgccaagcaccttgatggatgttaatgtgttgatggcagttcagttactaattgaacaagtatcattagagaaaaatatgcagctcctgcaacaaatgtatcaatatttactctttgactttcgtatttggaaccgtggagattttccctttcgaatcggtcacatacagtatctttcaaccatcattaaagacagcaggagagttttccgaaagaagtatggtgtgcagtttctcctagatacacttaggatttattatgggaatggttgtaaatataatgaactatctctagatgatattcgaacaataaggacttctttgtatggactaattaaatattttctgtgcaaaggtggatctcatgaagagatacaaagtattatggggtacatagctgctactaatgaagaagaacagctctttggaattttggacgtgctcttcagtctcctacgtaccagcccaaccagaggtcagcttttcttactgctttttgaaccaggaaatgctgacatactgtacgcattgctcttaaatcagaagtactctgacagactaagagaaatcatttttaagattatggaacaaatgttgaaatgcacgaacgtttatgagcgtagtaaacaacatattcgactcagagaagttggctactcgggactgggactccttcttaatgaagcacttgttaatacttctcttattaaaaacctcacccatcaaatcataaatacagatcctgttattaatttcaaagatctactatctgtggtatatatatctcacagagcacatataaatgttagagtggccatctgcagaaaggttttgcaaattttgcagttccagccagatgcagcacatcaaatatcacagcaagtgggttggcaagacaccttagttaggctttttttaaaagcaaaatttgaaaacggaaatactcttcataagcacagtagagctgttttaatgaaagacaatgataaaaatatgtcaactgaagataccaagaagaactctgatgaaaaaacagatgaggaaaaaatcacctcttttgcctcagctaatgtgtcttcggatcagtggagtttggaggatagacactctttagactcaaacacaccattatttccagaagatagctctgtgggagaattgtctttcaaatcagagaatcaagaggaattctggcatagtaacccttcacatttgagtttagacctcagtggaattgactcatgtgaaatgagtgatagtggaagtcaagtgccagacagtctgcctagcacaccatccccagtagagtctactaaatcgttttctgtgcactctgacagagaaagcagcatcacaaatgatatgggctttagtgatgacttctctttacttgaaagccaagagagatgtgaggaggagcttcttcaattactgacacatattttgaattatgtaatgtgtaagggactagaaaagtctgatgatgatacttggattgaacgaggacaagtgttttcagcactaagtaaaccaggaatatccagtgaactacttcgaccatcagatgaaataaaactaactttgctacaaaagatgttagaatgggcaatctcagaaaacagagaagcaaaaactaatccagtaactgctgaaaacgccttccgactagtgctgatcatacaggactttcttcagtcagagggactagttaattcaaacatgtggaccgagaagcttttagaggatatgatgctgctctttgactgtctgtcagtctgctattctgaaagtccagtatgggtaaaactctctcaaattcagatccagttgcttctaggattcattggaaggggtaatttgcaggtttgtgcaatggcatcagctaagctaaatacccttcttcagaccaaagtgattgaaaatcaggatgaagcatgttacattttagggaagctggaacatgttctaagtcaatcaatcaaggaacagactgaaatctactcatttctgattccccttgttcgtaccctggtttccaaaatttatgagcttctcttcatgaacttgcacctaccttctttaccttttaccaatggtagctcctcattttttgaagattttcaagaatattgtaattcaaatgaatggcaagtttacattgaaaaatatattgtaccttatatgaagcagtatgaagctcatacattttacgatggtcatgagaacatggcactttattggaaggattgttatgaagctttaatggtaaatatgcataaacgagaccgggaaggaggggaaagcaagctcaaatttcaggagctgtttgtggagccatttaatcgaaaagcacgccaagagaacctgaggtataataatatgcttaaacaacttagcagtcaacagttagccactcttagacgctggaaagcaatacagctctatcttacatgtgaaaggggaccttgggctaaaaggaaacagaatccaattcactggaagctagctaatgtagagaattattcccgcatgagacttaagctggtaccgaattataatttcaaaacccatgaggaagctagtgccttgagagataatctgggtatccaacactcacagccttccagtgatacattgcttttggaagtagtgaaacaagtaaaagttagtgatatggtggaggataaattagaccttcctgaagaggatataacagctagagtaaatgttgatgagaaagaagaacaggatcaaaaagaaaaattggtattgatggaagactgtgaactcattacaataattgatgtaattcctggcagattagaaatcactactcaacacatttacttctatgatggcagcattgaaaaagaagatggagtaggctttgatttcaagtggcctcattctcaaattcgagagattcatctccggcgttacaatttaagaagatcagcccttgagatttttcatgttgaccaatccaactactttctcaatttcaaaaaagaggttagaaacaaaatatatagccgactgttgtcacttcattccccaaatagttattatggaagcagatcaccacaggagttattcaaagcatcaggattgacacagaaatgggtaaacagagagatatcaaattttgactacctcattcaaataaatacaatggcaggacgaacctataatgaccttgcacagtatcctgtgtttccctggattttacaagattatacttcggaagagttggaccttaataaccctgctgtatttcgagatctttccaaaccaattggggtagttaatgaaaaaaacgccaaagctatgagagaaaaatatgaaaattttgaggatcctatgggaactattgataagtttcactatggtactcactattcaaattctgcgggggtcatgcactatctcattcgtgtagaaccgttcaccaccctccacatccaacttcagagtggaaggtttgactgtgcagatcgacagttccattctattcctgctacctggcaagctcttatggataatccatatgatgttaaagaacttattcctgaattcttctatttcccagagtttttggaaaatcaaaatcaatttaacttgggtcgtctacagatttccaaagaattagtaaatgatgtcattctcccgaaatgggctaaatcagctgaagatttcatctataaacataggaaagctttggagtctgaatatgtttcagctcatcttcatgaatggatagatctgatctttggctataaacagaggggaccagctgcagtagaggcactcaacgttttctattattgtagttatgaaggagctgtggatctggatgccttaacagatgagaaagaaagaaaagccttagaagggatgattaataattttgggcaaacaccctgtcaattattaaaggaaccacaccctccaagattatcagcagaagaagcagtgcagaagccaaccaaaatagacacttcaaccctaaacctgtttcaacaccttcctgaactcaagtcattttttatagaggggattagtgatggtattccactattaaaggccaccatccccaaaaatcagtatcgttcttttatgtctcaaggcagccctgagttactgataacaataagcatgaattatgttattggaacccatggatggttgccttatgacagaaacatttctaattactttacattcatcaaggatcaaactgtgacaaatccaaaaactcagcgcagtataaatggttcttttgctcccgggctagagatcacttctaagctatttgtagtatcacatgatgcaaagttgctcttcagtgctggatactgggataatagcattcaagtgatgtcacttacaaaaggcaaaattatctcacacatcatccggcatatggatattgtgacttgcttagctacagattactgtggaatacatttgatttctggttccagagatactacatgtatgatatggcaaataacacaacagggaggtgttcctgtgggcttagcatctaaaccttttcagattctttatggacacaccaacgaggtactgagtgtcggcatcagcactgagctagacatggcagtgtcaggatcaagggatggaacggtgattatacataccattcagaaaggtcagtacatgaggactttacgaccaccttgtgagagttctctgttcctgaccattcctaatttggctatatcttgggaaggacatattgttgtctactccagcactgaagaaaagaccaccctcaaggataagaatgcattacatctgttttctataaatggcaagtatctagggtctcaaatcctgaaggaacaagtatcagatatatgtataatcggagaacacattgtcacaggcagcatacaaggattcctgtctataagagatctccacagcttgaatctcagcatcaacccattagccatgcgactgcctatccattgtgtttgtgtcaccaaagaatacagccatattcttgtaggtttagaagatggcaaattgattgtagtgggtgttggcaagcctgctgagatgcgttcaggtcagctttctcgaaaattttggggatcgagcaagcggctcagccagatttcagctggagaaactgaatataatactcaagattccaagtgattgttatttccattttctgttatgattactgaaacctgatttattgctttgtcactttaaccacatctctcaactctctgcaatgttgcaaggcttttatccctgaaaatcatttacagataaccacaatttgctgtggtatataaactaattcttggtctatactaagatgtatttgagaaaatacatttgatttgattttgtggcccattcctaaaggtcattgtatccatttttaaaacaaactaaaatgagaacattaggttcaattttcttattattccaaatgataaaatttaagatttttctaataaaagagtacagataatgggacagttgagagagatggctttaaatacattcttaagtaatcattttcctatttactgaccactgtaatgaaaatatatcaatttatttatggaactcctgattggggataatattttaaaggtatctgttgcacacttggattttcaaaactcggtgaaagttacaagtttgcatggtaagaataaaataagaatattgaaactggtacattagctaattctattactacttagcgtgtttctaatgagaagttactgaaatctattactgtccttaataaaaattgagtagaaaaaagtggaactagagatacattttacagatgtatttccttaataatataattaagcaaaagtgctaattgtgattttgacagttgggccttttaagtagcatttgcagcacaatttgcatttgcaaagttccgaatttcttgactctttcttcactaagcaaatactgttttactctaataattaagagttagtagtacccaaatatgttgaatttttacttaggatatctgtgtgattgatgaatgaattgaaaagatatgtataacttaaaataatcatttatatatagtaatttaaaaatttctatttcatgttttaggattatagctaattttattatatagtgttaaatgttgtggttgattattaagatcttaaagtaaaagtctgatttatttaatttggaattcaaagacattgttaaacttagatttttttgtaagattatcttttgagttaggtcagagagcttttacaactaccagtgttattaatctgagatttcatgtgtttgggagaacttgtgaatccctctgaaattgtgcagagactttgtatgttaaatgcattttcaggaaggaatggttacatggctttctttaaagggatctgtttccagtaatagtattcttttttgttccacaaatcatagatgtccttaaatccaattgtcttctcagttgaatcttagagaaatttttcttttgcaatttcgctttcctgttgaccacagtatccagtgcccttttctttataatcttttgagtgagtaaaaaaattttaagaaataaaggattctgtttagggaaacttttgaatagatttgatttgatgtgagtcagggctaataaaaagctatagaagaattttctttccaataagtaaaaatcctctgttttattaaggaaaaaatagctatgttttaggtaaataactctgaaataaactggtacaacaattgtaaaatagaacatatttaaatgtcaaggtgtcttttcttaagacttcaggaatttgtattgaacaaagtctcaagttaagtagcaataattatgatgcataaatgagactggcatctattcatttattttattcttttttggggtgatgggaggtttcaatccagtgcttcacccgtggtgccaccgtggctatctttttttttatcttacagttttttaggagatttcaagtcggcagaactaacatgattgatttttagtttttaaaatactgatttttttagaaactttttctaaatcaaaacctactaagttttattttgttatttatccagagattttgatgtaaaaatgccttcatttttaagattacttaatactggatttgaaaattattttggatgcttataagttttctaaaacttagataattagaaaaaatgcctaagtttatgatgttttactatgctgctttttagatggaagaaataagcagtttttactttatagtacaaataagttttgttcacaataaaatagatatcctacctggactaatactagatgtacaaggtagtggaattatttcttatattgctttttccaaaaagtaaaaaccaaaaatgtgggccgggtgtggtggctcatgcctgtaatcccagcactttgggaggctgaggcaggcgaatcacaaggtcaggagttcaagaccagcctggccaacacagtgaaaccctttctctactaaaaatacaaaaattagccgggcatggtggcacatgcctatagtcccagctacttgagaggctgagcagcgcaggagaatcacttaaacccgggaggtggaggttgcagtgacctgagatcacgctactgcactccagcttgggcaacagagtgagactttgtctcaaagaaaagaaaaaaaa

SEQ ID NO: 158673 - DNA, 920 bp, Homo sapiens
  Payload ID: 11049
  Gene Symbol: NBEAL1
  Gene Name: neurobeachin-like 1
  ENST ID: ENST00000434469
  CDS Start-End: 1-692
agggaggtgttcctgtgggcttagcatctaaaccttttcagattctttatggacacaccaacgaggtactgagtgtcggcatcagcactgagctagacatggcagtgtcaggatcaagggatggaacggtgattatacataccattcagaaaggtcagtacatgaggactttacgaccaccttgtgagagttctctgttcctgaccattcctaatttggctatatcttgggaaggacatattgttgtctactccagcactgaagaaaagaccaccctcaaggataagaatgcattacatctgttttctataaatggcaagtatctagggtctcaaatcctgaaggaacaagtatcagatatatgtataatcggagaacacattgtcacaggcagcatacaaggattcctgtctataagagatctccacagcttgaatctcagcatcaacccattagccatgcgactgcctatccattgtgtttgtgtcaccaaagaatacagccatattcttgtaggtttagaagatggcaaattgattgtagtgggtgttggcaagcctgctgagatgcgttcaggtcagctttctcgaaaattttggggatcgagcaagcggctcagccagatttcagctggagaaactgaatataatactcaagattccaaatccagaataacaaaacaacagagatgaacatgaacctttacctactagcaccatccattcactatactacactttattgaagacacttcattagaattggaaacttcctgcgttaattcatctggtaagattctcagtcactggacaatcaaagccatgttagttacgtgcttcattaagactgccttgcttttgtaaaacaagttcataacaccattccaagcatcaaataaatctgtttgtttcacacaatga

SEQ ID NO: 158674 - DNA, 636 bp, Homo sapiens
  Payload ID: 11050
  Gene Symbol: NBEAL2
  Gene Name: neurobeachin-like 2
  ENST ID: ENST00000441027
  CDS Start-End: 1-324
atcgatcaggccaactacttcctcaacttcccatgcaaggtgggcacgaccccagtctcatctcctagccagactcccagaccccagcctggccccatcccaccccatacccaggtacggaaccaggtgtactcgtggctcctgcgcctacggcccccctctcaaggctacctaagcagccgctccccccaggagatgctgcgtgcctcaggccttacccagaaatgggtacagcgtgagatatccaacttcgagtacttgatgcaactcaacaccattgcggggcggacctacaatgacctgtctcagtaccctgtggtatgaaagctttgaggacccagcagggaccattgacaagttccactatggcacccactactccaatgcagcaggcgtgatgcactacctcatccgcgtggagcccttcacctccctgcacgtccagctgcaaagtggccgctttgactgctccgaccggcagttccactcggtggcggcagcctggcaggcacgcctggagagccctgccgatgtgaaggagctcatcccggaattcttctactttcctgacttcctggagaaccagaacggttttgacctgggctgtctccagctgaccaacgagaaggtaggcga

SEQ ID NO: 158675 - DNA, 6364 bp, Homo sapiens
  Payload ID: 11050
  Gene Symbol: NBEAL2
  Gene Name: neurobeachin-like 2
  ENST ID: ENST00000416683
  CDS Start-End: 1-6128
ggcccatggagctgcgtcacctgctgcgcccccggccaggattggactcggaaccaggcggagctgaggctggaaaggcccgacacgcaggtgctgtcatccgcacattatcaggcatggccaggcaccagggtcctgcacgtgctctgcgctactttgacctcacgcccagcatggcgggcatcatggtaccccctgtacagcgatggccagggcctggcttcacctttcatgcctggctctgtctgcaccctatggatacagcacctacccctgcccccacccgaccactccagcgaaagcagctgtacagcttctttaccagcagcggctcagggtttgaggccttcttcacggcggccgggaccctggtggtggctgtgtgcacacggaaggagtatttgaccatgagtttgcccgaagtgtcctttgccgactctgcctggcactgcgtggctatcgtccatgtgcctgggcgccggcccttcagccagaacctggtccatgtctacaaagacggccatctggtcaagacagcaccccttcgctgcccctccctcagtgagcctttctcctcctgctgtatcggctccgctggataccgcacaacgaccaccaccacagggctgcccacaccaccagtccccgccaccctggcctacactcaccccgccctcacccgctcccagtcagtcccagcctccacagggcttggctgggggtccgggctggtggcccccctgcaggagggcagcatcgactctaccctcgcaggcacccaggacactcggtggggcagccccacatccctggagggtgagctgggggctgtggccatctttcacgaagccctgcaggcgacggctctgaggaccctgtgcaccctggggcccaatgagacggcacccttcaagcctgagggggagctgcatgagctcagcaccaggctgctcctccattactcacctcaggcttgtaagaacaacatctgcctggacctgtcccccagtcatgggcttgatgggcgcctgacgggccacagagtggagacctgggatgtgaaggatgtggtgaactgcgttgggggtatgggtgccctgctgcccctgctggagcgagtagctgcacagcccaaagaggctgaagcaggtccagctgaaacgcatgacctcgtgggtcctgaactgacctctggtcacaacacccagggcctggttctcccattgggtaaatcttcagaggaacggatggagaggaacgcagtggctgcttttctgctgatgctgcggaacttccttcagggtcacatggtgaaccaagagagcctggtgcagtgccaggggcctgccatcatcggggccctcctgcgaaaggtcccaagctgggccatggacatgaacgtgctcatgtccgcccagctgctgatggagcaggtggcagctgagggcagcgggcccctcctgtacctactctaccagcatttgctcttcaactttcacctctggaccctcagtgacttcgccgtgcgcctcggtcacatccagtacatgtccagcatagttcgggagcacagacagaagctgcggaagaagtacggcgtccagtttatcttggatgctctgcgcacccactacagcccgcagcgggagcgccccctggctgctgacgacctacgcaccgtgcagacctccctcctgggcctggcgagggagttcctggtgcggagtctctcagcagatgacgtgcaggtcacgcagaccatgctgagctttttggcggccacaggcgatgacggtcagatcctgcgcagactgcagcagaatgagcggctacctgagcggagccgccagcgcctccggctgcgggagtgtggtctccagggtctggttgcctgcttgcctgaggggactgtttccccccagctctgccagggcctctacaagctgttcctgggggcaggatcaggcaacactgctggtggtggcggcagcagtgggactcttactccagccagccagcccggcactccttcgccactggatgggccgcggccctttcctgctgctcctggccgccacagctccagtctctccaatgtgctggaggacggcagcctcccggagcccaccattagcggggatgatacctcgaacaccagcaacccacagcaaacctctgaggaagagttgtgcaatctgctcaccaacgtgctgttctcggtgacgtggcgtggcgtggaaggcagcgatgaggctgcctggcgggagcgtggccaggttttctcagtgctcacccagctgggggcctcagccacacttgtgcgcccaccagactgcatcaagcgcagcctcctggagatgatgctggagtcagccctgaccgacatcaaagaggcccccgtgggggtcctggccagcctcacccagcaagcgctttggctgctgcgtctgctgcaggacttcctgtgtgctgaaggccatggtaaccaggaactgtggagtgagaagctctttgaaggtgtatgcagcctacttgatcgcctgggagcctggccccacctggccaacggcacagctgatctccgtgagatggcgcagattggcctacggcttgtacttggctacatcctgctggaagacccacagctgcatgcccaggcctacgtgagattgcacatgctgctacagactgcagtgccagcccgccgcgaggaggcctgctatgtgctctccaagctggaggctgcactggggcgggtgctgaacacctcttccttggagtcagccactgatgaggcagggtccccacttgcagctgcagcagctgcagcagctgcagagcgctgctcctggctggtgccactggtgcgcacgctgctagaccgtgcctatgagccgctggggctgcagtggggactgccctccctgccacccaccaatggcagccccaccttctttgaagacttccaggctttttgtgccacacccgaatggcgccacttcatcgacaaacaggtacagccaaccatgtcccagttcgaaatggacacgtatgctaagagccacgaccttatgtcaggtttctggaatgcctgctatgacatgcttatgagcagtgggcagcggcgccagtgggagcgcgcccagagtcgtcgggccttccaggagctggtgctggaacctgcgcagaggcgggcgcgcctggaggggctacgctacacggcagtgctgaagcagcaggcaacgcagcactccatggccctgctgcactggggggcgctgtggcgccagctcgccagcccatgtggggcctgggcgctgagggacactcccatcccccgctggaaactgtccagcgccgagacatattcacgcatgcgtctgaagctggtgcccaaccatcacttcgaccctcacctggaagccagcgctctccgagacaatctgggtgaggttcccctgacacccaccgaggaggcctcactgcctctggcagtgaccaaagaggccaaagtgagcaccccacccgagttgctgcaggaggaccagctcggcgaggacgagctggctgagctggagaccccgatggaggcagcagaactggatgagcagcgtgagaagctggtgctgtcggccgagtgccagctggtgacggtagtggccgtggtcccagggctgctggaggtcaccacacagaatgtatacttctacgatggcagcactgagcgcgtggaaaccgaggagggcatcggctatgatttccggcgcccactggcccagctgcgtgaggtccacctgcggcgtttcaacctgcgccgttcagcacttgagctcttctttatcgatcaggccaactacttcctcaacttcccatgcaaggtgggcacgaccccagtctcatctcctagccagactcccagaccccagcctggccccatcccaccccatacccaggtacggaaccaggtgtactcgtggctcctgcgcctacggcccccctctcaaggctacctaagcagccgctccccccaggagatgctgcgtgcctcaggccttacccagaaatgggtacagcgtgagatatccaacttcgagtacttgatgcaactcaacaccattgcggggcggacctacaatgacctgtctcagtaccctgtgttcccctgggtcctgcaggactacgtgtccccaaccctggacctcagcaacccagccgtcttccgggacctgtctaagcccatcggtgtggtgaaccccaagcatgcccagctcgtgagggagaagtatgaaagctttgaggacccagcagggaccattgacaagttccactatggcacccactactccaatgcagcaggcgtgatgcactacctcatccgcgtggagcccttcacctccctgcacgtccagctgcaaagtggccgctttgactgctccgaccggcagttccactcggtggcggcagcctggcaggcacgcctggagagccctgccgatgtgaaggagctcatcccggaattcttctactttcctgacttcctggagaaccagaacggttttgacctgggctgtctccagctgaccaacgagaaggtaggcgatgtggtgctacccccgtgggccagctctcctgaggacttcatccagcagcaccgccaggctctggagtcggagtatgtgtctgcacacctacacgagtggatcgacctcatctttggctacaagcagcgggggccagccgccgaggaggccctcaatgtcttctattactgcacctatgagggggctgtagacctggaccatgtgacagatgagcgggaacggaaggctctggagggcattatcagcaactttgggcagactccctgtcagctgctgaaggagccacatccaactcggctctcagctgaggaagcagcccatcgccttgcacgcctggacactaactcacctagcatcttccagcacctggacgaactcaaggcattcttcgcagaggttgtcagtgatggtgtacccctggtgctagccctggtcccccaccggcagccccactccttcatcacccagggttccccagacctgttggtgactgtgagtgccagtgggctgctgggcacccacagctggttgccctatgaccgcaacataagcaactacttcagcttcagcaaagaccccaccatgggcagccacaagacgcagcgactgctgagtggcccgtgggtgccaggcagtggtgtgagtggacaagcactggcagtggccccggatggaaagctgctattcagcggtggccactgggatggcagcctgcgggtgactgcactaccccgtggcaagctgttgagccagctcagctgccaccttgatgtagtaacctgccttgcactggacacctgtggcatctacctcatctcaggctcccgggacaccacgtgcatggtgtggcggctcctgcatcagggtggtctgtcagtaggcctggcaccaaagcctgtgcaggtcctgtatgggcatggggctgcagtgagctgtgtggccatcagcactgaacttgacatggctgtgtctggatctgaggatggaactgtgatcatacacactgtacgccgcggacagtttgtagcggcactacggcctctgggtgccacattccctggacctattttccacctggcattggggtccgaaggccagattgtggtacagagctcagcgtgggaacgtcctggggcccaggtcacctactccttgcacctgtattcagtcaatgggaagttgcgggcttcactgcccctggcagagcagcctacagccctgacggtgacagaggactttgtgttgctgggcaccgcccagtgcgccctgcacatcctccaactaaacacactgctcccggccgcgcctcccttgcccatgaaggtggccatccgcagcgtggccgtgaccaaggagcgcagccacgtgctggtgggcctggaggatggcaagctcatcgtggtggtcgcggggcagccctctgaggtgcgcagcagccagttcgcgcggaagctgtggcggtcctcgcggcgcatctcccaggtgtcctcgggagagacggaatacaaccctactgaggcgcgctgaacctggccagtccggctgctcgggccccgcccccggcaggcctggcccgggaggccccgcccagaagtcggcgggaacaccccggggtgggcagcccaggggggtgagcggggcccaccctgcccagctcagggattggcgggcgatgttaccccctcagggattggcgggcggaagtcccgcccctcgccggctgaggggccgccctgagggccagcactggcgtctgcggccgc

SEQ ID NO: 158676 - DNA, 3508 bp, Homo sapiens
  Payload ID: 11050
  Gene Symbol: NBEAL2
  Gene Name: neurobeachin-like 2
  ENST ID: ENST00000443829
  CDS Start-End: 1-3280
gctgaacacctcttccttggagtcagccactgatgaggcagggtccccacttgcagctgcagcagctgcagcagctgcagagcgctgctcctggctggtgccactggtgcgcacgctgctagaccgtgcctatgagccgctggggctgcagtggggactgccctccctgccacccaccaatggcagccccaccttctttgaagacttccaggctttttgtgccacacccgaatggcgccacttcatcgacaaacaggtacagccaaccatgtcccagttcgaaatggacacgtatgctaagagccacgaccttatgtcaggtttctggaatgcctgctatgacatgcttatgagcagtgggcagcggcgccagtgggagcgcgcccagagtcgtcgggccttccaggagctggtgctggaacctgcgcagaggcgggcgcgcctggaggggctacgctacacggcagtgctgaagcagcaggcaacgcagcactccatggccctgctgcactggggggcgctgtggcgccagctcgccagcccatgtggggcctgggcgctgagggacactcccatcccccgctggaaactgtccagcgccgagacatattcacgcatgcgtctgaagctggtgcccaaccatcacttcgaccctcacctggaagccagcgctctccgagacaatctgggtgaggttcccctgacacccaccgaggaggcctcactgcctctggcagtgaccaaagaggccaaagtgagcaccccacccgagttgctgcaggaggaccagctcggcgaggacgagctggctgagctggagaccccgatggaggcagcagaactggatgagcagcgtgagaagctggtgctgtcggccgagtgccagctggtgacggtagtggccgtggtcccagggctgctggaggtcaccacacagaatgtatacttctacgatggcagcactgagcgcgtggaaaccgaggagggcatcggctatgatttccggcgcccactggcccagctgcgtgaggtccacctgcggcgtttcaacctgcgccgttcagcacttgagctcttctttatcgatcaggccaactacttcctcaacttcccatgcaaggtgggcacgaccccagtctcatctcctagccagactcccagaccccagcctggccccatcccaccccatacccaggtacggaaccaggtgtactcgtggctcctgcgcctacggcccccctctcaaggctacctaagcagccgctccccccaggagatgctgcgtgcctcaggccttacccagaaatgggtacagcgtgagatatccaacttcgagtacttgatgcaactcaacaccattgcggggcggacctacaatgacctgtctcagtaccctgtgttcccctgggtcctgcaggactacgtgtccccaaccctggacctcagcaacccagccgtcttccgggacctgtctaagcccatcggtgtggtgaaccccaagcatgcccagctcgtgagggagaagtatgaaagctttgaggacccagcagggaccattgacaagttccactatggcacccactactccaatgcagcaggcgtgatgcactacctcatccgcgtggagcccttcacctccctgcacgtccagctgcaaagtggccgctttgactgctccgaccggcagttccactcggtggcggcagcctggcaggcacgcctggagagccctgccgatgtgaaggagctcatcccggaattcttctactttcctgacttcctggagaaccagaacggttttgacctgggctgtctccagctgaccaacgagaaggtaggcgatgtggtgctacccccgtgggccagctctcctgaggacttcatccagcagcaccgccaggctctggagtcggagtatgtgtctgcacacctacacgagtggatcgacctcatctttggctacaagcagcgggggccagccgccgaggaggccctcaatgtcttctattactgcacctatgagggggctgtagacctggaccatgtgacagatgagcgggaacggaaggctctggagggcattatcagcaactttgggcagactccctgtcagctgctgaaggagccacatccaactcggctctcagctgaggaagcagcccatcgccttgcacgcctggacactaactcacctagcatcttccagcacctggacgaactcaaggcattcttcgcagaggtgactgtgagtgccagtgggctgctgggcacccacagctggttgccctatgaccgcaacataagcaactacttcagcttcagcaaagaccccaccatgggcagccacaagacgcagcgactgctgagtggcccgtgggtgccaggcagtggtgtgagtggacaagcactggcagtggccccggatggaaagctgctattcagcggtggccactgggatggcagcctgcgggtgactgcactaccccgtggcaagctgttgagccagctcagctgccaccttgatgtagtaacctgccttgcactggacacctgtggcatctacctcatctcaggctcccgggacaccacgtgcatggtgtggcggctcctgcatcagggtggtctgtcagtaggcctggcaccaaagcctgtgcaggtcctgtatgggcatggggctgcagtgagctgtgtggccatcagcactgaacttgacatggctgtgtctggatctgaggatggaactgtgatcatacacactgtacgccgcggacagtttgtagcggcactacggcctctgggtgccacattccctggacctattttccacctggcattggggtccgaaggccagattgtggtacagagctcagcgtgggaacgtcctggggcccaggtcacctactccttgcacctgtattcagtcaatgggaagttgcgggcttcactgcccctggcagagcagcctacagccctgacggtgacagaggactttgtgttgctgggcaccgcccagtgcgccctgcacatcctccaactaaacacactgctcccggccgcgcctcccttgcccatgaaggtggccatccgcagcgtggccgtgaccaaggagcgcagccacgtgctggtgggcctggaggatggcaagctcatcgtggtggtcgcggggcagccctctgaggtgcgcagcagccagttcgcgcggaagctgtggcggtcctcgcggcgcatctcccaggtgtcctcgggagagacggaatacaaccctactgaggcgcgctgaacctggccagtccggctgctcgggccccgcccccggcaggcctggcccgggaggccccgcccagaagtcggcgggaacaccccggggtgggcagcccaggggggtgagcggggcccaccctgcccagctcagggattggcgggcgatgttaccccctcagggattggcgggcggaagtcccgcccctcgccggctgaggggccgccctgagggccagcactggcgtct

SEQ ID NO: 158677 - DNA, 8827 bp, Homo sapiens
  Payload ID: 11050
  Gene Symbol: NBEAL2
  Gene Name: neurobeachin-like 2
  Uniprot ID: Q6ZNJ1
  ENST ID: ENST00000450053
  CDS Start-End: 180-8444
agcagacttgggtggctctgcgccgcggaggccacagccgcagacttccccagtagtaccgcgccgctccgccccggagtgacgccctccgcccatgggcctggccgagggcaaccggcgggcggcgcggaggaggcggcgacaggtggcgcgcagcagggccggagccgggccgggccatggccgcctcggagcggctgtacgagttgtggctgctctactacgcgcagaaggacctgggttacctgcagcagtggctgaaggcctttgtaggtgccttcaagaagagcatctcactgtcctctctggagccacgaaggccagaggaggcaggtgcagaggtcccgctgctaccactggatgagctgcatgtgctggccgaacagctgcaccaggctgacctggagcaagccctcctgctgctcaagctcttcatcattctctgcaggaacctggagaacatagaggcaggccggggccaagtgctagtgccccgagtgctggcactgttgaccaagttggtggcggagctgaaaggatgcccaccaccccagggccgaggcacgcagttggagaatgtggccctacatgctctgcttctctgcgagggcctctttgacccttaccaaacctggcggcgccagcgcagtggggaagtcatcagctccaaggagaagagcaaatacaagttccctcctgctgctttgccccaggaattcagcgccttcttccaagagagcctacagaatgcagaccacttgcctcccatactgctgttacgtctcatccacctcttctgcgccgtcctcgctggaggaaaggagaacgggcagatggctgtaagtgatggctctgtgaagggcctgctgagtgtggtgcggggctggagccgtgggccagccccggacccgtgcctagtgccactggctctagaggcactggtaggtgcagtccatgtcttgcatgccagccgcgcacctcctcgtggcccagagcttcgtgccctgcttgagagctacttccatgtccttaatgctgactggccagctggtctgagctcaggccccgaagaggcccttgtcaccctccgggtcagcatgctcgacgccatccccatgatgctggcatgtgaagaccggccagtgctgcaagccaccttcctcagcaacaattgctttgaacacctcactcggctcattcagaacagcaagctgtacctgcagtcccgggcgccccccgagggggacagtgacctggctacccggttactgactgagcccgatgtccaaaaggtcctggaccaagacacagacgccattgcagtccatgtagtcagagtgctgacctgcatcatgagtgactccccctcggccaaggaggtgtttaaggagcgcatcggctaccctcacctgcaggaggttctgcagagccatggtccccccacccatcggctgttgcaagagctgctcaacatggctgtggagggtgaccacagcatgtgcccacctccaccaatccgcaacgagcagccggtactggtgctggcgcagtggctgccgtcattgcccaccgctgagctgcggctcttcctagcgcaacgcctcaggtggctctgtgacagctgccctgccagccgtgccacctgtgtgcaggcaggcctggtgggctgcctgttggagacactcagcacagggctagccctggaggcccgctgccaagagcagctgctggcactgctacaagcactgggccgtgtatcaataaggcccatggagctgcgtcacctgctgcgcccccggccaggattggactcggaaccaggcggagctgaggctggaaaggcccgacacgcaggtgctgtcatccgcacattatcaggcatggccaggcaccagggtcctgcacgtgctctgcgctactttgacctcacgcccagcatggcgggcatcatggtaccccctgtacagcgatggccagggcctggcttcacctttcatgcctggctctgtctgcaccctatggatacagcacctacccctgcccccacccgaccactccagcgaaagcagctgtacagcttctttaccagcagcggctcagggtttgaggccttcttcacggcggccgggaccctggtggtggctgtgtgcacacggaaggagtatttgaccatgagtttgcccgaagtgtcctttgccgactctgcctggcactgcgtggctatcgtccatgtgcctgggcgccggcccttcagccagaacctggtccatgtctacaaagacggccatctggtcaagacagcaccccttcgctgcccctccctcagtgagcctttctcctcctgctgtatcggctccgctggataccgcacaacgaccaccaccacagggctgcccacaccaccagtccccgccaccctggcctacactcaccccgccctcacccgctcccagtcagtcccagcctccacagggcttggctgggggtccgggctggtggcccccctgcaggagggcagcatcgactctaccctcgcaggcacccaggacactcggtggggcagccccacatccctggagggtgagctgggggctgtggccatctttcacgaagccctgcaggcgacggctctgaggaccctgtgcaccctggggcccaatgagacggcacccttcaagcctgagggggagctgcatgagctcagcaccaggctgctcctccattactcacctcaggcttgtaagaacaacatctgcctggacctgtcccccagtcatgggcttgatgggcgcctgacgggccacagagtggagacctgggatgtgaaggatgtggtgaactgcgttgggggtatgggtgccctgctgcccctgctggagcgagtagctgcacagcccaaagaggctgaagcaggtccagctgaaacgcatgacctcgtgggtcctgaactgacctctggtcacaacacccagggcctggttctcccattgggtaaatcttcagaggaacggatggagaggaacgcagtggctgcttttctgctgatgctgcggaacttccttcagggtcacatggtgaaccaagagagcctggtgcagtgccaggggcctgccatcatcggggccctcctgcgaaaggtcccaagctgggccatggacatgaacgtgctcatgtccgcccagctgctgatggagcaggtggcagctgagggcagcgggcccctcctgtacctactctaccagcatttgctcttcaactttcacctctggaccctcagtgacttcgccgtgcgcctcggtcacatccagtacatgtccagcatagttcgggagcacagacagaagctgcggaagaagtacggcgtccagtttatcttggatgctctgcgcacccactacagcccgcagcgggagcgccccctggctgctgacgacctacgcaccgtgcagacctccctcctgggcctggcgagggagttcctggtgcggagtctctcagcagatgacgtgcaggtcacgcagaccatgctgagctttttggcggccacaggcgatgacggtcaggcggtgggtgcgctggacctgctgctggccctgctgcacggttccctggtgcaggagtccttggctgtctttctgttggagccagggaacctcgaagtgctactggccctgctagtgcggccagggtcactgcccctgctgcccgatcgagtctgcaagatcctgcgcagactgcagcagaatgagcggctacctgagcggagccgccagcgcctccggctgcgggagtgtggtctccagggtctggttgcctgcttgcctgaggggactgtttccccccagctctgccagggcctctacaagctgttcctgggggcagattgcctgaacctctcagatctgctggctgtggtacagctgtccctccaggctgacctcagcgttcgcctagacatctgtcgccagcttttccacctcatctacggacagccagatgtagtgcggcttctggcccgacaggctggctggcaagatgtgctgacccggctatatgtcctggaggctgccacagccggcagcccccctccgtcttccccagagtcacctacctcccccaagccagccccacccaagccacccactgagtcacctgctgagccttcagatgtcttcctgccctcagaggccccctgccctgaccctgatggcttttaccatgctctctccccattctgcacgccctttgacctgggcctggaacggtctagtgtaggatcaggcaacactgctggtggtggcggcagcagtgggactcttactccagccagccagcccggcactccttcgccactggatgggccgcggccctttcctgctgctcctggccgccacagctccagtctctccaatgtgctggaggacggcagcctcccggagcccaccattagcggggatgatacctcgaacaccagcaacccacagcaaacctctgaggaagagttgtgcaatctgctcaccaacgtgctgttctcggtgacgtggcgtggcgtggaaggcagcgatgaggctgcctggcgggagcgtggccaggttttctcagtgctcacccagctgggggcctcagccacacttgtgcgcccaccagactgcatcaagcgcagcctcctggagatgatgctggagtcagccctgaccgacatcaaagaggcccccgtgggggtcctggccagcctcacccagcaagcgctttggctgctgcgtctgctgcaggacttcctgtgtgctgaaggccatggtaaccaggaactgtggagtgagaagctctttgaaggtgtatgcagcctacttgatcgcctgggagcctggccccacctggccaacggcacagctgatctccgtgagatggcgcagattggcctacggcttgtacttggctacatcctgctggaagacccacagctgcatgcccaggcctacgtgagattgcacatgctgctacagactgcagtgccagcccgccgcgaggaggcctgctatgtgctctccaagctggaggctgcactggggcgggtgctgaacacctcttccttggagtcagccactgatgaggcagggtccccacttgcagctgcagcagctgcagcagctgcagagcgctgctcctggctggtgccactggtgcgcacgctgctagaccgtgcctatgagccgctggggctgcagtggggactgccctccctgccacccaccaatggcagccccaccttctttgaagacttccaggctttttgtgccacacccgaatggcgccacttcatcgacaaacaggtacagccaaccatgtcccagttcgaaatggacacgtatgctaagagccacgaccttatgtcaggtttctggaatgcctgctatgacatgcttatgagcagtgggcagcggcgccagtgggagcgcgcccagagtcgtcgggccttccaggagctggtgctggaacctgcgcagaggcgggcgcgcctggaggggctacgctacacggcagtgctgaagcagcaggcaacgcagcactccatggccctgctgcactggggggcgctgtggcgccagctcgccagcccatgtggggcctgggcgctgagggacactcccatcccccgctggaaactgtccagcgccgagacatattcacgcatgcgtctgaagctggtgcccaaccatcacttcgaccctcacctggaagccagcgctctccgagacaatctgggtgaggttcccctgacacccaccgaggaggcctcactgcctctggcagtgaccaaagaggccaaagtgagcaccccacccgagttgctgcaggaggaccagctcggcgaggacgagctggctgagctggagaccccgatggaggcagcagaactggatgagcagcgtgagaagctggtgctgtcggccgagtgccagctggtgacggtagtggccgtggtcccagggctgctggaggtcaccacacagaatgtatacttctacgatggcagcactgagcgcgtggaaaccgaggagggcatcggctatgatttccggcgcccactggcccagctgcgtgaggtccacctgcggcgtttcaacctgcgccgttcagcacttgagctcttctttatcgatcaggccaactacttcctcaacttcccatgcaaggtgggcacgaccccagtctcatctcctagccagactcccagaccccagcctggccccatcccaccccatacccaggtacggaaccaggtgtactcgtggctcctgcgcctacggcccccctctcaaggctacctaagcagccgctccccccaggagatgctgcgtgcctcaggccttacccagaaatgggtacagcgtgagatatccaacttcgagtacttgatgcaactcaacaccattgcggggcggacctacaatgacctgtctcagtaccctgtgttcccctgggtcctgcaggactacgtgtccccaaccctggacctcagcaacccagccgtcttccgggacctgtctaagcccatcggtgtggtgaaccccaagcatgcccagctcgtgagggagaagtatgaaagctttgaggacccagcagggaccattgacaagttccactatggcacccactactccaatgcagcaggcgtgatgcactacctcatccgcgtggagcccttcacctccctgcacgtccagctgcaaagtggccgctttgactgctccgaccggcagttccactcggtggcggcagcctggcaggcacgcctggagagccctgccgatgtgaaggagctcatcccggaattcttctactttcctgacttcctggagaaccagaacggttttgacctgggctgtctccagctgaccaacgagaaggtaggcgatgtggtgctacccccgtgggccagctctcctgaggacttcatccagcagcaccgccaggctctggagtcggagtatgtgtctgcacacctacacgagtggatcgacctcatctttggctacaagcagcgggggccagccgccgaggaggccctcaatgtcttctattactgcacctatgagggggctgtagacctggaccatgtgacagatgagcgggaacggaaggctctggagggcattatcagcaactttgggcagactccctgtcagctgctgaaggagccacatccaactcggctctcagctgaggaagcagcccatcgccttgcacgcctggacactaactcacctagcatcttccagcacctggacgaactcaaggcattcttcgcagaggttgtcagtgatggtgtacccctggtgctagccctggtcccccaccggcagccccactccttcatcacccagggttccccagacctgttggtgactgtgagtgccagtgggctgctgggcacccacagctggttgccctatgaccgcaacataagcaactacttcagcttcagcaaagaccccaccatgggcagccacaagacgcagcgactgctgagtggcccgtgggtgccaggcagtggtgtgagtggacaagcactggcagtggccccggatggaaagctgctattcagcggtggccactgggatggcagcctgcgggtgactgcactaccccgtggcaagctgttgagccagctcagctgccaccttgatgtagtaacctgccttgcactggacacctgtggcatctacctcatctcaggctcccgggacaccacgtgcatggtgtggcggctcctgcatcagggtggtctgtcagtaggcctggcaccaaagcctgtgcaggtcctgtatgggcatggggctgcagtgagctgtgtggccatcagcactgaacttgacatggctgtgtctggatctgaggatggaactgtgatcatacacactgtacgccgcggacagtttgtagcggcactacggcctctgggtgccacattccctggacctattttccacctggcattggggtccgaaggccagattgtggtacagagctcagcgtgggaacgtcctggggcccaggtcacctactccttgcacctgtattcagtcaatgggaagttgcgggcttcactgcccctggcagagcagcctacagccctgacggtgacagaggactttgtgttgctgggcaccgcccagtgcgccctgcacatcctccaactaaacacactgctcccggccgcgcctcccttgcccatgaaggtggccatccgcagcgtggccgtgaccaaggagcgcagccacgtgctggtgggcctggaggatggcaagctcatcgtggtggtcgcggggcagccctctgaggtgcgcagcagccagttcgcgcggaagctgtggcggtcctcgcggcgcatctcccaggtgtcctcgggagagacggaatacaaccctactgaggcgcgctgaacctggccagtccggctgctcgggccccgcccccggcaggcctggcccgggaggccccgcccagaagtcggcgggaacaccccggggtgggcagcccaggggggtgagcggggcccaccctgcccagctcagggattggcgggcgatgttaccccctcagggattggcgggcggaagtcccgcccctcgccggctgaggggccgccctgagggccagcactggcgtctgcggccgcagcagcactttttgcacagtctggggcggggttccccggcttccaagtcgctgtttcgtcaaagcacgagggccgcctgtggccttaattcctaacggcggccccggttctcccttctcggcaataaaccaggcctagttttgtagc

SEQ ID NO: 158678 - DNA, 765 bp, Homo sapiens
  Payload ID: 11050
  Gene Symbol: NBEAL2
  Gene Name: neurobeachin-like 2
  ENST ID: ENST00000423436
  CDS Start-End: 1-765
gagcccttcacctccctgcacgtccagctgcaaagtggccgctttgactgctccgaccggcagttccactcggtggcggcagcctggcaggcacgcctggagagccctgccgatgtgaaggagctcatcccggaattcttctactttcctgacttcctggagaaccagaacggttttgacctgggctgtctccagctgaccaacgagaaggtaggcgatgtggtgctacccccgtgggccagctctcctgaggacttcatccagcagcaccgccaggctctggagtcggagtatgtgtctgcacacctacacgagtggatcgacctcatctttggctacaagcagcgggggccagccgccgaggaggccctcaatgtcttctattactgcacctatgagggggctgtagacctggaccatgtgacagatgagcgggaacggaaggctctggagggcattatcagcaactttgggcagactccctgtcagctgctgaaggagccacatccaactcggctctcagctgaggaagcagcccatcgccttgcacgcctggacactaactcacctagcatcttccagcacctggacgaactcaaggcattcttcgcagaggacgcagcgactgctgagtggcccgtgggtgccaggcagtggtgtgagtggacaagcactggcagtggccccggatggaaagctgctattcagcggtggccactgggatggcagcctgcgggtgactgcactaccccgtggcaagctgtt

SEQ ID NO: 158679 - DNA, 731 bp, Homo sapiens
  Payload ID: 11051
  Gene Symbol: NBL1
  Gene Name: neuroblastoma 1, DAN family BMP antagonist
  Uniprot ID: P41271
  ENST ID: ENST00000289749
  CDS Start-End: 81-731
gatgcaggctgggtgtggagggtgcgagtaggctggagtacaccagggagttcccagcaggccactaggagccacccaggatgcccggcaacctcatgagtcagacaagcagggctgtgtctatctggaagtttccagccaagctaggtaaaacacatggacacagggctctggaggccacgggcatgatgcttcgggtcctggtgggggctgtcctccctgccatgctactggctgccccaccacccatcaacaagctggcactgttcccagataagagtgcctggtgcgaagccaagaacatcacccagatcgtgggccacagcggctgtgaggccaagtccatccagaacagggcgtgcctaggacagtgcttcagctacagcgtccccaacaccttcccacagtccacagagtccctggttcactgtgactcctgcatgccagcccagtccatgtgggagattgtgacgctggagtgcccgggccacgaggaggtgcccagggtggacaagctggtggagaagatcctgcactgtagctgccaggcctgcggcaaggagcctagtcacgaggggctgagcgtctatgtgcagggcgaggacgggccgggatcccagcccggcacccaccctcacccccatccccacccccatcctggcgggcagacccctgagcccgaggacccccctggggccccccacacagaggaagagggggctgaggactga

SEQ ID NO: 158680 - DNA, 2172 bp, Homo sapiens
  Payload ID: 11051
  Gene Symbol: NBL1
  Gene Name: neuroblastoma 1, DAN family BMP antagonist
  Uniprot ID: P41271
  ENST ID: ENST00000375136
  CDS Start-End: 304-849
tcctgcgcacccggagggagaggccgcgcgcgcccgcccgctctttctgcgcgcggccctccccgctgcccccgccctcgcgccctgtttggagggagccaccctgacgtcggagccgctcccccgcgccgcgcgcccgcccggggccgcagacagcgcgcagcgcagcccagccgagcgtcgcggggccgccccccgccctgccggccgcctcgccgagcctcctggggcgcccgggcccgcgacccccgcacccagctccgcaggaccggcgggcgcgcgcgggctctggaggccacgggcatgatgcttcgggtcctggtgggggctgtcctccctgccatgctactggctgccccaccacccatcaacaagctggcactgttcccagataagagtgcctggtgcgaagccaagaacatcacccagatcgtgggccacagcggctgtgaggccaagtccatccagaacagggcgtgcctaggacagtgcttcagctacagcgtccccaacaccttcccacagtccacagagtccctggttcactgtgactcctgcatgccagcccagtccatgtgggagattgtgacgctggagtgcccgggccacgaggaggtgcccagggtggacaagctggtggagaagatcctgcactgtagctgccaggcctgcggcaaggagcctagtcacgaggggctgagcgtctatgtgcagggcgaggacgggccgggatcccagcccggcacccaccctcacccccatccccacccccatcctggcgggcagacccctgagcccgaggacccccctggggccccccacacagaggaagagggggctgaggactgaggcccccccaactcttcctcccctctcatccccctgtggaatgttgggtctcactctctggggaagtcaggggagaagctgaagcccccctttggcactggatggacttggcttcagactcggacttgaatgctgcccggttgccatggagatctgaaggggcggggttagagccaagctgcacaatttaatatattcaagagtggggggaggaagcagaggtcttcagggctctttttttggggggggtggtctcttcctgtctggcttctagagatgtgcctgtgggagggggaggaagttggctgagccattgagtgctgggggaggccatccaagatggcatgaatcgggctaaggtccctgggggtgcagatggtactgctgaggtcccgggcttagtgtgagcatcttgccagcctcaggcttgagggagggctgggctagaaagaccactggcagaaacaggaggctccggcccacaggtttccccaaggcctctcaccccacttcccatctccagggaagcgtcgccccagtggcactgaagtggccctccctcagcggaggggtttgggagtcaggcctgggcaggaccctgctgactcgtggcgcgggagctgggagccaggctctccgggcctttctctggcttccttggcttgcctggtgggggaaggggaggaggggaagaaggaaagggaagagtcttccaaggccagaaggagggggacaaccccccaagaccatccctgaagacgagcatccccctcctctccctgttagaaatgttagtgccccgcactgtgccccaagttctaggccccccagaaagctgccagagccggccgccttctcccctctcccagggatgctctttgtaaatatcggatgggtgtgggagtgaggggttacctccctcgccccaaggttccagaggccctaggcgggatgggctcgctgaacctcgaggaactccaggacgaggaggacatgggacttgcgtggacagtcagggttcacttgggctctctctagctccccaattctgcctgcctcctccctcccagctgcactttaaccctagaaggtggggacctggggggagggacagggcaggcgggcccatgaagaaagcccctcgttgcccagcactgtctgcgtctgctcttctgtgcccagggtggctgccagcccactgcctcctgcctggggtggcctggccctcctggctgttgcgacgcgggcttctggagcttgtcaccattggacagtctccctgatggaccctcagtcttctcatgaataaattccttcaacgcc

SEQ ID NO: 158681 - DNA, 622 bp, Homo sapiens
  Payload ID: 11051
  Gene Symbol: NBL1
  Gene Name: neuroblastoma 1, DAN family BMP antagonist
  ENST ID: ENST00000451758
  CDS Start-End: 237-622
gtaaagcaaaatccccaagtcctacaatcgtgtcccagtggtgtccctgggccaccactttccagaagcaaagttattttctcaccccgttgttaagcacacagaatagagaaggtacggccgcaatccacccaagtgcccactgattagataggaacccccgaggtgaggctggaagctggggccaggagctccactcttcccaggagtcagagaaggctctggaggccacgggcatgatgcttcgggtcctggtgggggctgtcctccctgccatgctactggctgccccaccacccatcaacaagctggcactgttcccagataagagtgcctggtgcgaagccaagaacatcacccagatcgtgggccacagcggctgtgaggccaagtccatccagaacagggcgtgcctaggacagtgcttcagctacagcgtccccaacaccttcccacagtccacagagtccctggttcactgtgactcctgcatgccagcccagtccatgtgggagattgtgacgctggagtgcccgggccacgaggaggtgcccagggtggacaagctggtggagaagatcctgcactgtagctgccaggcctgcggcaaggagcctagtca

SEQ ID NO: 158682 - DNA, 570 bp, Homo sapiens
  Payload ID: 11051
  Gene Symbol: NBL1
  Gene Name: neuroblastoma 1, DAN family BMP antagonist
  ENST ID: ENST00000439278
  CDS Start-End: 186-570
gtgttttggaggggtggacaggggagtaggtgttctgcatcggccagggatatcgcctcattattttaaagtgaaatttcaggctgagtttagctgcttccccccacccacaacctcaagggtcggaggctgccggagcgggcagggttgttggtgaggtctgcagtggaacttctgctgagcagatgtgcagcctggccctgcagcagctcattagcatggatttgttttggagactgtttttcgtttgcgggcaggagggtctgcgggctctggaggccacgggcatgatgcttcgggtcctggtgggggctgtcctccctgccatgctactggctgccccaccacccatcaacaagctggcactgttcccagataagagtgcctggtgcgaagccaagaacatcacccagatcgtgggccacagcggctgtgaggccaagtccatccagaacagggcgtgcctaggacagtgcttcagctacagcgtccccaacaccttcccacagtccacagagtccctggttcactgtgactcctgcatgccagcccagtccatgtgggagattg

SEQ ID NO: 158683 - DNA, 573 bp, Homo sapiens
  Payload ID: 11051
  Gene Symbol: NBL1
  Gene Name: neuroblastoma 1, DAN family BMP antagonist
  ENST ID: ENST00000427894
  CDS Start-End: 84-573
caaacgctgcgtgctcgttgtgcatgcggactgtggtgtcacctgaatgctgagcccacagggctctggaggccacgggcatgatgcttcgggtcctggtgggggctgtcctccctgccatgctactggctgccccaccacccatcaacaagctggcactgttcccagataagagtgcctggtgcgaagccaagaacatcacccagatcgtgggccacagcggctgtgaggccaagtccatccagaacagggcgtgcctaggacagtgcttcagctacagcgtccccaacaccttcccacagtccacagagtccctggttcactgtgactcctgcatgccagcccagtccatgtgggagattgtgacgctggagtgcccgggccacgaggaggtgcccagggtggacaagctggtggagaagatcctgcactgtagctgccaggcctgcggcaaggagcctagtcacgaggggctgagcgtctatgtgcagggcgaggacgggccgggatcccagcccggcacccaccctcacccccatccccacccccatcctggcgggcagacccctgagc

SEQ ID NO: 158684 - DNA, 588 bp, Homo sapiens
  Payload ID: 11051
  Gene Symbol: NBL1
  Gene Name: neuroblastoma 1, DAN family BMP antagonist
  ENST ID: ENST00000439664
  CDS Start-End: 261-588
actaggataacactaggcaaggctgagcaacccaggctaccaacagcacggacttgaaccgggtcgcatgccggagcggacgggatgaggtgcaccgcagaactggggactcctggtgccgggacgcggcgggctggggcgccccactctcggggcaagtctgcaatgcccggtgcccacaaaaaggacacatccatctttgtcaccccgaggcctggcacggcctgacggcccaggctcgggctctggaggccacgggcatgatgcttcgggtcctggtgggggctgtcctccctgccatgctactggctgccccaccacccatcaacaagctggcactgttcccagataagagtgcctggtgcgaagccaagaacatcacccagatcgtgggccacagcggctgtgaggccaagtccatccagaacagggcgtgcctaggacagtgcttcagctacagcgtccccaacaccttcccacagtccacagagtccctggttcactgtgactcctgcatgccagcccagtccatgtgggagattgtgacgctggagtgcccgggccacgaggaggtgcccagggtggaca

SEQ ID NO: 158685 - DNA, 528 bp, Homo sapiens
  Payload ID: 11051
  Gene Symbol: NBL1
  Gene Name: neuroblastoma 1, DAN family BMP antagonist
  ENST ID: ENST00000425400
  CDS Start-End: 179-528
gtttacaagcggcggcaaagggggcagccgcctgccttggcgtggccggaggttggcgggcatcaagggagaaagccacacttccaggctttcggaggccctcgctccccaagctggacgccaccagcctgtaactaggggcaccccaggaaaacagagggctctggaggccacgggcatgatgcttcgggtcctggtgggggctgtcctccctgccatgctactggctgccccaccacccatcaacaagctggcactgttcccagataagagtgcctggtgcgaagccaagaacatcacccagatcgtgggccacagcggctgtgaggccaagtccatccagaacagggcgtgcctaggacagtgcttcagctacagcgtccccaacaccttcccacagtccacagagtccctggttcactgtgactcctgcatgccagcccagtccatgtgggagattgtgacgctggagtgcccgggccacgaggaggtgcccagggtggacaagctggtggagaagatcctgca

SEQ ID NO: 158686 - DNA, 546 bp, Homo sapiens
  Payload ID: 11051
  Gene Symbol: NBL1
  Gene Name: neuroblastoma 1, DAN family BMP antagonist
  ENST ID: ENST00000428975
  CDS Start-End: 196-546
cttttgcttgttttcattctatttctccagcgagagtgcagaggtttggacccccgttgaggccagactgacaggattagaggaaacagctgggctgagtccgtgccctgcaggagggagctcacattcccggactctgggagagagcagctccccacagctcagtcacattccagggctctggaggccacgggcatgatgcttcgggtcctggtgggggctgtcctccctgccatgctactggctgccccaccacccatcaacaagctggcactgttcccagataagagtgcctggtgcgaagccaagaacatcacccagatcgtgggccacagcggctgtgaggccaagtccatccagaacagggcgtgcctaggacagtgcttcagctacagcgtccccaacaccttcccacagtccacagagtccctggttcactgtgactcctgcatgccagcccagtccatgtgggagattgtgacgctggagtgcccgggccacgaggaggtgcccagggtggacaagctggtggagaagatcctgcac

SEQ ID NO: 158687 - DNA, 1953 bp, Homo sapiens
  Payload ID: 11051
  Gene Symbol: NBL1
  Gene Name: neuroblastoma 1, DAN family BMP antagonist
  Uniprot ID: P41271
  ENST ID: ENST00000548815
  CDS Start-End: 81-626
caaacgctgcgtgctcgttgtgcatgcggactgtggtgtcacctgaatgctgagcccacagggctctggaggccacgggcatgatgcttcgggtcctggtgggggctgtcctccctgccatgctactggctgccccaccacccatcaacaagctggcactgttcccagataagagtgcctggtgcgaagccaagaacatcacccagatcgtgggccacagcggctgtgaggccaagtccatccagaacagggcgtgcctaggacagtgcttcagctacagcgtccccaacaccttcccacagtccacagagtccctggttcactgtgactcctgcatgccagcccagtccatgtgggagattgtgacgctggagtgcccgggccacgaggaggtgcccagggtggacaagctggtggagaagatcctgcactgtagctgccaggcctgcggcaaggagcctagtcacgaggggctgagcgtctatgtgcagggcgaggacgggccgggatcccagcccggcacccaccctcacccccatccccacccccatcctggcgggcagacccctgagcccgaggacccccctggggccccccacacagaggaagagggggctgaggactgaggcccccccaactcttcctcccctctcatccccctgtggaatgttgggtctcactctctggggaagtcaggggagaagctgaagcccccctttggcactggatggacttggcttcagactcggacttgaatgctgcccggttgccatggagatctgaaggggcggggttagagccaagctgcacaatttaatatattcaagagtggggggaggaagcagaggtcttcagggctctttttttggggggggtggtctcttcctgtctggcttctagagatgtgcctgtgggagggggaggaagttggctgagccattgagtgctgggggaggccatccaagatggcatgaatcgggctaaggtccctgggggtgcagatggtactgctgaggtcccgggcttagtgtgagcatcttgccagcctcaggcttgagggagggctgggctagaaagaccactggcagaaacaggaggctccggcccacaggtttccccaaggcctctcaccccacttcccatctccagggaagcgtcgccccagtggcactgaagtggccctccctcagcggaggggtttgggagtcaggcctgggcaggaccctgctgactcgtggcgcgggagctgggagccaggctctccgggcctttctctggcttccttggcttgcctggtgggggaaggggaggaggggaagaaggaaagggaagagtcttccaaggccagaaggagggggacaaccccccaagaccatccctgaagacgagcatccccctcctctccctgttagaaatgttagtgccccgcactgtgccccaagttctaggccccccagaaagctgccagagccggccgccttctcccctctcccagggatgctctttgtaaatatcggatgggtgtgggagtgaggggttacctccctcgccccaaggttccagaggccctaggcgggatgggctcgctgaacctcgaggaactccaggacgaggaggacatgggacttgcgtggacagtcagggttcacttgggctctctctagctccccaattctgcctgcctcctccctcccagctgcactttaaccctagaaggtggggacctggggggagggacagggcaggcgggcccatgaagaaagcccctcgttgcccagcactgtctgcgtctgctcttctgtgcccagggtggctgccagcccactgcctcctgcctggggtggcctggccctcctggctgttgcgacgcgggcttctggagcttgtcaccattggacagtctccctgatggaccctcagtcttctcatgaataaattccttcaacgcctgtg

SEQ ID NO: 158688 - DNA, 2160 bp, Homo sapiens
  Payload ID: 11051
  Gene Symbol: NBL1
  Gene Name: neuroblastoma 1, DAN family BMP antagonist
  ENST ID: ENST00000615215
  CDS Start-End: 186-833
gtgttttggaggggtggacaggggagtaggtgttctgcatcggccagggatatcgcctcattattttaaagtgaaatttcaggctgagtttagctgcttccccccacccacaacctcaagggtcggaggctgccggagcgggcagggttgttggtgaggtctgcagtggaacttctgctgagcagatgtgcagcctggccctgcagcagctcattagcatggatttgttttggagactgtttttcgtttgcgggcaggagggtctgcgggctctggaggccacgggcatgatgcttcgggtcctggtgggggctgtcctccctgccatgctactggctgccccaccacccatcaacaagctggcactgttcccagataagagtgcctggtgcgaagccaagaacatcacccagatcgtgggccacagcggctgtgaggccaagtccatccagaacagggcgtgcctaggacagtgcttcagctacagcgtccccaacaccttcccacagtccacagagtccctggttcactgtgactcctgcatgccagcccagtccatgtgggagattgtgacgctggagtgcccgggccacgaggaggtgcccagggtggacaagctggtggagaagatcctgcactgtagctgccaggcctgcggcaaggagcctagtcacgaggggctgagcgtctatgtgcagggcgaggacgggccgggatcccagcccggcacccaccctcacccccatccccacccccatcctggcgggcagacccctgagcccgaggacccccctggggccccccacacagaggaagagggggctgaggactgaggcccccccaactcttcctcccctctcatccccctgtggaatgttgggtctcactctctggggaagtcaggggagaagctgaagcccccctttggcactggatggacttggcttcagactcggacttgaatgctgcccggttgccatggagatctgaaggggcggggttagagccaagctgcacaatttaatatattcaagagtggggggaggaagcagaggtcttcagggctctttttttggggggggtggtctcttcctgtctggcttctagagatgtgcctgtgggagggggaggaagttggctgagccattgagtgctgggggaggccatccaagatggcatgaatcgggctaaggtccctgggggtgcagatggtactgctgaggtcccgggcttagtgtgagcatcttgccagcctcaggcttgagggagggctgggctagaaagaccactggcagaaacaggaggctccggcccacaggtttccccaaggcctctcaccccacttcccatctccagggaagcgtcgccccagtggcactgaagtggccctccctcagcggaggggtttgggagtcaggcctgggcaggaccctgctgactcgtggcgcgggagctgggagccaggctctccgggcctttctctggcttccttggcttgcctggtgggggaaggggaggaggggaagaaggaaagggaagagtcttccaaggccagaaggagggggacaaccccccaagaccatccctgaagacgagcatccccctcctctccctgttagaaatgttagtgccccgcactgtgccccaagttctaggccccccagaaagctgccagagccggccgccttctcccctctcccagggatgctctttgtaaatatcggatgggtgtgggagtgaggggttacctccctcgccccaaggttccagaggccctaggcgggatgggctcgctgaacctcgaggaactccaggacgaggaggacatgggacttgcgtggacagtcagggttcacttgggctctctctagctccccaattctgcctgcctcctccctcccagctgcactttaaccctagaaggtggggacctggggggagggacagggcaggcgggcccatgaagaaagcccctcgttgcccagcactgtctgcgtctgctcttctgtgcccagggtggctgccagcccactgcctcctgcctggggtggcctggccctcctggctgttgcgacgcgggcttctggagcttgtcaccattggacagtctccctgatggaccctcagtcttctcatgaataaattccttcaacgcctgtg

SEQ ID NO: 158689 - DNA, 2133 bp, Homo sapiens
  Payload ID: 11051
  Gene Symbol: NBL1
  Gene Name: neuroblastoma 1, DAN family BMP antagonist
  Uniprot ID: P41271
  ENST ID: ENST00000621723
  CDS Start-End: 261-806
actaggataacactaggcaaggctgagcaacccaggctaccaacagcacggacttgaaccgggtcgcatgccggagcggacgggatgaggtgcaccgcagaactggggactcctggtgccgggacgcggcgggctggggcgccccactctcggggcaagtctgcaatgcccggtgcccacaaaaaggacacatccatctttgtcaccccgaggcctggcacggcctgacggcccaggctcgggctctggaggccacgggcatgatgcttcgggtcctggtgggggctgtcctccctgccatgctactggctgccccaccacccatcaacaagctggcactgttcccagataagagtgcctggtgcgaagccaagaacatcacccagatcgtgggccacagcggctgtgaggccaagtccatccagaacagggcgtgcctaggacagtgcttcagctacagcgtccccaacaccttcccacagtccacagagtccctggttcactgtgactcctgcatgccagcccagtccatgtgggagattgtgacgctggagtgcccgggccacgaggaggtgcccagggtggacaagctggtggagaagatcctgcactgtagctgccaggcctgcggcaaggagcctagtcacgaggggctgagcgtctatgtgcagggcgaggacgggccgggatcccagcccggcacccaccctcacccccatccccacccccatcctggcgggcagacccctgagcccgaggacccccctggggccccccacacagaggaagagggggctgaggactgaggcccccccaactcttcctcccctctcatccccctgtggaatgttgggtctcactctctggggaagtcaggggagaagctgaagcccccctttggcactggatggacttggcttcagactcggacttgaatgctgcccggttgccatggagatctgaaggggcggggttagagccaagctgcacaatttaatatattcaagagtggggggaggaagcagaggtcttcagggctctttttttggggggggtggtctcttcctgtctggcttctagagatgtgcctgtgggagggggaggaagttggctgagccattgagtgctgggggaggccatccaagatggcatgaatcgggctaaggtccctgggggtgcagatggtactgctgaggtcccgggcttagtgtgagcatcttgccagcctcaggcttgagggagggctgggctagaaagaccactggcagaaacaggaggctccggcccacaggtttccccaaggcctctcaccccacttcccatctccagggaagcgtcgccccagtggcactgaagtggccctccctcagcggaggggtttgggagtcaggcctgggcaggaccctgctgactcgtggcgcgggagctgggagccaggctctccgggcctttctctggcttccttggcttgcctggtgggggaaggggaggaggggaagaaggaaagggaagagtcttccaaggccagaaggagggggacaaccccccaagaccatccctgaagacgagcatccccctcctctccctgttagaaatgttagtgccccgcactgtgccccaagttctaggccccccagaaagctgccagagccggccgccttctcccctctcccagggatgctctttgtaaatatcggatgggtgtgggagtgaggggttacctccctcgccccaaggttccagaggccctaggcgggatgggctcgctgaacctcgaggaactccaggacgaggaggacatgggacttgcgtggacagtcagggttcacttgggctctctctagctccccaattctgcctgcctcctccctcccagctgcactttaaccctagaaggtggggacctggggggagggacagggcaggcgggcccatgaagaaagcccctcgttgcccagcactgtctgcgtctgctcttctgtgcccagggtggctgccagcccactgcctcctgcctggggtggcctggccctcctggctgttgcgacgcgggcttctggagcttgtcaccattggacagtctccctgatggaccctcagtcttctcatgaataaattccttcaacgcctgtg

SEQ ID NO: 158690 - DNA, 2109 bp, Homo sapiens
  Payload ID: 11051
  Gene Symbol: NBL1
  Gene Name: neuroblastoma 1, DAN family BMP antagonist
  Uniprot ID: P41271
  ENST ID: ENST00000622566
  CDS Start-End: 237-782
gtaaagcaaaatccccaagtcctacaatcgtgtcccagtggtgtccctgggccaccactttccagaagcaaagttattttctcaccccgttgttaagcacacagaatagagaaggtacggccgcaatccacccaagtgcccactgattagataggaacccccgaggtgaggctggaagctggggccaggagctccactcttcccaggagtcagagaaggctctggaggccacgggcatgatgcttcgggtcctggtgggggctgtcctccctgccatgctactggctgccccaccacccatcaacaagctggcactgttcccagataagagtgcctggtgcgaagccaagaacatcacccagatcgtgggccacagcggctgtgaggccaagtccatccagaacagggcgtgcctaggacagtgcttcagctacagcgtccccaacaccttcccacagtccacagagtccctggttcactgtgactcctgcatgccagcccagtccatgtgggagattgtgacgctggagtgcccgggccacgaggaggtgcccagggtggacaagctggtggagaagatcctgcactgtagctgccaggcctgcggcaaggagcctagtcacgaggggctgagcgtctatgtgcagggcgaggacgggccgggatcccagcccggcacccaccctcacccccatccccacccccatcctggcgggcagacccctgagcccgaggacccccctggggccccccacacagaggaagagggggctgaggactgaggcccccccaactcttcctcccctctcatccccctgtggaatgttgggtctcactctctggggaagtcaggggagaagctgaagcccccctttggcactggatggacttggcttcagactcggacttgaatgctgcccggttgccatggagatctgaaggggcggggttagagccaagctgcacaatttaatatattcaagagtggggggaggaagcagaggtcttcagggctctttttttggggggggtggtctcttcctgtctggcttctagagatgtgcctgtgggagggggaggaagttggctgagccattgagtgctgggggaggccatccaagatggcatgaatcgggctaaggtccctgggggtgcagatggtactgctgaggtcccgggcttagtgtgagcatcttgccagcctcaggcttgagggagggctgggctagaaagaccactggcagaaacaggaggctccggcccacaggtttccccaaggcctctcaccccacttcccatctccagggaagcgtcgccccagtggcactgaagtggccctccctcagcggaggggtttgggagtcaggcctgggcaggaccctgctgactcgtggcgcgggagctgggagccaggctctccgggcctttctctggcttccttggcttgcctggtgggggaaggggaggaggggaagaaggaaagggaagagtcttccaaggccagaaggagggggacaaccccccaagaccatccctgaagacgagcatccccctcctctccctgttagaaatgttagtgccccgcactgtgccccaagttctaggccccccagaaagctgccagagccggccgccttctcccctctcccagggatgctctttgtaaatatcggatgggtgtgggagtgaggggttacctccctcgccccaaggttccagaggccctaggcgggatgggctcgctgaacctcgaggaactccaggacgaggaggacatgggacttgcgtggacagtcagggttcacttgggctctctctagctccccaattctgcctgcctcctccctcccagctgcactttaaccctagaaggtggggacctggggggagggacagggcaggcgggcccatgaagaaagcccctcgttgcccagcactgtctgcgtctgctcttctgtgcccagggtggctgccagcccactgcctcctgcctggggtggcctggccctcctggctgttgcgacgcgggcttctggagcttgtcaccattggacagtctccctgatggaccctcagtcttctcatgaataaattccttcaacgcctgtg

SEQ ID NO: 158691 - DNA, 2051 bp, Homo sapiens
  Payload ID: 11051
  Gene Symbol: NBL1
  Gene Name: neuroblastoma 1, DAN family BMP antagonist
  Uniprot ID: P41271
  ENST ID: ENST00000618761
  CDS Start-End: 179-724
gtttacaagcggcggcaaagggggcagccgcctgccttggcgtggccggaggttggcgggcatcaagggagaaagccacacttccaggctttcggaggccctcgctccccaagctggacgccaccagcctgtaactaggggcaccccaggaaaacagagggctctggaggccacgggcatgatgcttcgggtcctggtgggggctgtcctccctgccatgctactggctgccccaccacccatcaacaagctggcactgttcccagataagagtgcctggtgcgaagccaagaacatcacccagatcgtgggccacagcggctgtgaggccaagtccatccagaacagggcgtgcctaggacagtgcttcagctacagcgtccccaacaccttcccacagtccacagagtccctggttcactgtgactcctgcatgccagcccagtccatgtgggagattgtgacgctggagtgcccgggccacgaggaggtgcccagggtggacaagctggtggagaagatcctgcactgtagctgccaggcctgcggcaaggagcctagtcacgaggggctgagcgtctatgtgcagggcgaggacgggccgggatcccagcccggcacccaccctcacccccatccccacccccatcctggcgggcagacccctgagcccgaggacccccctggggccccccacacagaggaagagggggctgaggactgaggcccccccaactcttcctcccctctcatccccctgtggaatgttgggtctcactctctggggaagtcaggggagaagctgaagcccccctttggcactggatggacttggcttcagactcggacttgaatgctgcccggttgccatggagatctgaaggggcggggttagagccaagctgcacaatttaatatattcaagagtggggggaggaagcagaggtcttcagggctctttttttggggggggtggtctcttcctgtctggcttctagagatgtgcctgtgggagggggaggaagttggctgagccattgagtgctgggggaggccatccaagatggcatgaatcgggctaaggtccctgggggtgcagatggtactgctgaggtcccgggcttagtgtgagcatcttgccagcctcaggcttgagggagggctgggctagaaagaccactggcagaaacaggaggctccggcccacaggtttccccaaggcctctcaccccacttcccatctccagggaagcgtcgccccagtggcactgaagtggccctccctcagcggaggggtttgggagtcaggcctgggcaggaccctgctgactcgtggcgcgggagctgggagccaggctctccgggcctttctctggcttccttggcttgcctggtgggggaaggggaggaggggaagaaggaaagggaagagtcttccaaggccagaaggagggggacaaccccccaagaccatccctgaagacgagcatccccctcctctccctgttagaaatgttagtgccccgcactgtgccccaagttctaggccccccagaaagctgccagagccggccgccttctcccctctcccagggatgctctttgtaaatatcggatgggtgtgggagtgaggggttacctccctcgccccaaggttccagaggccctaggcgggatgggctcgctgaacctcgaggaactccaggacgaggaggacatgggacttgcgtggacagtcagggttcacttgggctctctctagctccccaattctgcctgcctcctccctcccagctgcactttaaccctagaaggtggggacctggggggagggacagggcaggcgggcccatgaagaaagcccctcgttgcccagcactgtctgcgtctgctcttctgtgcccagggtggctgccagcccactgcctcctgcctggggtggcctggccctcctggctgttgcgacgcgggcttctggagcttgtcaccattggacagtctccctgatggaccctcagtcttctcatgaataaattccttcaacgcctgtg

SEQ ID NO: 158692 - DNA, 7281 bp, Homo sapiens
  Payload ID: 11052
  Gene Symbol: NBAS
  Gene Name: neuroblastoma amplified sequence
  Uniprot ID: A2RRP1
  ENST ID: ENST00000281513
  CDS Start-End: 27-7142
ctccgctgcctgagtcctcggcgaacatggcggcccccgagtcagggccggctttgagtccaggcactgcagagggtgaggaggagacgattctctatgacttgttggtcaacaccgagtggccaccggagactgaagtacagcctagaggcaaccaaaaacatggtgcatcctttatcatcacgaaagcaattcgagatcgtttattatttttacgccaatacatctggtacagcccggcaccttttttgctccctgatggactggttcgcttggttaataaacagataaactggcatttggtacttgcaagcaatggaaagcttttggctgctgttcaagatcagtgtgtggaaatcaggtctgcaaaagatgattttacatccattattgggaaatgtcaagttccgaaagacccgaaaccccagtggagacgggtagcatggagttacgattgtaccctactggcctatgccgaaagcacaggaactgtgagggtgtttgatctcatgggaagtgaactctttgtcatttccccggcatctagttttataggtgacttaagctatgccattgctgggttgatatttttagaatataaagcaagtgcacagtggtctgcagaactcctggtcatcaattaccgaggagaacttagaagttaccttgtaagtgttggaacaaatcagagctaccaagaaagtcactgtttcagcttcagtagtcattatcctcatggaatcaacacagctatttaccaccctggtcacagacttttacttgttggtggatgtgaaactgctgaagtaggcatgtcaaaagcttctagctgtggcctttctgcctggagagttctttcaggatcaccgtattataagcaggttactaatggtggagacggggttactgcagtaccgaagacactgggattattaaggatgttaagtgtcaagttttacagtcgccagggacaagaacaggatggaatttttaagatgagcctttctccagatgggatgctcctggcagccattcacttctcagggaaactgagcatctgggcgattccatctctgaagcaacaaggggaatggggtcaaaatgagcagccaggctatgatgaccttaatcctgattggaggctctctactgagaagagaaaaaaaatcaaagataaagagtccttttacccactgatagatgtcaattggtgggcagacagtgcagtgactttagctcgatgctctggtgctttaactgtttcatctgtgaaaactttgaagaatttactgggaaaatcctgtgaatggtttgaaccatcacctcaagtcactgctacccatgatgggggatttttaagtttggagtgtgagattaaacttgcccccaaacgatctcgtttggagactagagctggagaagaagatgaaggagaagaggattctgattctgattatgaaatatctgccaaggctcgctactttggttatataaaacagggcctttacttggtgactgaaatggagcgatttgcaccaccacggaaacgcccacgaaccattactaaaaactaccgccttgtgagtttgcgctccacgacaccagaggaactttatcagaggaagattgaaagtgaagagtatgaggaagccttgtccttggctcatacctacggcctggatactgaccttgtatatcagaggcagtggaggaagtcagcggtcaacgttgcttcaattcagaattatttgagtaaaataaagaagcgatcctgggttctccatgagtgtttggaaagagttcctgaaaatgtggatgctgcaaaagaactgcttcagtatggattaaaaggcacagacctggaggctcttttagcaatagggaaaggagcagatgatggcagatttacattacctggtgaaatagacattgacagtatctcctatgaagagctttcaccacctgatgaagagcctgccaagaataaaaaggaaaaggagctcaagaagagacaagaactactgaaattagtgaacttttccaagttgacactggaacaaaaggaactttgccgttgtagacggaagttattaacctacttagatcgacttgcaacatatgaggaaatcctaggagtgcctcatgcatctgaacagagatatgatgctgaattctttaagaaattcagaaatcagaatattgttctctcagcaagaacttatgctcaggaaagtaatgtacaagccctggaaattctgtttacttaccatggttccgacctgcttcctcatcgccttgcaattctgtccaactttccagagaccacttctccacatgaatattctgttttgctgcccgaagcttgttttaacggtgactccctgatgatcattccttggcatgaacataaacaccgagctaaagattggtgcgaggagttggcttgcagaatggttgttgagccgaatctccaagatgaaagtgaattcttgtatgctgcacagcctgagttactaaggttcaggatgacccagcttacggtggagaaggttatggactggtatcagaccagagcagaggaaatagagcattatgctcggcaggtggactgtgcattgtcacttattcgacttgggatggagcggaatattcctggtttgctggttctctgtgacaatttggttactctggaaacattggtttatgaagccaggtgtgatgtaactctaaccctgaaagaactccagcagatgaaagacattgaaaaactaagattactgatgaatagttgttctgaggataaatatgtgacaagtgcctaccagtggatggttccctttcttcatcgttgtgagaaacagtcgcctggtgtggctaatgagctattaaaagaatatttagtaactttagctaaaggggacttaaaatttcccctgaagatatttcagcattccaaaccagatctgcagcaaaaaattattcctgatcaggaccaactgatggcaatagcactagagtgcatctatacctgtgaacgaaatgatcaactctgtctttgctatgacctactagaatgtctgccagaaagaggatatggtgataagacagaggcaaccacaaagcttcatgacatggtagaccaactggaacaaattctcagtgtgtcagagcttttggaaaaacatggactcgagaaaccaatttcatttgttaaaaacactcaatctagctcagaagaggcacgcaagctgatggttagattgacgaggcacactggccggaagcagcctcctgtcagtgagtctcattggagaacgttgctgcaagacatgttaactatgcagcagaatgtatacacatgtctagattctgatgcctgctatgagatatttacagaaagccttctgtgctctagtcgccttgaaaacatccacctggctggacagatgatgcactgcagtgcttgttcagaaaatcctccagctggtatagcccataaagggaaaccccactacagggtcagctacgaaaagagtattgacttggttttggctgccagcagagagtacttcaattcttctaccaacctcactgatagctgcatggatctagccaggtgctgcttacaactgataacagacagaccccctgccattcaagaggagctagatcttatccaagccgttggatgtcttgaagaatttggggtaaagatcctgcctttgcaagtgcgattgtgccctgatcggatcagtctcatcaaggagtgtatttcccagtcccccacatgctataaacaatccaccaagcttctgggccttgctgagctgctgagggttgcaggtgagaacccagaagaaaggcggggacaggttctaatccttttagtggagcaggcacttcgcttccatgactacaaagcagccagtatgcattgtcaggagctgatggccacaggttatcctaaaagttgggatgtttgtagccagttaggacaatcagaaggttaccaggacttggccactcgtcaagagctcatggcttttgctttgacacattgccctcctagcagcattgaacttcttttggcagctagcagctctctgcagacagaaattctttatcaaagagtgaatttccagatccatcatgaaggaggggaaaatatcagtgcttcaccattaactagtaaagcagtacaagaggatgaagtaggtgttccaggtagcaattcagctgacctattgcgctggaccactgctaccaccatgaaagtcctttccaacaccacaaccaccaccaaagcggtgctgcaggccgtcagtgatgggcagtggtggaagaagtctttaacttaccttcgaccccttcaggggcaaaaatgtggtggtgcatatcaaatcggaactacagccaatgaagatctagagaaacaagggtgtcatcctttttatgaatctgtcatctcaaatccttttgtcgctgagtctgaagggacctatgacacctatcagcatgttccagtggaaagctttgcagaagtattgctgagaactggaaaattggcagaggctaaaaataaaggagaagtatttccaacaactgaagttctcttgcaactagcaagtgaagccttgccaaatgacatgaccttggctcttgcttaccttcttgccttaccacaagtgttagatgctaaccggtgctttgaaaagcagtccccctctgcattatctctccagctggcagcgtattactatagcctccagatctatgcccgattggccccatgtttcagggacaagtgccatcctctttacagggctgatcccaaagaactaatcaagatggtcaccaggcatgtgactcgacatgagcacgaagcctggcctgaagaccttatttcactgaccaagcagttacactgctacaatgaacgtctcctggatttcactcaggcgcagatccttcagggccttcggaagggtgtggacgtgcagcggtttactgcagatgaccagtataaaagggaaactatccttggtctggcagaaactctagaggaaagcgtctacagcattgctatttctctggcacaacgttacagtgtctcccgctgggaagtttttatgacccatttggagttcctcttcacggacagtggtttgtccacactagaaattgaaaatagagcccaagaccttcatctctttgagactttgaagactgatccagaagcctttcaccagcacatggtcaagtatatttaccctactattggtggctttgatcacgaaaggctgcagtattatttcactcttctggaaaactgtggctgtgcagatttggggaactgtgccattaaaccagaaacccacattcgactgctgaagaagtttaaggttgttgcatcaggtcttaattacaaaaagctgacagatgaaaacatgagtcctcttgaagcattggagccagttctttcaagtcaaaatatcttgtctatttccaaacttgttcccaaaatccctgaaaaggatggacagatgctttccccaagctctctgtacaccatctggttacagaagttgttctggactggagaccctcatctcattaaacaagtcccaggctcttcaccggagtggcttcatgcctatgatgtctgcatgaagtactttgatcgtctccacccaggtgacctcatcactgtggtagatgcagttacattttctccaaaagctgtgaccaagctgtctgtggaagcccgtaaagagatgactagaaaggctattaagacagtcaaacattttattgagaagccaaggaaaagaaactcagaagacgaagctcaagaagctaaggattctaaagttacctatgcagatactttgaatcatctggagaaatcacttgcccacctggaaaccctgagccacagcttcatcctttctctgaagaatagtgagcaggaaacactgcaaaaatacagtcacctctatgatctgtcccgatcagaaaaagagaaacttcatgatgaagctgtggctatttgtttagatggtcagcctctagcaatgattcagcagctgctagaggtggcagttggccctcttgacatctcacccaaggatatagtgcagagtgcaatcatgaaaataatttctgcattgagtggtggcagtgctgaccttggtgggccaagggacccactgaaggtcctggaaggtgttgttgcagcagtccacgccagtgtggacaagggtgaggagctggtttcacctgaggacctgctggagtggctgcggcctttctgtgctgatgacgcctggccggtgcggccccgcattcacgtgctgcagattttggggcaatcatttcacctgactgaggaggacagcaagctcctcgtgttctttagaactgaagccattctcaaagcctcctggccccagagacaggtagacatagctgacattgagaatgaagagaaccgctactgtctattcatggaactcctggaatctagtcaccacgaggctgaatttcagcacttggttttacttttgcaagcttggccacctatgaaaagtgaatatgtcataaccaataatccatgggtgagactagctacagtgatgctaaccagatgtacgatggagaacaaggaaggattggggaatgaagttttgaaaatgtgtcgctctttgtataacaccaagcagatgctgcctgcagagggtgtgaaggagctgtgtctgctgctgcttaaccagtccctcctgcttccatctctgaaacttctcctcgagagccgagatgagcatctgcacgagatggcactggagcaaatcacggcagtcactacggtgaatgattccaattgtgaccaagaacttctttccctgctcctggatgccaagctgctggtgaagtgtgtctccactcccttctatccacgtattgttgaccacctcttggctagcctccagcaagggcgctgggatgcagaggagctgggcagacacctgcgggaggccggccatgaagccgaagccgggtctctccttctggccgtgagggggactcaccaggccttcagaaccttcagtacagccctccgcgcagcacagcactgggtgtgagggccacctgtggccctgctccttagcagaaaaagcatctggagttgaatgctgttcccagaagcaacatgtgtatctgccgattgttctccatggttccaacaaattgcaaataaaactgtatggaaacgatgagcaa

SEQ ID NO: 158693 - DNA, 687 bp, Homo sapiens
  Payload ID: 11052
  Gene Symbol: NBAS
  Gene Name: neuroblastoma amplified sequence
  ENST ID: ENST00000433283
  CDS Start-End: 1-555
gtagacatagctgacattgagaatgaagagaaccgctactgtctattcatggaactcctggaatctagtcaccacgaggctgaatttcagcacttggttttacttttgcaagcttggccacctatgaaaagtgaatatgtcataaccaataatccatgggtgagactagctacagtgatgctaaccagatgtacgatggagaacaaggaaggattggggaatgaagttttgaaaatgtgtcgctctttgtataacaccaagcagatgctgcctgcagaggtgaatgattccaattgtgaccaagaacttctttccctgctcctggatgccaagctgctggtgaagtgtgtctccactcccttctatccacgtattgttgaccacctcttggctagcctccagcaagggcgctgggatgcagaggagctgggcagacacctgcgggaggccggccatgaagccgaagccgggtctctccttctggccgtgagggggactcaccaggccttcagaaccttcagtacagccctccgcgcagcacagcactgggtgtgagggccacctgtggccctgctccttagcagaaaaagcatctggagttgaatgctgttcccagaagcaacatgtgtatctgccgattgttctccatggttccaacaaattgcaaataaaactgtatggaaacga

SEQ ID NO: 158694 - DNA, 638 bp, Homo sapiens
  Payload ID: 11052
  Gene Symbol: NBAS
  Gene Name: neuroblastoma amplified sequence
  ENST ID: ENST00000429842
  CDS Start-End: 1-613
gaaagaactccagcagatgaaagacattgaaaaactaagattactgatgaatagttgttctgaggataaatatgtgacaagtgcctaccagtggatggttccctttcttcatcgttgtgagaaacagtcgcctggtgtggctaatgagctattaaaagaatatttagtaactttagctaaaggggacttaaaatttcccctgaagatatttcagcattccaaaccagatctgcagcaaaaaattattcctgatcaggaccaactgatggcaatagcactagagtgcatctatacctgtgaacgaaatgatcaactctgtctttgctatgacctactagaatgtctgccagaaagaggatatggtgataagacagaggcaaccacaaagcttcatgacatggtagaccaactggaacaaattctcagtgtgtcagagcttttggaaaaacatggactcgagaaaccaatttcatttgttaaaaacactcaatctagctcagaagaggcacgcaagctgatggttagattgacgaggcacactggccggaacctgtttaccacttctctgtccgtggacatttgggttattttgagttttggcttttacaaataaagttgctacgacttttcatatgcaa

SEQ ID NO: 158695 - DNA, 1330 bp, Homo sapiens
  Payload ID: 11052
  Gene Symbol: NBAS
  Gene Name: neuroblastoma amplified sequence
  ENST ID: ENST00000417461
  CDS Start-End: 1-516
ctgtctgtggaagcccgtaaagagatgactagaaaggctattaagacagtcaaacattttattgagaagccaaggaaaagaaactcagaagacgaagctcaagaagctaaggattctaaagttacctatgcagatactttgaatcatctggagaaatcacttgcccacctggaaaccctgagccacagcttcatcctttctctgaagaatagtgagcaggaaacactgcaaaaatacagtcacctctatgatctgtcccgatcagaaaaagagaaacttcatgatgaagctgtggctatttgtttagatggtcagcctctagcaatgattcagcagctgctagaggtggcagttggccctcttgacatctcacccaaggatatagtgcagagtgcaatcatgaaaataatttctgcattgagtggtggcagtgctgaccttggtgggccaagggacccactgaaggtcctggaaggtgttgttgcagcagtccacgccagtgtggacaaggggtagacatagctgacattgagaatgaagagaaccgctactgtctattcatggaactcctggaatctagtcaccacgaggctgaatttcagcacttggttttacttttgcaagcttggccacctatgaaaagtgaatatgtcataaccaataatccatgggtgagactagctacagtgatgctaaccagatgtacgatggagaacaaggaaggattggggaatgaagttttgaaaatgtgtcgctctttgtataacaccaagcagatgctgcctgcagagggtgtgaaggagctgtgtctgctgctgcttaaccagtccctcctgcttccatctctgaaacttctcctcgagagccgagatgagcatctgcacgagatggcactggagcaaatcacggcagtcactacggtgaatgattccaattgtgaccaagaacttctttccctgctcctggatgccaagctgctggtgaagtgtgtctccactcccttctatccacgtattgttgaccacctcttggctagcctccagcaagggcgctgggatgcagaggagctgggcagacacctgcgggaggccggccatgaagccgaagccgggtctctccttctggccgtgagggggactcaccaggccttcagaaccttcagtacagccctccgcgcagcacagcactgggtgtgagggccacctgtggccctgctccttagcagaaaaagcatctggagttgaatgctgttcccagaagcaacatgtgtatctgccgattgttctccatggttccaacaaattgcaaataaaactgtatggaaacgatg

SEQ ID NO: 158696 - DNA, 844 bp, Homo sapiens
  Payload ID: 11052
  Gene Symbol: NBAS
  Gene Name: neuroblastoma amplified sequence
  ENST ID: ENST00000441755
  CDS Start-End: 1-844
atgacccagcttacggtggagaaggttatggactggtatcagaccagagcagaggaaatagagcattatgctcggcagctgcagcaaaaaattattcctgatcaggaccaactgatggcaatagcactagagtgcatctatacctgtgaacgaaatgatcaactctgtctttgctatgacctactagaatgtctgccagaaagaggatatggtgataagacagaggcaaccacaaagcttcatgacatggtagaccaactggaacaaattctcagtgtgtcagagcttttggaaaaacatggactcgagaaaccaatttcatttgttaaaaacactcaatctagctcagaagaggcacgcaagctgatggttagattgacgaggcacactggccggaagcagcctcctgtcagtgagtctcattggagaacgttgctgcaagacatgttaactatgcagcagaatgtatacacatgtctagattctgatgcctgctatgagatatttacagaaagccttctgtgctctagtcgccttgaaaacatccacctggctggacagatgatgcactgcagtgcttgttcagaaaatcctccagctggtatagcccataaagggaaaccccactacagggtcagctacgaaaagagtattgacttggttttggctgccagcagagagtacttcaattcttctaccaacctcactgatagctgcatggatctagccaggtgctgcttacaactgataacagacagaccccctgccattcaagaggagctagatcttatccaagccgttggatgtcttgaagaatttggggtaaagatcctgcctttgcaag

SEQ ID NO: 158697 - DNA, 4391 bp, Homo sapiens
  Payload ID: 11052
  Gene Symbol: NBAS
  Gene Name: neuroblastoma amplified sequence
  ENST ID: ENST00000442506
  CDS Start-End: 1-4259
ggatgacccagcttacggtggagaaggttatggactggtatcagaccagagcagaggaaatagagcattatgctcggcagctgcagcaaaaaattattcctgatcaggaccaactgatggcaatagcactagagtgcatctatacctgtgaacgaaatgatcaactctgtctttgctatgacctactagaatgtctgccagaaagaggatatggtgataagacagaggcaaccacaaagcttcatgacatggtagaccaactggaacaaattctcagtgtgtcagagcttttggaaaaacatggactcgagaaaccaatttcatttgttaaaaacactcaatctagctcagaagaggcacgcaagctgatggttagattgacgaggcacactggccggaagcagcctcctgtcagtgagtctcattggagaacgttgctgcaagacatgttaactatgcagcagaatgtatacacatgtctagattctgatgcctgctatgagatatttacagaaagccttctgtgctctagtcgccttgaaaacatccacctggctggacagatgatgcactgcagtgcttgttcagaaaatcctccagctggtatagcccataaagggaaaccccactacagggtcagctacgaaaagagtattgacttggttttggctgccagcagagagtacttcaattcttctaccaacctcactgatagctgcatggatctagccaggtgctgcttacaactgataacagacagaccccctgccattcaagaggagctagatcttatccaagccgttggatgtcttgaagaatttggggtaaagatcctgcctttgcaagtgcgattgtgccctgatcggatcagtctcatcaaggagtgtatttcccagtcccccacatgctataaacaatccaccaagcttctgggccttgctgagctgctgagggttgcaggtgagaacccagaagaaaggcggggacaggttctaatccttttagtggagcaggcacttcgcttccatgactacaaagcagccagtatgcattgtcaggagctgatggccacaggttatcctaaaagttgggatgtttgtagccagttaggacaatcagaaggttaccaggacttggccactcgtcaagagctcatggcttttgctttgacacattgccctcctagcagcattgaacttcttttggcagctagcagctctctgcagacagaaattctttatcaaagagtgaatttccagatccatcatgaaggaggggaaaatatcagtgcttcaccattaactagtaaagcagtacaagaggatgaagtaggtgttccaggtagcaattcagctgacctattgcgctggaccactgctaccaccatgaaagtcctttccaacaccacaaccaccaccaaagcggtgctgcaggccgtcagtgatgggcagtggtggaagaagtctttaacttaccttcgaccccttcaggggcaaaaatgtggtggtgcatatcaaatcggaactacagccaatgaagatctagagaaacaagggtgtcatcctttttatgaatctgtcatctcaaatccttttgtcgctgagtctgaagggacctatgacacctatcagcatgttccagtggaaagctttgcagaagtattgctgagaactggaaaattggcagaggctaaaaataaaggagaagtatttccaacaactgaagttctcttgcaactagcaagtgaagccttgccaaatgacatgaccttggctcttgcttaccttcttgccttaccacaagtgttagatgctaaccggtgctttgaaaagcagtccccctctgcattatctctccagctggcagcgtattactatagcctccagatctatgcccgattggccccatgtttcagggacaagtgccatcctctttacagggctgatcccaaagaactaatcaagatggtcaccaggcatgtgactcgacatgagcacgaagcctggcctgaagaccttatttcactgaccaagcagttacactgctacaatgaacgtctcctggatttcactcaggcgcagatccttcagggccttcggaagggtgtggacgtgcagcggtttactgcagatgaccagtataaaagggaaactatccttggtctggcagaaactctagaggaaagcgtctacagcattgctatttctctggcacaacgttacagtgtctcccgctgggaagtttttatgacccatttggagttcctcttcacggacagtggtttgtccacactagaaattgaaaatagagcccaagaccttcatctctttgagactttgaagactgatccagaagcctttcaccagcacatggtcaagtatatttaccctactattggtggctttgatcacgaaaggctgcagtattatttcactcttctggaaaactgtggctgtgcagatttggggaactgtgccattaaaccagaaacccacattcgactgctgaagaagtttaaggttgttgcatcaggtcttaattacaaaaagctgacagatgaaaacatgagtcctcttgaagcattggagccagttctttcaagtcaaaatatcttgtctatttccaaacttgttcccaaaatccctgaaaaggatggacagatgctttccccaagctctctgtacaccatctggttacagaagttgttctggactggagaccctcatctcattaaacaagtcccaggctcttcaccggagtggcttcatgcctatgatgtctgcatgaagtactttgatcgtctccacccaggtgacctcatcactgtggtagatgcagttacattttctccaaaagctgtgaccaagctgtctgtggaagcccgtaaagagatgactagaaaggctattaagacagtcaaacattttattgagaagccaaggaaaagaaactcagaagacgaagctcaagaagctaaggattctaaagttacctatgcagatactttgaatcatctggagaaatcacttgcccacctggaaaccctgagccacagcttcatcctttctctgaagaatagtgagcaggaaacactgcaaaaatacagtcacctctatgatctgtcccgatcagaaaaagagaaacttcatgatgaagctgtggctatttgtttagatggtcagcctctagcaatgattcagcagctgctagaggtggcagttggccctcttgacatctcacccaaggatatagtgcagagtgcaatcatgaaaataatttctgcattgagtggtggcagtgctgaccttggtgggccaagggacccactgaaggtcctggaaggtgttgttgcagcagtccacgccagtgtggacaagggtgaggagctggtttcacctgaggacctgctggagtggctgcggcctttctgtgctgatgacgcctggccggtgcggccccgcattcacgtgctgcagattttggggcaatcatttcacctgactgaggaggacagcaagctcctcgtgttctttagaactgaagccattctcaaagcctcctggccccagagacaggtagacatagctgacattgagaatgaagagaaccgctactgtctattcatggaactcctggaatctagtcaccacgaggctgaatttcagcacttggttttacttttgcaagcttggccacctatgaaaagtgaatatgtcataaccaataatccatgggtgagactagctacagtgatgctaaccagatgtacgatggagaacaaggaaggattggggaatgaagttttgaaaatgtgtcgctctttgtataacaccaagcagatgctgcctgcagagggtgtgaaggagctgtgtctgctgctgcttaaccagtccctcctgcttccatctctgaaacttctcctcgagagccgagatgagcatctgcacgagatggcactggagcaaatcacggcagtcactacggtgaatgattccaattgtgaccaagaacttctttccctgctcctggatgccaagctgctggtgaagtgtgtctccactcccttctatccacgtattgttgaccacctcttggctagcctccagcaagggcgctgggatgcagaggagctgggcagacacctgcgggaggccggccatgaagccgaagccgggtctctccttctggccgtgagggggactcaccaggccttcagaaccttcagtacagccctccgcgcagcacagcactgggtgtgagggccacctgtggccctgctccttagcagaaaaagcatctggagttgaatgctgttcccagaagcaacatgtgtatctgccgattgttctccatggttccaacaaattgcaaataaaactgtatggaaacga

SEQ ID NO: 158698 - DNA, 442 bp, Homo sapiens
  Payload ID: 11052
  Gene Symbol: NBAS
  Gene Name: neuroblastoma amplified sequence
  ENST ID: ENST00000427792
  CDS Start-End: 1-302
aagcttctagctgtggcctttctgcctggagagttctttcaggatcaccgtattataagcaggttactaatggtggagacggggttactgcagtaccgaagacactgggattattaaggatgttaagtgtcaagttttacagtcgccagggacaagaacaggatggaatttttaagatgagcctttctccagatgggatgctcctggcagccattcacttctcagggaaactgagcatctgggcgattccatctctgaagcaacaaggggaatggggtcaaaatgagcaggtgttggactaatcttaagtagatgaatgaagagtaagtgggaagatggcagttgatgcgatgaatcttgatataatccacagctgttttcacaatttcaccagactccaggctatgatgaccttaatcctgattggaggctctctactgag

SEQ ID NO: 158699 - DNA, 611 bp, Homo sapiens
  Payload ID: 11052
  Gene Symbol: NBAS
  Gene Name: neuroblastoma amplified sequence
  ENST ID: ENST00000423602
  CDS Start-End: 1-414
atagctgacattgagaatgaagagaaccgctactgtctattcatggaactcctggaatctagtcaccacgaggctgaatttcagcacttggttttacttttgcaagcttggccacctatgaaaagtgaatatgtcataaccaataatccatgggtgagactagctacagtgatgctaaccagatgtacgatggagaacaaggaaggattggggaatgaagttttgaaaatgtgtcgctctttgtataacaccaagcagatgctgcctgcagagggtgtgaaggagctgtgtctgctgctgcttaaccagtccctcctgcttccatctctgaaacttctcctcgagagccgagatgagcatctgcacgagatggcactggagcaaatcacggcagtcactacggatatcttctagggaccagagaaggaaggagaatctagagcagaggtatatgcttgctactcaagacagtgaagaggttgatgaaaagacatcactgatataaagttttcttaatgacaaaggatacagaaaattctgtaaatagttacagaaagcagaatataattgtatttggaaataatcattatgaataaaatgagaaaatcaaa

SEQ ID NO: 158700 - DNA, 4176 bp, Homo sapiens
  Payload ID: 11053
  Gene Symbol: NBPF1
  Gene Name: neuroblastoma breakpoint family, member 1
  ENST ID: ENST00000432949
  CDS Start-End: 889-4176
aggctgcccgagcttctgagcgagcgcggtgcttttgggaacgcgggacgggcgatctgcggcgccaggagctgggccgaggcgcggcggcgcggctgccggctgccctgtgaatgggaagttacgcgaagtccacccagcgtttctgaggcaatctgaaggcaaatcctgtttagacccaggcgaaggttcccggtgacccgggctctcaccagccaattgtcccttgccgtcctcctgagggtgcctggagcttaagcactgtgtgctcttggcctccacactggggatgccgctgactcccactgtccagggcttccagtggattctccgaggccctgatgtagaaacttccccattgggtgcaccaagagcagcctcacatggtgtgggctgacatcaagagctgccagatccaacagatggccaatctttcctaagctgctcaccttacaagaaaacgaatcgtactgctaagaattcaaacttcagcagtcatggggagccttggaaggagcccgaatcactgatggaattggacagtgcatggagatggttcagcaggacaaggtgtcattggaggacagtgtggagtgcagagagacatgctttgaaatgggattgatccagtcctccttccttcactaccacatgaatgctgggcagcccagggtcaacccaccgcaccctcaactcagacggttacctggcacgctggccacagtctacctcactcttatcagagtctgagctactggcagtgctttcagctctgagttcaggcacctcgaaccttgtttttgtggtgaaggatcctaaagtgctgtggggagtgatcacatttttcacaacatccctggctccacctcttctgccacaaacgtcagcatggtggtatcagctggcccttggtccagcgagaaggcagagacgaacattttagaaatcaacgagaaattgcgcccccagctggcagagaacaaacagcagttcagaaacctcaaagagaaatgttttgtaactcaactggccggcttcctggccaaccgacagaagaaatacaagtatgaagagtgtaaagacctcataaaatttatgctgaggaatgagcgacagttcaaggaggagaagcttgcagagcagctcaagcaagctgaggagctcaggcaatataaagtcctggttcactctcaggaacgagagctgacccagttaagggagaagttacgggaagggagagatgcctcccgctcattgaatcagcatctccaggccctcctcactccggataagccagacaagtcccaggggcaggacctccaagaacagctggctgaggggtgtagactggcacagcaacttttccagaagctcagcccagaaaatgacgaagatgaggatgaagatgttcaagttgaggaggctgagaaagtactggaatcatctgcccccagggaggtgcagaaggctgaagaaagcaaagtccctgaggactcactggaggaatgtgccatcacttgttcaaatagccacagcccttgtgactccaaccagcctcacaagaacatcaacatcacctttgaggaagacaaagtcaactcaactctggttgtagacagagaatcctctcatgatgaatgtcaggatgctgtaaacattctcccagtccctggccccacctcttctgccacaaacgtcagcatggtggtatcagccggccctttgtccagcgagaaggcagagatgaacattctagaaatcaacgagaaattgcatccccagctggcagagaagaaacagcagttcagaaacctcaaagagaaatgttttgtaactcaactggcctgcttcctggccaaccagcagaacaaatacaaatatgaagagtgcaaagacctcataaaatctatgctgaggaatgagcgacagttcaaggaggagaagcttgcagagcagctcaagcaagctgaggagctcaggcaatataaagtcctggttcactctcaggaacgagagctgacccagttaagggagaagttacgggaagggagagatgcctcccgctcattgaatcagcatctccaggccctcctcactccggataagccagacaagtcccaggggcaggacctccaagaacagctggctgaggggtgtagactggcacagcaacttttccagaagctcagcccagaaaatgacgaagatgaggatgaagatgttcaagttgaggaggctgagaaagtactggaatcatctgcccccagggaggtgcagaaggctgaagaaagcaaagtccctgaggactcactggaggaatgtgccatcacttgttcaaatagccacggcccttgtgactccaaccagcctcacaagaacatcaacatcacctttgaggaagacaaagtcaactcagctctggttgtagacagagaatcctctcatgatgaatgtcaggatgctgtaaacattctcccagtccctggccccacctcttctgccacaaacgtcagcatggtggtatcagccggccctttgtccagcgagaaggcagagatgaacattctagaaatcaacgagaaattgcatccccagctggcagagaagaaacagcagttcagaaacctcaaagagaaatgttttgtaactcaactggcctgcttcctggccaaccagcagaacaaatacaaaaatgaagagtgcaaagacctcataaaatctatgctgaggaatgagcgacagttcaaggaggagaagcttgcagagcagctcaagcaagctgaggagctcaggcaatataaagtcctggttcactctcaggaacgagagctgacccagttaagggagaagttacgggaagggagagatgcctcctgctcattgaatcagcatctccaggccctcctcactccggatgagccagacaagtcccaggggcaggacctccaagaacagctggctgaggggtgtagactggcacagcaccttgtccaaaagctcagcccagaaaatgacaacgatgacgatgaagatgttcaagttgaggtggctgagaaagtgcagaaatcgtctgcccccagggagatgccgaaggctgaagaaaaggaagtccctgaggactcactggaggaatgtgccatcacttgttcaaatagccatggcccttatgactccaaccagccacataggaaaaccaaaatcacatttgaggaagacaaagtcgactcaactctcattggctcatcctctcatgttgaatgggaggatgctgtacacattatcccagaaaatgaaagtgatgatgaggaagaggaagaaaaagggccagtgtctcccaggaatctgcaggagtctgaagaggaggaagtcccccaggagtcctgggatgaaggttattcgactctctcaattcctcctgaaatgttggcctcgtacaagtcttacagcggcacatttcactcattagaggaacagcaagtctgcatggctgttgacataggcggacatcggtgggatcaagtgaaaaaggaggaccaagaggcaacaggtcccaggctcagcagggagctgctggatgagaaagggcctgaagtcttgcaggactcactggatagatgttattcaactccttcaggttatcttgaactgactgactcatgccagccctacagaagtgccttttacatattggagcaacagcgtgttggctgggctcttgacatggatgaaattgaaaagtaccaagaagtggaagaagaccaagacccatcatgccccaggctcagcagggagctgctggaggcagtagagcctgaagtcttgcaggactcactggatagatgttattcaactccttccagttgtcttgaacagcctgactcctgcctgccctatggaagttccttttatgcattggaggaaaaacatgttggcttttctcttgacgtgaaaagaaggagaaggggaagaaaagaaggggaagaagatcaaaacccaccatgccccaggctcagcggcatgctgatggaagtggaagagcctgaagtcttgcaggactcactggatagatgttattcgactccgtcaatgtactttgaactacctgactcattccagcactacagaagtgtgttttactcatttgaggaacagcacatcagcttcgcccttgacgtg

SEQ ID NO: 158701 - DNA, 2672 bp, Homo sapiens
  Payload ID: 11053
  Gene Symbol: NBPF1
  Gene Name: neuroblastoma breakpoint family, member 1
  ENST ID: ENST00000392963
  CDS Start-End: 459-674
agcccttgaagataaggatggtcaaacaaaataatattatatctgcagaaagtcagatcttggtaagatttactagttgggaatccaatgttaatgccaagaagcagctgccagttgggatcaaatgtgagcctatggatcaaggaatgcctggacacagtagacaaaagttgttcaactggacgccttaggatacacgctaccaaaaacaaagtagccaaaaaggaaccagaataacagaatatcagagccagaggaacatttggagacggttacctggcacgctggccacagtctacctcactcttatcagagtctgagctactggcagtgctttcagctctgagttcaggcacctcgaaccttgtttttgtggtgaaggatcctaaagtgctgtggggagtgatcacatttttcacaacatccctggctccacctcttctgccacaaacgtcagcatggtggtatcagctggcccttggtccagcgagaaggcagagacgaacattttagaaatcaacgagaaattgcgcccccagctggcagagaacaaacagcagttcagaaacctcaaagagaaatgttttgtaactcaactggccggcttcctggccaaccgacagaagaaatacagcaatataaagtcctggttcactctcaggaacgagagctgacccagttaagggagaagttacgggaagggagagatgcctcccgctcattgaatcagcatctccaggccctcctcactccggataagccagacaagtcccaggggcaggacctccaagaacagctggctgaggggtgtagactggcacagcaacttttccagaagctcagcccagaaaatgacgaagatgaggatgaagatgttcaagttgaggaggctgagaaagtactggaatcatctgcccccagggaggtgcagaaggctgaagaaagcaaagtccctgaggactcactggaggaatgtgccatcacttgttcaaatagccacggcccttgtgactccaaccagcctcacaagaacatcaacatcacctttgaggaagacaaagtcaactcagctctggttgtagacagagaatcctctcatgatgaatgtcaggatgctgtaaacattctcccagtccctggccccacctcttctgccacaaacgtcagcatggtggtatcagccggccctttgtccagcgagaaggcagagatgaacattctagaaatcaacgagaaattgcatccccagctggcagagaagaaacagcagttcagaaacctcaaagagaaatgttttgtaactcaactggcctgcttcctggccaaccagcagaacaaatacaaaaatgaagagtgcaaagacctcataaaatctatgctgaggaatgagcgacagttcaaggaggagaagcttgcagagcagctcaagcaagctgaggagctcaggcaatataaagtcctggttcactctcaggaacgagagctgacccagttaagggagaagttacgggaagggagagatgcctcctgctcattgaatcagcatctccaggccctcctcactccggatgagccagacaagtcccaggggcaggacctccaagaacagctggctgaggggtgtagactggcacagcaccttgtccaaaagctcagcccagaaaatgacaacgatgacgatgaagatgttcaagttgaggtggctgagaaagtgcagaaatcgtctgcccccagggagatgccgaaggctgaagaaaaggaagtccctgaggactcactggaggaatgtgccatcacttgttcaaatagccatggcccttatgactccaaccagccacataggaaaaccaaaatcacatttgaggaagacaaagtcgactcaactctcattggctcatcctctcatgttgaatgggaggatgctgtacacattatcccagaaaatgaaagtgatgatgaggaagaggaagaaaaagggccagtgtctcccaggaatctgcaggagtctgaagaggaggaagtcccccaggagtcctgggatgaaggttattcgactctctcaattcctcctgaaatgttggcctcgtacaagtcttacagcggcacatttcactcattagaggaacagcaagtctgcatggctgttgacataggcggacatcggtgggatcaagtgaaaaaggaggaccaagaggcaacaggtcccaggctcagcagggagctgctggatgagaaagggcctgaagtcttgcaggactcactggatagatgttattcaactccttcaggttatcttgaactgactgactcatgccagccctacagaagtgccttttacatattggagcaacagcgtgttggctgggctcttgacatggatgaaattgaaaagtaccaagaagtggaagaagaccaagacccatcatgccccaggctcagcagggagctgctggaggcagtagagcctgaagtcttgcaggactcactggatagatgttattcaactccttccagttgtcttgaacagcctgactcctgcctgccctatggaagttccttttatgcattggaggaaaaacatgttggcttttctcttgacgtgggagaaattgaaaagaaggggaaggggaagaaaagaaggggaagaagatcaacgaagaaaagaaggagaa

SEQ ID NO: 158702 - DNA, 5932 bp, Homo sapiens
  Payload ID: 11053
  Gene Symbol: NBPF1
  Gene Name: neuroblastoma breakpoint family, member 1
  ENST ID: ENST00000430580
  CDS Start-End: 889-4308
aggctgcccgagcttctgagcgagcgcggtgcttttgggaacgcgggacgggcgatctgcggcgccaggagctgggccgaggcgcggcggcgcggctgccggctgccctgtgaatgggaagttacgcgaagtccacccagcgtttctgaggcaatctgaaggcaaatcctgtttagacccaggcgaaggttcccggtgacccgggctctcaccagccaattgtcccttgccgtcctcctgagggtgcctggagcttaagcactgtgtgctcttggcctccacactggggatgccgctgactcccactgtccagggcttccagtggattctccgaggccctgatgtagaaacttccccattgggtgcaccaagagcagcctcacatggtgtgggctgacatcaagagctgccagatccaacagatggccaatctttcctaagctgctcaccttacaagaaaacgaatcgtactgctaagaattcaaacttcagcagtcatggggagccttggaaggagcccgaatcactgatggaattggacagtgcatggagatggttcagcaggacaaggtgtcattggaggacagtgtggagtgcagagagacatgctttgaaatgggattgatccagtcctccttccttcactaccacatgaatgctgggcagcccagggtcaacccaccgcaccctcaactcagacggttacctggcacgctggccacagtctacctcactcttatcagagtctgagctactggcagtgctttcagctctgagttcaggcacctcgaaccttgtttttgtggtgaaggatcctaaagtgctgtggggagtgatcacatttttcacaacatccctggctccacctcttctgccacaaacgtcagcatggtggtatcagctggcccttggtccagcgagaaggcagagacgaacattttagaaatcaacgagaaattgcgcccccagctggcagagaacaaacagcagttcagaaacctcaaagagaaatgttttgtaactcaactggccggcttcctggccaaccgacagaagaaatacaagtatgaagagtgtaaagacctcataaaatttatgctgaggaatgagcgacagttcaaggaggagaagcttgcagagcagctcaagcaagctgaggagctcaggcaatataaagtcctggttcactctcaggaacgagagctgacccagttaagggagaagttacgggaagggagagatgcctcccgctcattgaatcagcatctccaggccctcctcactccggataagccagacaagtcccaggggcaggacctccaagaacagctggctgaggggtgtagactggcacagcaacttttccagaagctcagcccagaaaatgacgaagatgaggatgaagatgttcaagttgaggaggctgagaaagtactggaatcatctgcccccagggaggtgcagaaggctgaagaaagcaaagtccctgaggactcactggaggaatgtgccatcacttgttcaaatagccacagcccttgtgactccaaccagcctcacaagaacatcaacatcacctttgaggaagacaaagtcaactcaactctggttgtagacagagaatcctctcatgatgaatgtcaggatgctgtaaacattctcccagtccctggccccacctcttctgccacaaacgtcagcatggtggtatcagccggccctttgtccagcgagaaggcagagatgaacattctagaaatcaacgagaaattgcatccccagctggcagagaagaaacagcagttcagaaacctcaaagagaaatgttttgtaactcaactggcctgcttcctggccaaccagcagaacaaatacaaatatgaagagtgcaaagacctcataaaatctatgctgaggaatgagcgacagttcaaggaggagaagcttgcagagcagctcaagcaagctgaggagctcaggcaatataaagtcctggttcactctcaggaacgagagctgacccagttaagggagaagttacgggaagggagagatgcctcccgctcattgaatcagcatctccaggccctcctcactccggataagccagacaagtcccaggggcaggacctccaagaacagctggctgaggggtgtagactggcacagcaacttttccagaagctcagcccagaaaatgacgaagatgaggatgaagatgttcaagttgaggaggctgagaaagtactggaatcatctgcccccagggaggtgcagaaggctgaagaaagcaaagtccctgaggactcactggaggaatgtgccatcacttgttcaaatagccacggcccttgtgactccaaccagcctcacaagaacatcaacatcacctttgaggaagacaaagtcaactcagctctggttgtagacagagaatcctctcatgatgaatgtcaggatgctgtaaacattctcccagtccctggccccacctcttctgccacaaacgtcagcatggtggtatcagccggccctttgtccagcgagaaggcagagatgaacattctagaaatcaacgagaaattgcatccccagctggcagagaagaaacagcagttcagaaacctcaaagagaaatgttttgtaactcaactggcctgcttcctggccaaccagcagaacaaatacaaaaatgaagagtgcaaagacctcataaaatctatgctgaggaatgagcgacagttcaaggaggagaagcttgcagagcagctcaagcaagctgaggagctcaggcaatataaagtcctggttcactctcaggaacgagagctgacccagttaagggagaagttacgggaagggagagatgcctcctgctcattgaatcagcatctccaggccctcctcactccggatgagccagacaagtcccaggggcaggacctccaagaacagctggctgaggggtgtagactggcacagcaccttgtccaaaagctcagcccagaaaatgacaacgatgacgatgaagatgttcaagttgaggtggctgagaaagtgcagaaatcgtctgcccccagggagatgccgaaggctgaagaaaaggaagtccctgaggactcactggaggaatgtgccatcacttgttcaaatagccatggcccttatgactccaaccagccacataggaaaaccaaaatcacatttgaggaagacaaagtcgactcaactctcattggctcatcctctcatgttgaatgggaggatgctgtacacattatcccagaaaatgaaagtgatgatgaggaagaggaagaaaaagggccagtgtctcccaggaatctgcaggagtctgaagaggaggaagtcccccaggagtcctgggatgaaggttattcgactctctcaattcctcctgaaatgttggcctcgtacaagtcttacagcggcacatttcactcattagaggaacagcaagtctgcatggctgttgacataggcggacatcggtgggatcaagtgaaaaaggaggaccaagaggcaacaggtcccaggctcagcagggagctgctggatgagaaagggcctgaagtcttgcaggactcactggatagatgttattcaactccttcaggttatcttgaactgactgactcatgccagccctacagaagtgccttttacatattggagcaacagcgtgttggctgggctcttgacatggatgaaattgaaaagtaccaagaagtggaagaagaccaagacccatcatgccccaggctcagcagggagctgctggaggcagtagagcctgaagtcttgcaggactcactggatagatgttattcaactccttccagttgtcttgaacagcctgactcctgcctgccctatggaagttccttttatgcattggaggaaaaacatgttggcttttctcttgacgtgggagaaattgaaaagaaggggaaggggaagaaaagaaggggaagaagatcaacgaagaaaagaaggagaaggggaagaaaagaaggggaagaagatcaaaacccaccatgccccaggctcagcggcatgctgatggaagtggaagagcctgaagtcttgcaggactcactggatagatgttattcgactccgtcaatgtactttgaactacctgactcattccagcactacagaagtgtgttttactcatttgaggaacagcacatcagcttcgcccttgacgtggacaataggtttcttactttgatgggaacaagtctccacctggtcttccagatgggagtcatattcccacagtaagcagcccttactaagccgagagatgtcattcctgcaggcaggacctataggcacgtgaagatttgaatgaaactatagttccatttggaagcccagacataggatgggtcagtgggcatggctctattcctattctcagaccatgccagtggcaccctgtgctcagtctgaagacaatggacccaagttaggtgtgacacgttcacataactgtgcagcacatgccgggagtgatcagtcagacattttaatttgaaccacttatctctgggtagctacaaagttcctcagggatttcattttgcagtcatgtctctgagcttctatacctgctcaaggtcagtgtcatctttgtgtttagctcatccaaaggtgttaccctggtttcaatgaacctaacctcattctttgtatcttcagtgttgaattgttttagctgatccatctttaacacaggagggatccttggctgaggattgtatttcagaaccaccaactgctcttgacaattgttaacccgctaggctcctttggttagagaagccacagtccttcagcctccaattggtgtcagtacttaggaagaccacagctagatggacaaacagcattgggaggccttagccctgctcctctcgattccatcctgtagagaacaggagtcaggagccgctggcaggagacagcatgtcacccaggactctgccggtgcagaatatgaacaacgccatgttcttgcagaaaacgcttagcctgagtttcataggaggtaattaccagacaactgcagaatgtagaacactgagcaggacaactgacctgtctccttcacatagtccatatcaccacaaatcacacaacaaaaaggagaagagatattttgggttcaaaaaaagtaaaaagataatatagctgcatttctttagttattttgaaccccaaatatttcctcatctttttgttgttgtcattgatggtggtgacatggacttgtttatagaggacaggtcagctctctggctcaatgatctacattctgaagttgtctgaaaatgtcttcatgattaaattcagcctaaacgttttgccgggaacactgcagagacaatgctgtgagtttccaaccttagcccatctgcgggcagagaaggtctagtttgtccatcagcattatcatgatatcaggactggttacttggttaaggaggggtctaggagatctgtcccttttagagacaccttacttataatgaagtatttgggagggtggttttcaaaattagaaatgtcctgtattccaatgatcatcctgtaaacattttatcatttattaatcatccctgcctgtgtctattattatattcatatctctacgctggaaactttctgcctcaatgtttactgtgcctttgtttttgctagtgtgtgttgttgaaaaaaaaaacattctctgcctgagttttaatttttgtccaaagttattttaatctatacaattaaaagcttttgcctatcactctggactgttggattgttttttacattcagtgttataatcttttgttatgctgattggttttggtgggtactgatgtgaattaataaaaacatttccatttccctg

SEQ ID NO: 158703 - DNA, 13042 bp, Homo sapiens
  Payload ID: 11054
  Gene Symbol: NBPF10
  Gene Name: neuroblastoma breakpoint family, member 10
  ENST ID: ENST00000583866
  CDS Start-End: 36-11423
tccctgactccacctcttctgccacaaacgtcagcatggtggtatcagccggcccttggtccagtgagaaggcagagatgaacattctagaaatcaacgagacattgcgcccccagctggcagagaagaaacagcagttcagaagcctcaaagagaaatgttttctaactcaactggccggcttcctggccaaccgacagaagaaatacaagtatgaagagtgtaaagacctcataaaatttatgctgaggaatgagcgacagttcaaggaggagaagcttgcagagcagctgaagcaagctgaggagctcaggcaatataaagtcctagttcactctcaggaacgagagctgacccagctaagggagaagttacgggaagggagagatgcctcccgctcattgtatgagcatctccaggccctcctcactccggatgagccggacaagtcccaggggcaggacctccaagaacagctggctgaggggtgtagactggcacagcaccttgtccaaaagctcagcccagaaaatgacgaagatgaggatgaagatgttcaagttgaggaggctgagaaagtactggaatcatctgcccccagggaggtgcagaaggctgaagagagcaaagtccctgaggactcactggaggaatgtgccatcacttgttcaaatagccacggcccttgtgactccaaccagcctcacaagaacatcaaaatcacatttgaggaagacgaagtcaactcaactctggttgtagacagagaatcctctcatgatgaatgtcaggatgctctaaacattctcccagtccctggccccacctcttctgccacaaacgtcagcatggtggtatcagccggccctttgtccagcgagaaggcagagatgaacattctagaaatcaatgagaaattgcgcccccagctggcagagaagaaacagcagttcagaaacctcaaagagaaatgttttctaactcaactgtccggcttcctggccaaccaacagaagaaatacaaatatgaagagtgcaaagacctcataaaatttatgctgaggaatgagcgacagttcaaggaggagaagcttgcagagcagctcaagcaagctgaggagctcaggcaatataaagtcctggttcacgctcaggaacgagagctgacccagttaaaggagaagttacgggaagggagagatgcctcccgctcattgaatgagcatctccaggccctcctcactccgtatgagccggacaagtcccaggggcaggacctccaagaacagctggctgaggggtgtagactggcacagcaccttgtccaaaagctcagcccagaaaatgacaacgatgacgatgaagatgttcaagttgaggtggctgagaaagtgcagaaatcatctgcccccagggagatgcagaaggctgaagaaaaggaagtccctgaggactcactggaggaatgtgccatcacttattcaaatagccatggctcttatgactccaaccagccacataggaaaaccaaaatcacatttgaggaagacaaagtcgactcaactctcattggctcatcctctcatgttgaatgggaggatgctgtacacattattccagaaaatgaaagtgatgatgaggaagaggaagaaaaagggccagtgtctcccaggaatctgcaggagtctgaagaggaggaagtcccccaggagtcctgggatgaaggttattcgactctctcaattcctcctgaaatgttggcctcgtaccagtcttacagcagcacatttcactcattagaggaacagcaagtctgcatggctgttgacataggcagacatcggtgggatcaagtgaaaaaggaggaccaagaggcaacaggtcccaggctcagcagggagctgctggatgagaaagggcctgaagtcttgcaggactcacaggatagatgttattcaactccttcaggttgtcttgaactgactgactcatgccagccctacagaagtgccttttacatattggagcaacagcgtgttggcttggctattgacatggatgaaattgaaaagtaccaagaagtggaagaagaccaagacccatcatgccccaggctcagcagggagctgctggatgagaaagagcctgaagtcttgcaggactcactggatagatgttattcgactccttcaggttatcttgaactgcctgacttaggccagccctacagcagtgctgtttactcattggaggaacagtaccttggcttggctcttgacgtggacagaattaaaaaggaccaagaagaggaagaagaccaaggcccaccatgccccaggctcagcagggagctgctggaggtagtagagcctgaagtcttgcaggactcactggatagatgttattcaactccttccagttgtcttgaacagcctgactcctgccagccctatggaagttccttttatgcattggaggaaaaacatgttggcttttctcttgacgtgggagaaattgaaaagaaggggaaggggaagaaaagaaggggaagaagatcaaagaaggaaagaagaaggggaagaaaagaaggggaagaagatcaaaacccaccatgccccaggctcagcagggagctgctggatgagaaagggcctgaagtcttgcaggactcactggatagatgttattcaactccttcaggttgtcttgaactgactgactcatgccagccctacagaagtgccttttatgtattggagcaacagcgtgttggcttcgcttttgacatggatgaaattgaaaagtaccaagaagtggaagaagaccaagacccatcatgccccaggctcagcagggagctgctggatgagaaagagcctgaagtcttgcaggactcactggatagatgttattcgactccttcaggttatcttgaactgcctgacttaggccagccctacagcagtgctgtttactcattggaggaacagtaccttggcttggctcttgacgtggacagaattaaaaaggacgaagaagaggaagaagaccaagacccaccatgccccaggctcagcagggagctgctggaggtagtagagcctgaagtcttgcaggactcactggatagatgttattcaactccttccagttgtcttgaacagcctgactcctgccagccctatggaagttccttttatgcattggaggaaaaccatgttggcttttctcttgacgtgggagaaattgaaaagaaggggaaggggaagaaaagaaggggaagaagatcaaagaaggaaagaagaaggggaagaaaagaaggggaagaagatcaaaacccaccatgccccaggctcagcagggagctgctggaagagaaagggcctgaagtcttgcaggactcactggatagatgttattcaactccttcaggttgtcttgaactgactgactcatgccagccctacagaagtgccttttatgtattggagcaacagcgtgttggcttcgctgttgacatggatgaaattgaaaagtaccaagaagtggaagaagaccaagacccatcatgccccaggctcagcagggagctgctggatgagaaagagcctgaagtcttgcaggactcactggatagatgttattcgactccttcaggttatcttgaactgcctgacttaggccagccctacagcagtgctgtttactcattggaggaacagtaccttggcttggctcttgacgtggacagaattaaaaaggacgaagaagaggaagaagaccaagacccaccatgccccaggctcagcagggagctgctggaggtagtagagcctgaagtcttgcaggactcactggatagatgttattcaactccttccagttgtcttgaacagcctgactcctgccagccctatggaagttccttttatgcattggaggaaaaacatgttggcttttctcttgacgtgggagaaattgaaaagaaggggaaggggaagaaaagaaggggaagaagatcaaagaaggaaagaagaaggggaagaaaagaaggggaagaagatcaaaacccaccatgccccaggctcagcagggagctgctggaagagaaagggcctgaagtcttgcaggactcactggatagatgttattcaactccttcaggttgtcttgaactgactgactcatgccagccctacagaagtgccttttatgtattggagcaacagcgtgttggcttcgctgttgacatggatgaaattgaaaagtaccaagaagtggaagaagaccaagacccatcatgccccaggctcagcagggagctgctggatgagaaagagcctgaagtcttgcaggactcactggatagatgttattcgactccttcaggttatcttgaactgcctgacttaggccagccctacagcagtgctgtttactcattggaggaacagtaccttggcttggctcttgacgtggacagaattaaaaaggacgaagaagaggaagaagaccaagacccaccatgccccaggctcagcagggagctgctggaggtagtagagcctgaagtcttgcaggactcactggatagatgttattcaactccttccagttgtcttgaacagcctgactcctgccagccctatggaagttccttttatgcattggaggaaaaacatgttggcttttctcttgacgtgggagaaattgaaaagaaggggaaggggaagaaaagaaggggaagaagatcaaagaaggaaagaagaaggggaagaaaagaaggggaagaagatcaaaacccaccatgccccaggctcagcagggagctgctggatgagaaagggcctgaagtcttgcaggactcactggatagatgttattcaactccttcaggttgtcttgaactgactgactcatgccagccctacagaagtgccttttatgtattggagcaacagcatgttggcttggctgttgacatggatgaaattgaaaagtaccaagaagtggaagaagaccaagacccatcatgccccaggctcagcagggagctgctggatgagaaagagcctgaagtcttgcaggactcactggatagatgttattcgactccttcaggttatcttgaactgcctgacttaggccagccctacagcagtgctgtttactcattggaggaacagtaccttggcttggctcttgacgtggacagaattaaaaaggaccaagaagaggaagaagaccaaggcccaccatgccccaggctcagcagggagctgctggaggtagtagagcctgaagtcttgcaggactcactggatagatgttattcaactccttccagttgtcttgaacagcctgactcctgccagccctatggaagttccttttatgcattggaggaaaaacatgttggcttttctcttgacgtgggagaaattgaaaagaaggggaaggggaagaaaagaaggggaagaagatcaaagaaggaaagaagaaggggaagaaaagaaggggaagaagatcaaaacccaccatgccccaggctcagcagggagctgctggatgagaaagggcctgaagtcttgcaggactcactggatagatgttattcaactccttcaggttgtcttgaactgactgactcatgccagccctacagaagtgccttttatgtattggagcaacagcatgttggcttggctgttgacatggatgaaattgaaaagtaccaagaagtggaagaagaccaagacccatcatgccccaggctcagcagggagctgctggatgagaaagagcctgaagtcttgcaggactcactggatagatgttattcgactccttcaggttatcttgaactgcctgacttaggccagccctacagcagtgctgtttactcattggaggaacagtaccttggcttggctcttgacgtggacagaattaaaaaggaccaagaagaggaagaagaccaaggcccaccatgccccaggctcagcagggagctgctggaggtagtagagcctgaagtcttgcaggactcactggatagatgttattcaactccttccagttgtcttgaacagcctgactcctgccagccctatggaagttccttttatgcattggaggaaaaacatgttggcttttctcttgacgtgggagaaattgaaaagaaggggaaggggaagaaaagaaggggaagaagatcaaagaaggaaagaagaaggggaagaaaagaaggggaagaagatcaaaacccaccatgccccaggctcagcagggagctgctggatgagaaagggcctgaagtcttgcaggactcactggatagatgttattcaactccttcaggttgtcttgaactgactgactcatgccagccctacagaagtgccttttatgtattggagcaacagcatgttggcttggctgttgacatggatgaaattgaaaagtaccaagaagtggaagaagaccaagacccatcatgccccaggctcagcagggagctgctggatgagaaagagcctgaagtcttgcaggactcactggatagatgttattcgactccttcaggttatcttgaactgcctgacttaggccagccctacagcagtgctgtttactcattggaggaacagtaccttggcttggctcttgacgtggacagaattaaaaaggaccaagaagaggaagaagaccaaggcccaccatgccccaggctcagcagggagctgctggaggtagtagagcctgaagtcttgcaggactcactggatagatgttattcaactccttccagttgtcttgaacagcctgactcctgccagccctatggaagttccttttatgcattggaggaaaaacatgttggcttttctcttgacgtgggagaaattgaaaagaaggggaaggggaagaaaagaaggggaagaagatcaaagaaggaaagaagaaggggaagaaaagaaggggaagaagatcaaaacccaccatgccccaggctcagcagggagctgctggatgagaaagggcctgaagtcttgcaggactcactggatagatgttattcaactccttcaggttgtcttgaactgactgactcatgccagccctacagaagtgccttttatgtattggagcaacagcatgttggcttggctgttgacatggatgaaattgaaaagtaccaagaagtggaagaagaccaagacccatcatgccccaggctcagcagggagctgctggatgagaaagagcctgaagtcttgcaggactcactggatagatgttattcgactccttcaggttatcttgaactgcctgacttaggccagccctacagcagtgctgtttactcattggaggaacagtaccttggcttggctcttgacgtggacagaattaaaaaggaccaagaagaggaagaagaccaagacccaccatgccccaggctcagcagggagctgctggaggtagtagagcctgaagtcttgcaggactcactggatagatgttattcaactccttccagttgtcttgaacagcctgactcctgccagccctatggaagttccttttatgcattggaggaaaaacatgttggcttttctcttgacgtgggagaaattgaaaagaaggggaaggggaagaaaagaaggggaagaagatcaaagaaggaaagaagaaggggaagaaaagaaggggaagaagatcaaaacccaccatgccccaggctcagcagggagctgctggatgagaaagggcctgaagtcttgcaggactcactggatagatgttattcaactccttcaggttgtcttgaactgactgactcatgccagccctacagaagtgccttttatgtattggagcaacagcatgttggcttggctgttgacatggatgaaattgaaaagtaccaagaagtggaagaagaccaagacccatcatgccccaggctcagcagggagctgctggatgagaaagagcctgaagtcttgcaggactcactggatagatgttattcgactccttcaggttatcttgaactgcctgacttaggccagccctacagcagtgctgtttactcattggaggaacagtaccttggcttggctcttgacgtggacagaattaaaaaggaccaagaagaggaagaagaccaaggcccaccatgccccaggctcagcagggagctgctggaggtagtagagcctgaagtcttgcaggactcactggatagatgttattcaactccttccagttgtcttgaacagcctgactcctgccagccctatggaagttccttttatgcattggaggaaaaacatgttggcttttctcttgacgtgggagaaattgaaaagaaggggaaggggaagaaaagaaggggaagaagatcaaagaaggaaagaagaaggggaagaaaagaaggggaagaagatcaaaacccaccatgccccaggctcagcagggagctgctggatgagaaagggcctgaagtcttgcaggactcactggatagatgttattcaactccttcaggttgtcttgaactgactgactcatgccagccctacagaagtgccttttatgtattggagcaacagcatgttggcttggctgttgacatggatgaaattgaaaagtaccaagaagtggaagaagaccaagacccatcatgccccaggctcagcagggagctgctggatgagaaagagcctgaagtcttgcaggactcactggatagatgttattcgactccttcaggttatcttgaactgcctgacttaggccagccctacagcagtgctgtttactcattggaggaacagtaccttggcttggctcttgacgtggacagaattaaaaaggaccaagaagaggaagaagaccaaggcccaccatgccccaggctcagcagggagctgctggaggtagtagagcctgaagtcttgcaggactcactggatagatgttattcaactccttccagttgtcttgaacagcctgactcctgccagccctatggaagttccttttatgcattggaggaaaaacatgttggcttttctcttgacgtgggagaaattgaaaagaaggggaaggggaagaaaagaaggggaagaagatcaaagaaggaaagaagaaggggaagaaaagaaggggaagaagatcaaaacccaccatgccccaggctcagcagggagctgctggatgagaaagggcctgaagtcttgcaggactcactggatagatgttattcaactccttcaggttgtcttgaactgactgactcatgccagccctacagaagtgccttttatgtattggagcaacagcatgttggcttggctgttgacatggatgaaattgaaaagtaccaagaagtggaagaagaccaagacccatcatgccccaggctcagcagggagctgctggatgagaaagagcctgaagtcttgcaggactcactggatagatgttattcgactccttcaggttatcttgaactgcctgacttaggccagccctacagcagtgctgtttactcattggaggaacagtaccttggcttggctcttgacgtggacagaattaaaaaggacgaagaagaggaagaagaccaagacccaccatgccccaggctcagcagggagctgctggaggtagtagagcctgaagtcttgcaggactcactggatagatgttattcaactccttccagttgtcttgaacagcctgactcctgccagccctatggaagttccttttatgcattggaggaaaaacatgttggcttttctcttgacgtgggagaaattgaaaagaaggggaaggggaagaaaagaaggggaagaagatcaaagaaggaaagaagaaggggaagaaaagaaggggaagaagatcaaaacccaccatgccccaggctcagcagggagctgctggatgagaaagggcctgaagtcttgcaggactcactggatagatgttattcaactccttcaggttatcttgaactgactgactcatgccagccctacagaagtgccttttatgtattggagcaacagcatgttggcttggctgttgacatggatgaaattgaaaagtaccaagaagtggaagaagaccaagacccatcatgccccaggctcagcagggagctgctggatgagaaagagcctgaagtcttgcaggactcactggatagatgttattcgactccttcaggttatcttgaactgcctgacttaggccagccctacagcagtgctgtttactcattggaggaacagtaccttggcttggctcttgacgtggacagaattaaaaaggaccaagaagaggaagaagaccaaggcccaccatgccccaggctcagcagggagctgctggaggtagtagagcctgaagtcttgcaggactcactggatagatgttattcaactccttccagttgtcttgaacagcctgactcctgccagccctatggaagttccttttatgcattggaggaaaaacatgttggcttttctcttgacgtgggagaaattgaaaagaaggggaaggggaagaaaagaaggggaagaagatcaaagaaggaaagaagaaggggaagaaaagaaggggaagaagatcaaaacccaccatgccccaggctcagcagggagctgctggatgagaaagggcctgaagtcttgcaggactcactggatagatgttattcaactccttcaggttgtcttgaactgtgtgactcatgccagccctacagaagtgccttttatgtattggagcaacagcgtgttggcttggctgttgacatggatgaaattgaaaagtaccaagaagtggaagaagaccaagacccatcatgccccaggctcagcagggagctgctggatgagaaagagcctgaagtcttgcaggactcactggatagatgttattcgactccttcaggttatcttgaactgcctgacttaggccagccctacagcagtgctgtttactcattggaggaacagtaccttggcttggctcttgacgtggacaaaattgaaaagaaggggaaggggaaaaaaagaaggggaagaagatcaaagaaggaaagaagaaggggaagaaaagaaggggaagaagatcaaaacccaccatgccccaggctcaacggcgtgctgatggaagtggaagagcgtgaagtcttacaggactcactggatagatgttattcgactccgtcaatgtactttgaactacctgactcattccagcactacagaagtgtgttttactcatttgaggaacagcacatcagcttcgccctttacgtggacaataggttttttactttgacggtgacaagtctccacctggtgttccagatgggagtcatattcccacaataagcagcccttagtaatccgagagatgtcattcctgcaggcaggacctataggcaagtgaagatttgaatgaaagtacagttccatttggaagcccagacataggatgggtcagtgggcatggctctattcctattctcaaaccatgccagtggcaacctgtgcgcagtctgaagacaatggacccacgttaggtgtgacacgttcacataactgtgcagcacatgccgggagtgatcagtcagacattttaatttgaaccacgtatctctgggtagctacaaaattcctcagggatttcattttgcaggcatgtctctgagcttctatacctgctcaaggtcattgtcatctttgtgtttagctcatccaaaggtgttaccctggtttcaatgaacctaacctcattctttgtgtcttcagtgttggcttgttttagctgatccatctgtaacacaggagggatccttggctgaggattgtatttcagaaccaccaactgctcttgacaattgttaacccgctagactcctttggttagagaagccacagtccttcagcctccaattggtgtcagtacttaggaagaccacagctagatggacaaacagcattgggaggccttagccctgctcctctcaattccatcctgtagagaacaggagtcaggagccgctggcaggagacagcatgtcacccaggactctgccggtgcagaatatgaacaatgccatgttcttgcagaaaacgcttagcctgagtttcataggaggtaatcaccagacaactgcagaatgtagaacactgagcaggacaactgacctgtctccttcacatagtccatatcaccacaaatcacacaacaaaaaggagaagaaatattttgggttcaaaaaaagtaaaaagataatgtagctgcatttctttagttattttgaaccccaaatatttcctcatctttttgttgttgtcatggatggtggtgacatggacttgtttatagaagacaggtcagctgtctggctcaatgatctacattctgaagttgtctgaaaatgtcttcatgattaaattcagcctaaacgttttgccaggaacactgcagagacaatgctgtgagtttccaacctcagcccatctgcgggcagagaaggtctagtttgtccatcaccattatgatatcaggactggttacttggttaaggaggggtctaggagatctgtcccttttagagacaccttacttacaatgaagtacttgggaaagtggttttcaagagtataaatatcctgtattctaatgatcatcctctaaacattttatcatttattaatcctccctgcctgtgtctattattatattcatatctctacactgcaaatttggggtctcaatttttactgtgcctttgtttttactagtgtctgctgttgcaaaaagaagacattctctgcctgagttttaatttttgtccaaagttaattttaatctatacaattaaaaccttttgcctatcactctggacttttggattgttttttacattcagtgttataatatttgattatggtgattggttttggtgggtactgatgcgaattaataaaaacatttcatttcc

SEQ ID NO: 158704 - DNA, 1831 bp, Homo sapiens
  Payload ID: 11054
  Gene Symbol: NBPF10
  Gene Name: neuroblastoma breakpoint family, member 10
  ENST ID: ENST00000613224
  CDS Start-End: 72-1805
aaagtgctgtggggagtgatcacatttttcacaacatccctgactccacctcttctgccacaaacgtcagcatggtggtatcagccggcccttggtccagtgagaaggcagagatgaacattctagaaatcaacgagacattgcgcccccagctggcagagaagaaacagcagttcagaagcctcaaagagaaatgttttctaactcaactggccggcttcctggccaaccgacagaagaaatacaagtatgaagagtgtaaagacctcataaaatttatgctgaggaatgagcgacagttcaaggaggagaagcttgcagagcagctgaagcaagctgaggagctcaggcaatataaagtcctagttcactctcaggaacgagagctgacccagctaagggagaagttacgggaagggagagatgcctcccgctcattgtatgagcatctccaggccctcctcactccggatgagccggacaagtcccaggggcaggacctccaagaacagctggctgaggggtgtagactggcacagcaccttgtccaaaagctcagcccagaaaatgacgaagatgaggatgaagatgttcaagttgaggaggctgagaaagtactggaatcatctgcccccagggagatgcagaaggctgaagaaaaggaagtccctgaggactcactggaggaatgtgccatcacttattcaaatagccatggctcttatgactccaaccagccacataggaaaaccaaaatcacatttgaggaagacaaagtcgactcaactctcattggctcatcctctcatgttgaatgggaggatgctgtacacattattccagaaaatgaaagtgatgatgaggaagaggaagaaaaagggccagtgtctcccaggaatctgcaggagtctgaagaggaggaagtcccccaggagtcctgggatgaaggttattcgactctctcaattcctcctgaaatgttggcctcgtaccagtcttacagcagcacatttcactcattagaggaacagcaagtctgcatggctgttgacataggcagacatcggtgggatcaagtgaaaaaggaggaccaagaggcaacaggtcccaggctcagcagggagctgctggatgagaaagagcctgaagtcttgcaggactcactggatagatgttattcgactccttcaggttatcttgaactgcctgacttaggccagccctacagcagtgctgtttactcattggaggaacagtaccttggcttggctcttgacgtggacagaattaaaaaggaccaagaagaggaagaagaccaaggcccaccatgccccaggctcagcagggagctgctggaggtagtagagcctgaagtcttgcaggactcactggatagatgttattcaactccttccagttgtcttgaacagcctgactcctgccagccctatggaagttccttttatgcattggaggaaaaacatgttggcttttctcttgacgtgggagaaattgaaaagtaccaagaagtggaagaagaccaagacccatcatgccccaggctcaacggcgtgctgatggaagtggaagagcgtgaagtcttacaggactcactggatagatgttattcgactccgtcaatgtactttgaactacctgactcattccagcactacagaagtgtgttttactcatttgaggaacagcacatcagcttcgccctttacgtggacaataggttttttactttgacggtgacaagtctccacctggtgttccagatgggagtcatattcccacaataagcagcccttagtaatccgagagatgt

SEQ ID NO: 158705 - DNA, 3670 bp, Homo sapiens
  Payload ID: 11054
  Gene Symbol: NBPF10
  Gene Name: neuroblastoma breakpoint family, member 10
  ENST ID: ENST00000610925
  CDS Start-End: 18-2783
aagacctcataaaatttatgctgaggaatgagcgacagttcaaggaggagaagcttgcagagcagctcaagcaagctgaggagctcaggcaatataaagtcctggttcacgctcaggaacgagagctgacccagttaaaggagaagttacgggaagggagagatgcctcccgctcattgaatgagcatctccaggccctcctcactccgtatgagccggacaagtcccaggggcaggacctccaagaacagctggctgaggggtgtagactggcacagcaccttgtccaaaagctcagcccagaaaatgacaacgatgacgatgaagatgttcaagttgaggtggctgagaaagtgcagaaatcatctgcccccagggagatgcagaaggctgaagaaaaggaagtccctgaggactcactggaggaatgtgccatcacttattcaaatagccatggctcttatgactccaaccagccacataggaaaaccaaaatcacatttgaggaagacaaagtcgactcaactctcattggctcatcctctcatgttgaatgggaggatgctgtacacattattccagaaaatgaaagtgatgatgaggaagaggaagaaaaagggccagtgtctcccaggaatctgcaggagtctgaagaggaggaagtcccccaggagtcctgggatgaaggttattcgactctctcaattcctcctgaaatgttggcctcgtaccagtcttacagcagcacatttcactcattagaggaacagcaagtctgcatggctgttgacataggcagacatcggtgggatcaagtgaaaaaggaggaccaagaggcaacaggtcccaggctcagcagggagctgctggatgagaaagggcctgaagtcttgcaggactcactggatagatgttattcaactccttcaggttgtcttgaactgactgactcatgccagccctacagaagtgccttttatgtattggagcaacagcatgttggcttggctgttgacatggatgaaattgaaaagtaccaagaagtggaagaagaccaagacccatcatgccccaggctcagcagggagctgctggatgagaaagagcctgaagtcttgcaggactcactggatagatgttattcgactccttcaggttatcttgaactgcctgacttaggccagccctacagcagtgctgtttactcattggaggaacagtaccttggcttggctcttgacgtggacagaattaaaaaggaccaagaagaggaagaagaccaaggcccaccatgccccaggctcagcagggagctgctggaggtagtagagcctgaagtcttgcaggactcactggatagatgttattcaactccttccagttgtcttgaacagcctgactcctgccagccctatggaagttccttttatgcattggaggaaaaacatgttggcttttctcttgacgtgggagaaattgaaaagaaggggaaggggaagaaaagaaggggaagaagatcaaagaaggaaagaagaaggggaagaaaagaaggggaagaagatcaaaacccaccatgccccaggctcagcagggagctgctggatgagaaagggcctgaagtcttgcaggactcactggatagatgttattcaactccttcaggttgtcttgaactgactgactcatgccagccctacagaagtgccttttatgtattggagcaacagcatgttggcttggctgttgacatggatgaaattgaaaagtaccaagaagtggaagaagaccaagacccatcatgccccaggctcagcagggagctgctggatgagaaagggcctgaagtcttgcaggactcactggatagatgttattcaactccttcaggttgtcttgaactgactgactcatgccagccctacagaagtgccttttatgtattggagcaacagcatgttggcttggctgttgacatggatgaaattgaaaagtaccaagaagtggaagaagaccaagacccatcatgccccaggctcagcagggagctgctggatgagaaagagcctgaagtcttgcaggactcactggatagatgttattcgactccttcaggttatcttgaactgcctgacttaggccagccctacagcagtgctgtttactcattggaggaacagtaccttggcttggctcttgacgtggacagaattaaaaaggaccaagaagaggaagaagaccaaggcccaccatgccccaggctcagcagggagctgctggaggtagtagagcctgaagtcttgcaggactcactggatagatgttattcaactccttccagttgtcttgaacagcctgactcctgccagccctatggaagttccttttatgcattggaggaaaaacatgttggcttttctcttgacgtgggagaaattgaaaagaaggggaaggggaagaaaagaaggggaagaagatcaaagaaggaaagaagaaggggaagaaaagaaggggaagaagatcaaaacccaccatgccccaggctcaacggcgtgctgatggaagtggaagagcgtgaagtcttacaggactcactggatagatgttattcgactccgtcaatgtactttgaactacctgactcattccagcactacagaagtgtgttttactcatttgaggaacagcacatcagcttcgccctttacgtggacaataggttttttactttgacggtgacaagtctccacctggtgttccagatgggagtcatattcccacaataagcagcccttagtaatccgagagatgtcattcctgcaggcaggacctataggcaagtgaagatttgaatgaaagtacagttccatttggaagcccagacataggatgggtcagtgggcatggctctattcctattctcaaaccatgccagtggcaacctgtgcgcagtctgaagacaatggacccacgttaggtgtgacacgttcacataactgtgcagcacatgccgggagtgatcagtcagacattttaatttgaaccacgtatctctgggtagctacaaaattcctcagggatttcattttgcaggcatgtctctgagcttctatacctgctcaaggtcattgtcatctttgtgtttagctcatccaaaggtgttaccctggtttcaatgaacctaacctcattctttgtgtcttcagtgttggcttgttttagctgatccatctgtaacacaggagggatccttggctgaggattgtatttcagaaccaccaactgctcttgacaattgttaacccgctagactcctttggttagagaagccacagtccttcagcctccaattggtgtcagtacttaggaagaccacagctagatggacaaacagcattgggaggccttagccctgctcctctcaattccatcctgtagagaacaggagtcaggagccgctggcaggagacagcatgtcacccaggactctgccggtgcagaatatgaacaatgccatgttcttgcagaaaacgcttagcctgagtttcataggaggtaatcaccagacaactgcagaatgtagaacactgagcaggacaactgacctgtctccttcacatagtccatatcaccacaaatcacacaacaaaaaggagaagaaatattttgggtt

SEQ ID NO: 158706 - DNA, 11630 bp, Homo sapiens
  Payload ID: 11054
  Gene Symbol: NBPF10
  Gene Name: neuroblastoma breakpoint family, member 10
  ENST ID: ENST00000617010
  CDS Start-End: 7911-11630
tccctgactccacctcttctgccacaaacgtcagcatggtggtatcagccggcccttggtccagtgagaaggcagagatgaacattctagaaatcaacgagacattgcgcccccagctggcagagaagaaacagcagttcagaagcctcaaagagaaatgttttctaactcaactggccggcttcctggccaaccgacagaagaaatacaagtatgaagagtgtaaagacctcataaaatttatgctgaggaatgagcgacagttcaaggaggagaagcttgcagagcagctgaagcaagctgaggagctcaggcaatataaagtcctagttcactctcaggaacgagagctgacccagctaagggagaagttacgggaagggagagatgcctcccgctcattgtatgagcatctccaggccctcctcactccggatgagccggacaagtcccaggggcaggacctccaagaacagctggctgaggggtgtagactggcacagcaccttgtccaaaagctcagcccagaaaatgacgaagatgaggatgaagatgttcaagttgaggaggctgagaaagtactggaatcatctgcccccagggaggtgcagaaggctgaagagagcaaagtccctgaggactcactggaggaatgtgccatcacttgttcaaatagccacggcccttgtgactccaaccagcctcacaagaacatcaaaatcacatttgaggaagacgaagtcaactcaactctggttgtagacagagaatcctctcatgatgaatgtcaggatgctctaaacattctcccagtccctggccccacctcttctgccacaaacgtcagcatggtggtatcagccggccctttgtccagcgagaaggcagagatgaacattctagaaatcaatgagaaattgcgcccccagctggcagagaagaaacagcagttcagaaacctcaaagagaaatgttttctaactcaactgtccggcttcctggccaaccaacagaagaaatacaaatatgaagagtgcaaagacctcataaaatttatgctgaggaatgagcgacagttcaaggaggagaagcttgcagagcagctcaagcaagctgaggagctcaggcaatataaagtcctggttcacgctcaggaacgagagctgacccagttaaaggagaagttacgggaagggagagatgcctcccgctcattgaatgagcatctccaggccctcctcactccgtatgagccggacaagtcccaggggcaggacctccaagaacagctggctgaggggtgtagactggcacagcaccttgtccaaaagctcagcccagaaaatgacaacgatgacgatgaagatgttcaagttgaggtggctgagaaagtgcagaaatcatctgcccccagggagatgcagaaggctgaagaaaaggaagtccctgaggactcactggaggaatgtgccatcacttattcaaatagccatggctcttatgactccaaccagccacataggaaaaccaaaatcacatttgaggaagacaaagtcgactcaactctcattggctcatcctctcatgttgaatgggaggatgctgtacacattattccagaaaatgaaagtgatgatgaggaagaggaagaaaaagggccagtgtctcccaggaatctgcaggagtctgaagaggaggaagtcccccaggagtcctgggatgaaggttattcgactctctcaattcctcctgaaatgttggcctcgtaccagtcttacagcagcacatttcactcattagaggaacagcaagtctgcatggctgttgacataggcagacatcggtgggatcaagtgaaaaaggaggaccaagaggcaacaggtcccaggctcagcagggagctgctggatgagaaagggcctgaagtcttgcaggactcacaggatagatgttattcaactccttcaggttgtcttgaactgactgactcatgccagccctacagaagtgccttttacatattggagcaacagcgtgttggcttggctattgacatggatgaaattgaaaagtaccaagaagtggaagaagaccaagacccatcatgccccaggctcagcagggagctgctggatgagaaagagcctgaagtcttgcaggactcactggatagatgttattcgactccttcaggttatcttgaactgcctgacttaggccagccctacagcagtgctgtttactcattggaggaacagtaccttggcttggctcttgacgtggacagaattaaaaaggaccaagaagaggaagaagaccaaggcccaccatgccccaggctcagcagggagctgctggaggtagtagagcctgaagtcttgcaggactcactggatagatgttattcaactccttccagttgtcttgaacagcctgactcctgccagccctatggaagttccttttatgcattggaggaaaaacatgttggcttttctcttgacgtgggagaaattgaaaagaaggggaaggggaagaaaagaaggggaagaagatcaaagaaggaaagaagaaggggaagaaaagaaggggaagaagatcaaaacccaccatgccccaggctcagcagggagctgctggatgagaaagggcctgaagtcttgcaggactcactggatagatgttattcaactccttcaggttgtcttgaactgactgactcatgccagccctacagaagtgccttttatgtattggagcaacagcgtgttggcttcgcttttgacatggatgaaattgaaaagtaccaagaagtggaagaagaccaagacccatcatgccccaggctcagcagggagctgctggatgagaaagagcctgaagtcttgcaggactcactggatagatgttattcgactccttcaggttatcttgaactgcctgacttaggccagccctacagcagtgctgtttactcattggaggaacagtaccttggcttggctcttgacgtggacagaattaaaaaggacgaagaagaggaagaagaccaagacccaccatgccccaggctcagcagggagctgctggaggtagtagagcctgaagtcttgcaggactcactggatagatgttattcaactccttccagttgtcttgaacagcctgactcctgccagccctatggaagttccttttatgcattggaggaaaaccatgttggcttttctcttgacgtgggagaaattgaaaagaaggggaaggggaagaaaagaaggggaagaagatcaaagaaggaaagaagaaggggaagaaaagaaggggaagaagatcaaaacccaccatgccccaggctcagcagggagctgctggaagagaaagggcctgaagtcttgcaggactcactggatagatgttattcaactccttcaggttgtcttgaactgactgactcatgccagccctacagaagtgccttttatgtattggagcaacagcgtgttggcttcgctgttgacatggatgaaattgaaaagtaccaagaagtggaagaagaccaagacccatcatgccccaggctcagcagggagctgctggatgagaaagagcctgaagtcttgcaggactcactggatagatgttattcgactccttcaggttatcttgaactgcctgacttaggccagccctacagcagtgctgtttactcattggaggaacagtaccttggcttggctcttgacgtggacagaattaaaaaggacgaagaagaggaagaagaccaagacccaccatgccccaggctcagcagggagctgctggaggtagtagagcctgaagtcttgcaggactcactggatagatgttattcaactccttccagttgtcttgaacagcctgactcctgccagccctatggaagttccttttatgcattggaggaaaaacatgttggcttttctcttgacgtgggagaaattgaaaagaaggggaaggggaagaaaagaaggggaagaagatcaaagaaggaaagaagaaggggaagaaaagaaggggaagaagatcaaaacccaccatgccccaggctcagcagggagctgctggaagagaaagggcctgaagtcttgcaggactcactggatagatgttattcaactccttcaggttgtcttgaactgactgactcatgccagccctacagaagtgccttttatgtattggagcaacagcgtgttggcttcgctgttgacatggatgaaattgaaaagtaccaagaagtggaagaagaccaagacccatcatgccccaggctcagcagggagctgctggatgagaaagagcctgaagtcttgcaggactcactggatagatgttattcgactccttcaggttatcttgaactgcctgacttaggccagccctacagcagtgctgtttactcattggaggaacagtaccttggcttggctcttgacgtggacagaattaaaaaggacgaagaagaggaagaagaccaagacccaccatgccccaggctcagcagggagctgctggaggtagtagagcctgaagtcttgcaggactcactggatagatgttattcaactccttccagttgtcttgaacagcctgactcctgccagccctatggaagttccttttatgcattggaggaaaaacatgttggcttttctcttgacgtgggagaaattgaaaagaaggggaaggggaagaaaagaaggggaagaagatcaaagaaggaaagaagaaggggaagaaaagaaggggaagaagatcaaaacccaccatgccccaggctcagcagggagctgctggatgagaaagggcctgaagtcttgcaggactcactggatagatgttattcaactccttcaggttgtcttgaactgactgactcatgccagccctacagaagtgccttttatgtattggagcaacagcatgttggcttggctgttgacatggatgaaattgaaaagtaccaagaagtggaagaagaccaagacccatcatgccccaggctcagcagggagctgctggatgagaaagagcctgaagtcttgcaggactcactggatagatgttattcgactccttcaggttatcttgaactgcctgacttaggccagccctacagcagtgctgtttactcattggaggaacagtaccttggcttggctcttgacgtggacagaattaaaaaggaccaagaagaggaagaagaccaaggcccaccatgccccaggctcagcagggagctgctggaggtagtagagcctgaagtcttgcaggactcactggatagatgttattcaactccttccagttgtcttgaacagcctgactcctgccagccctatggaagttccttttatgcattggaggaaaaacatgttggcttttctcttgacgtgggagaaattgaaaagaaggggaaggggaagaaaagaaggggaagaagatcaaagaaggaaagaagaaggggaagaaaagaaggggaagaagatcaaaacccaccatgccccaggctcagcagggagctgctggatgagaaagggcctgaagtcttgcaggactcactggatagatgttattcaactccttcaggttgtcttgaactgactgactcatgccagccctacagaagtgccttttatgtattggagcaacagcatgttggcttggctgttgacatggatgaaattgaaaagtaccaagaagtggaagaagaccaagacccatcatgccccaggctcagcagggagctgctggatgagaaagagcctgaagtcttgcaggactcactggatagatgttattcgactccttcaggttatcttgaactgcctgacttaggccagccctacagcagtgctgtttactcattggaggaacagtaccttggcttggctcttgacgtggacagaattaaaaaggaccaagaagaggaagaagaccaaggcccaccatgccccaggctcagcagggagctgctggaggtagtagagcctgaagtcttgcaggactcactggatagatgttattcaactccttccagttgtcttgaacagcctgactcctgccagccctatggaagttccttttatgcattggaggaaaaacatgttggcttttctcttgacgtgggagaaattgaaaagaaggggaaggggaagaaaagaaggggaagaagatcaaagaaggaaagaagaaggggaagaaaagaaggggaagaagatcaaaacccaccatgccccaggctcagcagggagctgctggatgagaaagggcctgaagtcttgcaggactcactggatagatgttattcaactccttcaggttgtcttgaactgactgactcatgccagccctacagaagtgccttttatgtattggagcaacagcatgttggcttggctgttgacatggatgaaattgaaaagtaccaagaagtggaagaagaccaagacccatcatgccccaggctcagcagggagctgctggatgagaaagagcctgaagtcttgcaggactcactggatagatgttattcgactccttcaggttatcttgaactgcctgacttaggccagccctacagcagtgctgtttactcattggaggaacagtaccttggcttggctcttgacgtggacagaattaaaaaggaccaagaagaggaagaagaccaaggcccaccatgccccaggctcagcagggagctgctggaggtagtagagcctgaagtcttgcaggactcactggatagatgttattcaactccttccagttgtcttgaacagcctgactcctgccagccctatggaagttccttttatgcattggaggaaaaacatgttggcttttctcttgacgtgggagaaattgaaaagaaggggaaggggaagaaaagaaggggaagaagatcaaagaaggaaagaagaaggggaagaaaagaaggggaagaagatcaaaacccaccatgccccaggctcagcagggagctgctggatgagaaagggcctgaagtcttgcaggactcactggatagatgttattcaactccttcaggttgtcttgaactgactgactcatgccagccctacagaagtgccttttatgtattggagcaacagcatgttggcttggctgttgacatggatgaaattgaaaagtaccaagaagtggaagaagaccaagacccatcatgccccaggctcagcagggagctgctggatgagaaagagcctgaagtcttgcaggactcactggatagatgttattcgactccttcaggttatcttgaactgcctgacttaggccagccctacagcagtgctgtttactcattggaggaacagtaccttggcttggctcttgacgtggacagaattaaaaaggaccaagaagaggaagaagaccaagacccaccatgccccaggctcagcagggagctgctggaggtagtagagcctgaagtcttgcaggactcactggatagatgttattcaactccttccagttgtcttgaacagcctgactcctgccagccctatggaagttccttttatgcattggaggaaaaacatgttggcttttctcttgacgtgggagaaattgaaaagaaggggaaggggaagaaaagaaggggaagaagatcaaagaaggaaagaagaaggggaagaaaagaaggggaagaagatcaaaacccaccatgccccaggctcagcagggagctgctggatgagaaagggcctgaagtcttgcaggactcactggatagatgttattcaactccttcaggttgtcttgaactgactgactcatgccagccctacagaagtgccttttatgtattggagcaacagcatgttggcttggctgttgacatggatgaaattgaaaagtaccaagaagtggaagaagaccaagacccatcatgccccaggctcagcagggagctgctggatgagaaagagcctgaagtcttgcaggactcactggatagatgttattcgactccttcaggttatcttgaactgcctgacttaggccagccctacagcagtgctgtttactcattggaggaacagtaccttggcttggctcttgacgtggacagaattaaaaaggaccaagaagaggaagaagaccaaggcccaccatgccccaggctcagcagggagctgctggaggtagtagagcctgaagtcttgcaggactcactggatagatgttattcaactccttccagttgtcttgaacagcctgactcctgccagccctatggaagttccttttatgcattggaggaaaaacatgttggcttttctcttgacgtgggagaaattgaaaagaaggggaaggggaagaaaagaaggggaagaagatcaaagaaggaaagaagaaggggaagaaaagaaggggaagaagatcaaaacccaccatgccccaggctcagcagggagctgctggatgagaaagggcctgaagtcttgcaggactcactggatagatgttattcaactccttcaggttgtcttgaactgactgactcatgccagccctacagaagtgccttttatgtattggagcaacagcatgttggcttggctgttgacatggatgaaattgaaaagtaccaagaagtggaagaagaccaagacccatcatgccccaggctcagcagggagctgctggatgagaaagagcctgaagtcttgcaggactcactggatagatgttattcgactccttcaggttatcttgaactgcctgacttaggccagccctacagcagtgctgtttactcattggaggaacagtaccttggcttggctcttgacgtggacagaattaaaaaggaccaagaagaggaagaagaccaaggcccaccatgccccaggctcagcagggagctgctggaggtagtagagcctgaagtcttgcaggactcactggatagatgttattcaactccttccagttgtcttgaacagcctgactcctgccagccctatggaagttccttttatgcattggaggaaaaacatgttggcttttctcttgacgtgggagaaattgaaaagaaggggaaggggaagaaaagaaggggaagaagatcaaagaaggaaagaagaaggggaagaaaagaaggggaagaagatcaaaacccaccatgccccaggctcagcagggagctgctggatgagaaagggcctgaagtcttgcaggactcactggatagatgttattcaactccttcaggttgtcttgaactgactgactcatgccagccctacagaagtgccttttatgtattggagcaacagcatgttggcttggctgttgacatggatgaaattgaaaagtaccaagaagtggaagaagaccaagacccatcatgccccaggctcagcagggagctgctggatgagaaagagcctgaagtcttgcaggactcactggatagatgttattcgactccttcaggttatcttgaactgcctgacttaggccagccctacagcagtgctgtttactcattggaggaacagtaccttggcttggctcttgacgtggacagaattaaaaaggacgaagaagaggaagaagaccaagacccaccatgccccaggctcagcagggagctgctggaggtagtagagcctgaagtcttgcaggactcactggatagatgttattcaactccttccagttgtcttgaacagcctgactcctgccagccctatggaagttccttttatgcattggaggaaaaacatgttggcttttctcttgacgtgggagaaattgaaaagaaggggaaggggaagaaaagaaggggaagaagatcaaagaaggaaagaagaaggggaagaaaagaaggggaagaagatcaaaacccaccatgccccagagtgtcctttgactcccttaccagtatgtcacctggccaattcactaggtcactttctctctgtctctgtctctgtctctgtctgtctttctctttcattgttttctacctggccctgttctgtcccaacataaaggcaataatttctggggctgtgtggtttctgattccccctggcttattctttactttttcccacttttccaggctcagcagggagctgctggatgagaaagggcctgaagtcttgcaggactcactggatagatgttattcaactccttcaggttatcttgaactgactgactcatgccagccctacagaagtgccttttatgtattggagcaacagcatgttggcttggctgttgacatggatgaaattgaaaagtaccaagaagtggaagaagaccaagacccatcatgccccaggctcagcagggagctgctggatgagaaagagcctgaagtcttgcaggactcactggatagatgttattcgactccttcaggttatcttgaactgcctgacttaggccagccctacagcagtgctgtttactcattggaggaacagtaccttggcttggctcttgacgtggacagaattaaaaaggaccaagaagaggaagaagaccaaggcccaccatgccccaggctcagcagggagctgctggaggtagtagagcctgaagtcttgcaggactcactggatagatgttattcaactccttccagttgtcttgaacagcctgactcctgccagccctatggaagttccttttatgcattggaggaaaaacatgttggcttttctcttgacgtgggagaaattgaaaagaaggggaaggggaagaaaagaaggggaagaagatcaaagaaggaaagaagaaggggaagaaaagaaggggaagaagatcaaaacccaccatgccccaggctcagcagggagctgctggatgagaaagggcctgaagtcttgcaggactcactggatagatgttattcaactccttcaggttgtcttgaactgtgtgactcatgccagccctacagaagtgccttttatgtattggagcaacagcgtgttggcttggctgttgacatggatgaaattgaaaagtaccaagaagtggaagaagaccaagacccatcatgccccaggctcagcagggagctgctggatgagaaagagcctgaagtcttgcaggactcactggatagatgttattcgactccttcaggttatcttgaactgcctgacttaggccagccctacagcagtgctgtttactcattggaggaacagtaccttggcttggctcttgacgtggacaaaattgaaaagaaggggaaggggaaaaaaagaaggggaagaagatcaaagaaggaaagaagaaggggaagaaaagaaggggaagaagatcaaaacccaccatgccccaggctcaacggcgtgctgatggaagtggaagagcgtgaagtcttacaggactcactggatagatgttattcgactccgtcaatgtactttgaactacctgactcattccagcactacagaagtgtgttttactcatttgaggaacagcacatcagcttcgccctttacgtggacaataggttttttactttgacggtgacaagtctccacctggtgttccagatgggagtcatattcccacaataa

SEQ ID NO: 158707 - DNA, 2931 bp, Homo sapiens
  Payload ID: 11054
  Gene Symbol: NBPF10
  Gene Name: neuroblastoma breakpoint family, member 10
  ENST ID: ENST00000622244
  CDS Start-End: 77-2905
aaagtgctgtggggagtgatcacatttttcacaacagtaagtccctgactccacctcttctgccacaaacgtcagcatggtggtatcagccggcccttggtccagtgagaaggcagagatgaacattctagaaatcaacgagacattgcgcccccagctggcagagaagaaacagcagttcagaagcctcaaagagaaatgttttctaactcaactggccggcttcctggccaaccgacagaagaaatacaagtatgaagagtgtaaagacctcataaaatttatgctgaggaatgagcgacagttcaaggaggagaagcttgcagagcagctgaagcaagctgaggagctcaggcaatataaagtcctagttcactctcaggaacgagagctgacccagctaagggagaagttacgggaagggagagatgcctcccgctcattgtatgagcatctccaggccctcctcactccggatgagccggacaagtcccaggggcaggacctccaagaacagctggctgaggggtgtagactggcacagcaccttgtccaaaagctcagcccagaaaatgacgaagatgaggatgaagatgttcaagttgaggaggctgagaaagtactggaatcatctgcccccagggaggtgcagaaggctgaagagagcaaagtccctgaggactcactggaggaatgtgccatcacttgttcaaatagccacggcccttgtgactccaaccagcctcacaagaacatcaaaatcacatttgaggaagacgaagtcaactcaactctggttgtagacagagaatcctctcatgatgaatgtcaggatgctctaaacattctcccagtccctggccccacctcttctgccacaaacgtcagcatggtggtatcagccggccctttgtccagcgagaaggcagagatgaacattctagaaatcaatgagaaattgcgcccccagctggcagagaagaaacagcagttcagaaacctcaaagagaaatgttttctaactcaactgtccggcttcctggccaaccaacagaagaaatacaaatatgaagagtgcaaagacctcataaaatttatgctgaggaatgagcgacagttcaaggaggagaagcttgcagagcagctcaagcaagctgaggagctcaggcaatataaagtcctggttcacgctcaggaacgagagctgacccagttaaaggagaagttacgggaagggagagatgcctcccgctcattgaatgagcatctccaggccctcctcactccgtatgagccggacaagtcccaggggcaggacctccaagaacagctggctgaggggtgtagactggcacagcaccttgtccaaaagctcagcccagaaaatgacaacgatgacgatgaagatgttcaagttgaggtggctgagaaagtgcagaaatcatctgcccccagggagatgcagaaggctgaagaaaaggaagtccctgaggactcactggaggaatgtgccatcacttattcaaatagccatggctcttatgactccaaccagccacataggaaaaccaaaatcacatttgaggaagacaaagtcgactcaactctcattggctcatcctctcatgttgaatgggaggatgctgtacacattattccagaaaatgaaagtgatgatgaggaagaggaagaaaaagggccagtgtctcccaggaatctgcaggagtctgaagaggaggaagtcccccaggagtcctgggatgaaggttattcgactctctcaattcctcctgaaatgttggcctcgtaccagtcttacagcagcacatttcactcattagaggaacagcaagtctgcatggctgttgacataggcagacatcggtgggatcaagtgaaaaaggaggaccaagaggcaacaggtcccaggctcagcagggagctgctggatgagaaagggcctgaagtcttgcaggactcactggatagatgttattcaactccttcaggttgtcttgaactgactgactcatgccagccctacagaagtgccttttatgtattggagcaacagcatgttggcttggctgttgacatggatgaaattgaaaagtaccaagaagtggaagaagaccaagacccatcatgccccaggctcagcagggagctgctggatgagaaagagcctgaagtcttgcaggactcactggatagatgttattcgactccttcaggttatcttgaactgcctgacttaggccagccctacagcagtgctgtttactcattggaggaacagtaccttggcttggctcttgacgtggacagaattaaaaaggaccaagaagaggaagaagaccaaggcccaccatgccccaggctcagcagggagctgctggaggtagtagagcctgaagtcttgcaggactcactggatagatgttattcaactccttccagttgtcttgaacagcctgactcctgccagccctatggaagttccttttatgcattggaggaaaaacatgttggcttttctcttgacgtgggagaaattgaaaagaaggggaaggggaagaaaagaaggggaagaagatcaaagaaggaaagaagaaggggaagaaaagaaggggaagaagatcaaaacccaccatgccccaggctcaacggcgtgctgatggaagtggaagagcgtgaagtcttacaggactcactggatagatgttattcgactccgtcaatgtactttgaactacctgactcattccagcactacagaagtgtgttttactcatttgaggaacagcacatcagcttcgccctttacgtggacaataggttttttactttgacggtgacaagtctccacctggtgttccagatgggagtcatattcccacaataagcagcccttagtaatccgagagatgt

SEQ ID NO: 158708 - DNA, 2701 bp, Homo sapiens
  Payload ID: 11054
  Gene Symbol: NBPF10
  Gene Name: neuroblastoma breakpoint family, member 10
  ENST ID: ENST00000613557
  CDS Start-End: 72-2675
aaagtgctgtggggagtgatcacatttttcacaacatccctgactccacctcttctgccacaaacgtcagcatggtggtatcagccggcccttggtccagtgagaaggcagagatgaacattctagaaatcaacgagacattgcgcccccagctggcagagaagaaacagcagttcagaagcctcaaagagaaatgttttctaactcaactggccggcttcctggccaaccgacagaagaaatacaagtatgaagagtgtaaagacctcataaaatttatgctgaggaatgagcgacagttcaaggaggagaagcttgcagagcagctgaagcaagctgaggagctcaggcaatataaagtcctagttcactctcaggaacgagagctgacccagctaagggagaagttacgggaagggagagatgcctcccgctcattgtatgagcatctccaggccctcctcactccggatgagccggacaagtcccaggggcaggacctccaagaacagctggctgaggggtgtagactggcacagcaccttgtccaaaagctcagcccagaaaatgacgaagatgaggatgaagatgttcaagttgaggaggctgagaaagtactggaatcatctgcccccagggaggtgcagaaggctgaagagagcaaagtccctgaggactcactggaggaatgtgccatcacttgttcaaatagccacggcccttgtgactccaaccagcctcacaagaacatcaaaatcacatttgaggaagacgaagtcaactcaactctggttgtagacagagaatcctctcatgatgaatgtcaggatgctctaaacattctcccagtccctggccccacctcttctgccacaaacgtcagcatggtggtatcagccggccctttgtccagcgagaaggcagagatgaacattctagaaatcaatgagaaattgcgcccccagctggcagagaagaaacagcagttcagaaacctcaaagagaaatgttttctaactcaactgtccggcttcctggccaaccaacagaagaaatacaaatatgaagagtgcaaagacctcataaaatttatgctgaggaatgagcgacagttcaaggaggagaagcttgcagagcagctcaagcaagctgaggagctcaggcaatataaagtcctggttcacgctcaggaacgagagctgacccagttaaaggagaagttacgggaagggagagatgcctcccgctcattgaatgagcatctccaggccctcctcactccgtatgagccggacaagtcccaggggcaggacctccaagaacagctggctgaggggtgtagactggcacagcaccttgtccaaaagctcagcccagaaaatgacaacgatgacgatgaagatgttcaagttgaggtggctgagaaagtgcagaaatcatctgcccccagggagatgcagaaggctgaagaaaaggaagtccctgaggactcactggaggaatgtgccatcacttattcaaatagccatggctcttatgactccaaccagccacataggaaaaccaaaatcacatttgaggaagacaaagtcgactcaactctcattggctcatcctctcatgttgaatgggaggatgctgtacacattattccagaaaatgaaagtgatgatgaggaagaggaagaaaaagggccagtgtctcccaggaatctgcaggagtctgaagaggaggaagtcccccaggagtcctgggatgaaggttattcgactctctcaattcctcctgaaatgttggcctcgtaccagtcttacagcagcacatttcactcattagaggaacagcaagtctgcatggctgttgacataggcagacatcggtgggatcaagtgaaaaaggaggaccaagaggcaacaggtcccaggctcagcagggagctgctggatgagaaagagcctgaagtcttgcaggactcactggatagatgttattcgactccttcaggttatcttgaactgcctgacttaggccagccctacagcagtgctgtttactcattggaggaacagtaccttggcttggctcttgacgtggacagaattaaaaaggaccaagaagaggaagaagaccaaggcccaccatgccccaggctcagcagggagctgctggaggtagtagagcctgaagtcttgcaggactcactggatagatgttattcaactccttccagttgtcttgaacagcctgactcctgccagccctatggaagttccttttatgcattggaggaaaaacatgttggcttttctcttgacgtgggagaaattgaaaagaaggggaaggggaagaaaagaaggggaagaagatcaaagaaggaaagaagaaggggaagaaaagaaggggaagaagatcaaaacccaccatgccccaggctcaacggcgtgctgatggaagtggaagagcgtgaagtcttacaggactcactggatagatgttattcgactccgtcaatgtactttgaactacctgactcattccagcactacagaagtgtgttttactcatttgaggaacagcacatcagcttcgccctttacgtggacaataggttttttactttgacggtgacaagtctccacctggtgttccagatgggagtcatattcccacaataagcagcccttagtaatccgagagatgt

SEQ ID NO: 158709 - DNA, 2656 bp, Homo sapiens
  Payload ID: 11054
  Gene Symbol: NBPF10
  Gene Name: neuroblastoma breakpoint family, member 10
  ENST ID: ENST00000616399
  CDS Start-End: 72-1679
aaagtgctgtggggagtgatcacatttttcacaacatccctgactccacctcttctgccacaaacgtcagcatggtggtatcagccggcccttggtccagtgagaaggcagagatgaacattctagaaatcaacgagacattgcgcccccagctggcagagaagaaacagcagttcagaagcctcaaagagatgttttctaactcaactggccggcttcctggccaaccgacagaagaaatacagcaatataaagtcctagttcactctcaggaacgagagctgacccagctaagggagaagttacgggaagggagagatgcctcccgctcattgtatgagcatctccaggccctcctcactccggatgagccggacaagtcccaggggcaggacctccaagaacagctggctgaggggtgtagactggcacagcaccttgtccaaaagctcagcccagaaaatgacgaagatgaggatgaagatgttcaagttgaggaggctgagaaagtactggaatcatctgcccccagggaggtgcagaaggctgaagagagcaaagtccctgaggactcactggaggaatgtgccatcacttgttcaaatagccacggcccttgtgactccaaccagcctcacaagaacatcaaaatcacatttgaggaagacgaagtcaactcaactctggttgtagacagagaatcctctcatgatgaatgtcaggatgctctaaacattctcccagtccctggccccacctcttctgccacaaacgtcagcatggtggtatcagccggccctttgtccagcgagaaggcagagatgaacattctagaaatcaatgagaaattgcgcccccagctggcagagaagaaacagcagttcagaaacctcaaagagaaatgttttctaactcaactgtccggcttcctggccaaccaacagaagaaatacaaatatgaagagtgcaaagacctcataaaatttatgctgaggaatgagcgacagttcaaggaggagaagcttgcagagcagctcaagcaagctgaggagctcaggcaatataaagtcctggttcacgctcaggaacgagagctgacccagttaaaggagaagttacgggaagggagagatgcctcccgctcattgaatgagcatctccaggccctcctcactccgtatgagccggacaagtcccaggggcaggacctccaagaacagctggctgaggggtgtagactggcacagcaccttgtccaaaagctcagcccagaaaatgacaacgatgacgatgaagatgttcaagttgaggtggctgagaaagtgcagaaatcatctgcccccagggagatgcagaaggctgaagaaaaggaagtccctgaggactcactggaggaatgtgccatcacttattcaaatagccatggctcttatgactccaaccagccacataggaaaaccaaaatcacatttgaggaagacaaagtcgactcaactctcattggctcatcctctcatgttgaatgggaggatgctgtacacattattccagaaaatgaaagtgatgatgaggaagaggaagaaaaagggccagtgtctcccaggacatcggtgggatcaagtgaaaaaggaggaccaagaggcaacaggtcccaggctcagcagggagctgctggatgagaaagggcctgaagtcttgcaggactcacaggatagatgttattcaactccttcaggttgtcttgaactgactgactcatgccagccctacagaagtgccttttacatattggagcaacagcgtgttggcttggctattgacatggatgaaattgaaaagtaccaagaagtggaagaagaccaagacccatcatgccccaggctcagcagggagctgctggatgagaaagagcctgaagtcttgcaggactcactggatagatgttattcgactccttcaggttatcttgaactgcctgacttaggccagccctacagcagtgctgtttactcattggaggaacagtaccttggcttggctcttgacgtggacagaattaaaaaggaccaagaagaggaagaagaccaaggcccaccatgccccaggctcagcagggagctgctggaggtagtagagcctgaagtcttgcaggactcactggatagatgttattcaactccttccagttgtcttgaacagcctgactcctgccagccctatggaagttccttttatgcattggaggaaaaacatgttggcttttctcttgacgtgggagaaattgaaaagaaggggaaggggaagaaaagaaggggaagaagatcaaagaaggaaagaagaaggggaagaaaagaaggggaagaagatcaaaacccaccatgccccaggctcaacggcgtgctgatggaagtggaagagcgtgaagtcttacaggactcactggatagatgttattcgactccgtcaatgtactttgaactacctgactcattccagcactacagaagtgtgttttactcatttgaggaacagcacatcagcttcgccctttacgtggacaataggttttttactttgacggtgacaagtctccacctggtgttccagatgggagtcatattcccacaataagcagcccttagtaatccgagagatg

SEQ ID NO: 158710 - DNA, 5465 bp, Homo sapiens
  Payload ID: 11055
  Gene Symbol: NBPF11
  Gene Name: neuroblastoma breakpoint family, member 11
  ENST ID: ENST00000580077
  CDS Start-End: 3039-3842
atcagcgaattgcagggtcaagggctggtgctttgaaagagaggcggaggggagagagggattttcccgtccccgctgcgctctgtcctccattactccttttctcggcccgcggcccgaacccgctgtgcggtagaggcagccgggtccctttaaggcccagctgcgcctgtgccttgggctctcctgacacggcccatccggaccctgaggagccagcgggccgcaagcaagttgctgggcggcggtggagatagcggcggtgctgggaggggtaggtgagggtcgcgaggctgcctgagcttctgagtgagcctggtgattttgggaacgcgggacgggcgacctgcggcgccaggagcggggccgaggtacggcggcacggctgcagcctggatgggaagttcaagtttactgcgaagtccacccagcgttccggaggtgagggcgccgcgccaggccgggcgggaggcattctgaaggcaaatcctgtttagacccaggcaaaggttcctggtgacccaggctctcatgagcagattgtcccttatcattctcctgaggatgtctggagcttcagtgctgtgtgctcttggcctccacactgggggtgccaccaactcccactgtccagggcttctggtggactctccgaggcaccgatgtagaaacttacccattcagtgcaccaagagcagcttcacatggtgtgggccgacatgaagagctgccagatccaacagaaatgtgattgataacagtaaagccacactcctcaagtgcctgaaatacccctcattgtcttcttcaggtggcaagggctctggaacagccacataaagcccttgaagataaggatggtcaaacaaaataatatcatacctggagaaactcagatcttgctaagatttactggttgggaatccaaagttaatgccaagaagcagctgccagttgggatcaaatgtgagcctatggatcaagtccctgactccacctcttctgccacaaacgtcagcatggtggtatcagccggcccttggtccagcgagaaggcagagatgaacattctagaaatcaacgagaaattgcgcccccagttggcagagaacaaacagcagttcagaaacctcaaagagagatgttttctaactcaactggccggcttcctggccaaccgacagaagaaatacaagtatgaagagtgtaaagacctcataaaatttatgctgaggaatgagcgacagttcaaggaggagaagcttgcagagcagctcaagcaagctgaggagctcaggcaatataaagtcctggttcactctcaggaacgagagctgacccagttaagggagaagttacgggaagggagagatgcctcccgctcattgaatgagcatctccaggccctcctcactccggatgagccggacaagtcccaggggcaggacctccaagaacagctggctgaggggtgtagactggcacagcaccttgtccaaaagctcagcccagaaaatgacgaagatgaggatgaagatgttcaagttgaggaggatgagaaagtactggaatcatctgcccccagggaggtgcagaaggctgaagagagcaaagtccctgaggactcactggaggaatgtgccatcacttgttcaaatagccacggcccttgtgactccatccagcctcacaagaacatcaaaatcacatttgaggaagacaaagtcaactcatctctggttgtagacagagaatcctctcatgatggatgtcaggatgctctaaacattctcccagtccctggccccacctcttctgccacaaacgtcagcatggtggtatcagccggccctttgtccagcgagaaggcagagatgaacattctagaaatcaatgagaaattgtgcccccagctggcagagaagaaacagcagttcagaagcctcaaagagaaatgttttgtaactcaagtggcctgcttcctggccaagcagcagaacaaatacaaatatgaagagtgcaaagacctcataaaatctatgctgaggaatgagcgacagttcaaggaggagaagcttgcagagcagctgaagcaagctgaggagctcaggcaatataaagtcctggttcactctcaggaacgagagctgacccagttaagggagaagttacgggaagggagagatgcctcccgctcattgaatgagcatctccaggccctcctcactccggatgagccggacaagtcccaggggcaggacctccaagaacagctggctgaggggtgtagactggcacagcaccttgtccaaaagctcagcccagaaaatgataacgatgacgatgaagatgttcaagttgaggtggctgagaaagtgcagaaatcgtcttcccccagggagatgcagaaggctgaagaaaaggaagtccctgaggactcactggaggagtgtgccatcacttgttcaaatagccatggcccttatgactccaaccagccacatagaaaaaccaaaatcacatttgaggaagacaaagtcgactcaactctcattggctcatcctctcatgttgaatgggaggatgctgtacacattatcccagaaaatgaaagtgatgatgaggaagaggaagaaaaagggccagtgtctcccaggaatctgcaggagtctgaagaggaggaagtcccccaggagtcctgggatgaaggttattcgactctctcaattcctcctgaaaggttggcctcgtaccagtcttacagcagcacatttcactcattagaggaacagcaagtctgcatggctgttgacataggcagacatcggtgggatcaagtgaaaaaggaggaccaagaggcaacaggtcccaggctcagcagggagctgctggatgagaaagagcctgaagtcttgcaggactcactggatagatgttattcaactccttcagtttatcttggactgactgactcatgccagccctacagaagtgccttttacgtattggagcaacagcgtattggcttggctgttgacatggatgaaattgaaaagtaccaagaagtggaagaagaccaagacccatcatgccccaggctcagcagggagctgctggctgagaaagagcctgaagtcttgcaggactcactggatagatgttattcgactccttcaggttatcttgaactgcctgacttaggccagccctacagaagtgctgtttactcattggaggaacagtaccttggcttggctcttgacgtggacagaattaaaaaggaccaagaagaggaagaagaccaaggcccaccgtgccccaggctcagcagggagctgctggaggtagtagagcctgaagtcttgcaggactcactgtgttattcaactccttccagttgtcttgaacagcctgactcctgccagccctacggaagttccttttatgcattggaggaaaaacatgttggcttttctcttgacgtgggagaaattgaaaagaaggggaaggggaagaaaagaaggggaagaagatcaaagaagaaaagaagaaggggaagaaaagaaggggaagaagatcaaaacccaccatgccccaggctcagcagcgtgctgatggaagtggaagtgcctgaagtcttacaggactcactggatagatattattcgactccatcaatgtactttgaactacctgactcattccagcactacagaagtgtgttttactcatttgaggaacagcacatcagctttgcccttgacatggacaataggttttttactttgacggtgagaagtctccacctggtcttccagatgggagtcatattcccacaataagcagcccttactaagccgagaggtgtcattcctgcaggcaggacctataggcacctgaagatttgaatgaaactatagttccatttggaagcccagacataggatgggtcagtgggcatggctctattcctattctcagagcatgccagtggcaacctgtgctcagtctgaagacaatggacccacgttaggtgtgacacgttcacataactgtgcagcacatgccgggagtgatcagtcggacattttaatttgaaccacgtatctctgggtagctacaaaattcctcagggatttcattttgcaggcatgtctctgagcttctatacctgctcaaggtcagtgtcatctttgtgtttagctcatccaaaggtgttaccctggtttcaatgaacctaacctcattctttgtgtcttcagtgttggcttgttttagctgatccatctgtaacacaggagggatccttggctgaggattgtatttcagaaccaccaactgctcttgacaattgttaacccgctaggctcctttggttagagaagccacagtccttcagcctccaattggtgtcagtacttaggaagaccacagctagatggacaaacagcattgggaggccttagccctgctcctctcaattccatcctgtagagaacaggagtcaggagccgctggcaggagacagcatgtcacccaggactctgccggtgcagaatatgagcaatgccatgttcttgcagaaaacgcttagcctgagtttcataggaggtaatcaccagacaactgcagaatgtagaacactgagcaggacaactgacctgtctccttcacatagtccatatcaccacaaatcacacaacaaaaaggagaagagatattttgggttgaaaaaaagtaaaaagataatgtagctgcatttctttagttattttgaaccccaaatatttcctcatctttttgttgttgtcatggatggtggtgacatggacttgtttatagaggacaggtcagctgtctggctcaatgatctacattctgaagttgtctgaaaatgtcttcataattaaattcagcctaaactttttgacgggaacactgcagagacaatgctgtgagtttccaacctcagcccatctgcgggcagagaaggtctagtttgtccaacaccattatgatatcaggactggttacttggttaaggaggggtctaggagatctgtcccttttagagacaccttacttataatgaagtacttgggaaagtggttttcaagagtataaatatcctgtattctaatgatcatcctctaaacattttatcatttattaatcctccctgcctgtgtctattattatattcatatctctacgctgcaaattttgggtctcaatttttactgtgcctttgtttttactagtgtctgctgttgcaaaaagaagaaaacattctttgcctgagttttaatttttgtccaaagttaattttaatctatacaattaaaaccttttgcctatcactctggacttttggattgttttttacattcagtgttataatatttgattatgctgattggttttggtgggtactgatgcgaattaataaaaacatttcatttcca

SEQ ID NO: 158711 - DNA, 5494 bp, Homo sapiens
  Payload ID: 11055
  Gene Symbol: NBPF11
  Gene Name: neuroblastoma breakpoint family, member 11
  Uniprot ID: Q86T75
  ENST ID: ENST00000615281
  CDS Start-End: 1152-3749
ccggaagtcagactatggggcggtgcggcagcgcgaagcctgcagtcctaaacgcggggtagctccgggcttccgagggggtgtgtctcccgcctctttaacctggcaggggcggttcaagtggccggggaaatcagcgaattgcagggtcaagggctggtgctttgaaagagaggcggaggggagagagggattttcccgtccccgctgcgctctgtcctccattactccttttctcggcccgcggcccgaacccgctgtgcggtagaggcagccgggtccctttaaggcccagctgcgcctgtgccttgggctctcctgacacggcccatccggaccctgaggagccagcgggccgcaagcaagttgctgggcggcggtggagatagcggcggtgctgggaggggtaggtgagggtcgcgaggctgcctgagcttctgagtgagcctggtgattttgggaacgcgggacgggcgacctgcggcgccaggagcggggccgaggtacggcggcacggctgcagcctggatgggaagttcaagtttactgcgaagtccacccagcgttccggaggtgagggcgccgcgccaggccgggcgggaggcattctgaaggcaaatcctgtttagacccaggcaaaggttcctggtgacccaggctctcatgagcagattgtcccttatcattctcctgaggatgtctggagcttcagtgctgtgtgctcttggcctccacactgggggtgccaccaactcccactgtccagggcttctggtggactctccgaggcaccgatgtagaaacttacccattcagtgcaccaagagcagcttcacatggtgtgggccgacatgaagagctgccagatccaacagaaatgtgattgataacagtaaagccacactcctcaagtgcctgaaatacccctcattgtcttcttcaggtggcaagggctctggaacagccacataaagcccttgaagataaggatggtcaaacaaaataatatcatacctggagaaactcagatcttgctaagatttactggttgggaatccaaagttaatgccaagaagcagctgccagttgggatcaaatgtgagcctatggatcaagtccctgactccacctcttctgccacaaacgtcagcatggtggtatcagccggcccttggtccagcgagaaggcagagatgaacattctagaaatcaacgagaaattgcgcccccagttggcagagaacaaacagcagttcagaaacctcaaagagagatgttttctaactcaactggccggcttcctggccaaccgacagaagaaatacaagtatgaagagtgtaaagacctcataaaatttatgctgaggaatgagcgacagttcaaggaggagaagcttgcagagcagctcaagcaagctgaggagctcaggcaatataaagtcctggttcactctcaggaacgagagctgacccagttaagggagaagttacgggaagggagagatgcctcccgctcattgaatgagcatctccaggccctcctcactccggatgagccggacaagtcccaggggcaggacctccaagaacagctggctgaggggtgtagactggcacagcaccttgtccaaaagctcagcccagaaaatgacgaagatgaggatgaagatgttcaagttgaggaggatgagaaagtactggaatcatctgcccccagggaggtgcagaaggctgaagagagcaaagtccctgaggactcactggaggaatgtgccatcacttgttcaaatagccacggcccttgtgactccatccagcctcacaagaacatcaaaatcacatttgaggaagacaaagtcaactcatctctggttgtagacagagaatcctctcatgatggatgtcaggatgctctaaacattctcccagtccctggccccacctcttctgccacaaacgtcagcatggtggtatcagccggccctttgtccagcgagaaggcagagatgaacattctagaaatcaatgagaaattgtgcccccagctggcagagaagaaacagcagttcagaagcctcaaagagaaatgttttgtaactcaagtggcctgcttcctggccaagcagcagaacaaatacaaatatgaagagtgcaaagacctcataaaatctatgctgaggaatgagcgacagttcaaggaggagaagcttgcagagcagctgaagcaagctgaggagctcaggcaatataaagtcctggttcactctcaggaacgagagctgacccagttaagggagaagttacgggaagggagagatgcctcccgctcattgaatgagcatctccaggccctcctcactccggatgagccggacaagtcccaggggcaggacctccaagaacagctggctgaggggtgtagactggcacagcaccttgtccaaaagctcagcccagaaaatgataacgatgacgatgaagatgttcaagttgaggtggctgagaaagtgcagaaatcgtcttcccccagggagatgcagaaggctgaagaaaaggaagtccctgaggactcactggaggagtgtgccatcacttgttcaaatagccatggcccttatgactccaaccagccacatagaaaaaccaaaatcacatttgaggaagacaaagtcgactcaactctcattggctcatcctctcatgttgaatgggaggatgctgtacacattatcccagaaaatgaaagtgatgatgaggaagaggaagaaaaagggccagtgtctcccaggaatctgcaggagtctgaagaggaggaagtcccccaggagtcctgggatgaaggttattcgactctctcaattcctcctgaaaggttggcctcgtaccagtcttacagcagcacatttcactcattagaggaacagcaagtctgcatggctgttgacataggcagacatcggtgggatcaagtgaaaaaggaggaccaagaggcaacaggtcccaggctcagcagggagctgctggatgagaaagagcctgaagtcttgcaggactcactggatagatgttattcaactccttcagtttatcttggactgactgactcatgccagccctacagaagtgccttttacgtattggagcaacagcgtattggcttggctgttgacatggatgaaattgaaaagtaccaagaagtggaagaagaccaagacccatcatgccccaggctcagcagggagctgctggctgagaaagagcctgaagtcttgcaggactcactggatagatgttattcgactccttcaggttatcttgaactgcctgacttaggccagccctacagaagtgctgtttactcattggaggaacagtaccttggcttggctcttgacgtggacagaattaaaaaggaccaagaagaggaagaagaccaaggcccaccgtgccccaggctcagcagggagctgctggaggtagtagagcctgaagtcttgcaggactcactggatgttattcaactccttccagttgtcttgaacagcctgactcctgccagccctacggaagttccttttatgcattggaggaaaaacatgttggcttttctcttgacgtgggagaaattgaaaagaaggggaaggggaagaaaagaaggggaagaagatcaaagaagaaaagaagaaggggaagaaaagaaggggaagaagatcaaaacccaccatgccccaggctcagcagcgtgctgatggaagtggaagtgcctgaagtcttacaggactcactggatagatattattcgactccatcaatgtactttgaactacctgactcattccagcactacagaagtgtgttttactcatttgaggaacagcacatcagctttgcccttgacatggacaataggttttttactttgacggtgagaagtctccacctggtcttccagatgggagtcatattcccacaataagcagcccttactaagccgagaggtgtcattcctgcaggcaggacctataggcacctgaagatttgaatgaaactatagttccatttggaagcccagacataggatgggtcagtgggcatggctctattcctattctcagagcatgccagtggcaacctgtgctcagtctgaagacaatggacccacgttaggtgtgacacgttcacataactgtgcagcacatgccgggagtgatcagtcggacattttaatttgaaccacgtatctctgggtagctacaaaattcctcagggatttcattttgcaggcatgtctctgagcttctatacctgctcaaggtcagtgtcatctttgtgtttagctcatccaaaggtgttaccctggtttcaatgaacctaacctcattctttgtgtcttcagtgttggcttgttttagctgatccatctgtaacacaggagggatccttggctgaggattgtatttcagaaccaccaactgctcttgacaattgttaacccgctaggctcctttggttagagaagccacagtccttcagcctccaattggtgtcagtacttaggaagaccacagctagatggacaaacagcattgggaggccttagccctgctcctctcaattccatcctgtagagaacaggagtcaggagccgctggcaggagacagcatgtcacccaggactctgccggtgcagaatatgagcaatgccatgttcttgcagaaaacgcttagcctgagtttcataggaggtaatcaccagacaactgcagaatgtagaacactgagcaggacaactgacctgtctccttcacatagtccatatcaccacaaatcacacaacaaaaaggagaagagatattttgggttgaaaaaaagtaaaaagataatgtagctgcatttctttagttattttgaaccccaaatatttcctcatctttttgttgttgtcatggatggtggtgacatggacttgtttatagaggacaggtcagctgtctggctcaatgatctacattctgaagttgtctgaaaatgtcttcataattaaattcagcctaaactttttgacgggaacactgcagagacaatgctgtgagtttccaacctcagcccatctgcgggcagagaaggtctagtttgtccaacaccattatgatatcaggactggttacttggttaaggaggggtctaggagatctgtcccttttagagacaccttacttataatgaagtacttgggaaagtggttttcaagagtataaatatcctgtattctaatgatcatcctctaaacattttatcatttattaatcctccctgcctgtgtctattattatattcatatctctacgctgcaaattttgggtctcaatttttactgtgcctttgtttttactagtgtctgctgttgcaaaaagaagaaaacattctttgcctgagttttaatttttgtccaaagttaattttaatctatacaattaaaaccttttgcctatca

SEQ ID NO: 158712 - DNA, 2973 bp, Homo sapiens
  Payload ID: 11055
  Gene Symbol: NBPF11
  Gene Name: neuroblastoma breakpoint family, member 11
  ENST ID: ENST00000613531
  CDS Start-End: 664-2973
attgataacagtaaagccacactcctcaagtgcctgaaatacccctcattgtcttcttcaggtggcaagggctctggaacagccacataaagcccttgaagataaggatggtcaaacaaaataatatcatacctggagaaactcagatcttgctaagatttactggttgggaatccaaagttaatgccaagaagcagctgccagttgggatcaaatgtgagcctatggatcaaggaatgtctggacacagtagacaaaggtttttcaacaggatgccttaggatacatgcttccaaaaacaaagtagccaaaaagaaaccagagtcacagaatatcagagccagaggaacatttggagacggttacctggcacgctggccacaatctacctcactcttatcagagtctgagcagtgctttcagctctgagttgaggcacctcgaaccttgtttttgtggtgaaggatcctaaagtgctgtggggagtgatcacatttttcacaacatccctgactccacctcttctgccacaaacgtcagcatggtggtatcagccggcccttggtccagcgagaaggcagagatgaacattctagaaatcaacgagaaattgcgcccccagttggcagagaacaaacagcagttcagaaacctcaaagagagatgttttctaactcaactggccggcttcctggccaaccgacagaagaaatacagcaatataaagtcctggttcactctcaggaacgagagctgacccagttaagggagaagttacgggaagggagagatgcctcccgctcattgaatgagcatctccaggccctcctcactccggatgagccggacaagtcccaggggcaggacctccaagaacagctggctgaggggtgtagactggcacagcaccttgtccaaaagctcagcccagaaaatgacgaagatgaggatgaagatgttcaagttgaggaggatgagaaagtactggaatcatctgcccccagggaggtgcagaaggctgaagagagcaaagtccctgaggactcactggaggaatgtgccatcacttgttcaaatagccacggcccttgtgactccatccagcctcacaagaacatcaaaatcacatttgaggaagacaaagtcaactcatctctggttgtagacagagaatcctctcatgatggatgtcaggatgctctaaacattctcccagtccctggccccacctcttctgccacaaacgtcagcatggtggtatcagccggccctttgtccagcgagaaggcagagatgaacattctagaaatcaatgagaaattgtgcccccagctggcagagaagaaacagcagttcagaagcctcaaagagaaatgttttgtaactcaagtggcctgcttcctggccaagcagcagaacaaatacaaatatgaagagtgcaaagacctcataaaatctatgctgaggaatgagcgacagttcaaggaggagaagcttgcagagcagctgaagcaagctgaggagctcaggcaatataaagtcctggttcactctcaggaacgagagctgacccagttaagggagaagttacgggaagggagagatgcctcccgctcattgaatgagcatctccaggccctcctcactccggatgagccggacaagtcccaggggcaggacctccaagaacagctggctgaggggtgtagactggcacagcaccttgtccaaaagctcagcccagaaaatgataacgatgacgatgaagatgttcaagttgaggtggctgagaaagtgcagaaatcgtcttcccccagggagatgcagaaggctgaagaaaaggaagtccctgaggactcactggaggagtgtgccatcacttgttcaaatagccatggcccttatgactccaaccagccacatagaaaaaccaaaatcacatttgaggaagacaaagtcgactcaactctcattggctcatcctctcatgttgaatgggaggatgctgtacacattatcccagaaaatgaaagtgatgatgaggaagaggaagaaaaagggccagtgtctcccaggaatctgcaggagtctgaagaggaggaagtcccccaggagtcctgggatgaaggttattcgactctctcaattcctcctgaaaggttggcctcgtaccagtcttacagcagcacatttcactcattagaggaacagcaagtctgcatggctgttgacataggcagacatcggtgggatcaagtgaaaaaggaggaccaagaggcaacaggtcccaggctcagcagggagctgctggatgagaaagagcctgaagtcttgcaggactcactggatagatgttattcaactccttcagtttatcttggactgactgactcatgccagccctacagaagtgccttttacgtattggagcaacagcgtattggcttggctgttgacatggatgaaattgaaaagtaccaagaagtggaagaagaccaagacccatcatgccccaggctcagcagggagctgctggctgagaaagagcctgaagtcttgcaggactcactggatagatgttattcgactccttcaggttatcttgaactgcctgacttaggccagccctacagaagtgctgtttactcattggaggaacagtaccttggcttggctcttgacgtggacagaattaaaaaggaccaagaagaggaagaagaccaaggcccaccgtgccccaggctcagcagggagctgctggaggtagtagagcctgaagtcttgcaggactcactggatgttattcaactccttccagttgtcttgaacagcctgactcctgccagccctacggaagttccttttatgcattggaggaaaaacatgttggcttttctcttgacgtgggagaaattgaaaagaaggggaaggggaagaaaagaaggggaagaagatcaaagaagaaaagaagaa

SEQ ID NO: 158713 - DNA, 5152 bp, Homo sapiens
  Payload ID: 11055
  Gene Symbol: NBPF11
  Gene Name: neuroblastoma breakpoint family, member 11
  ENST ID: ENST00000614506
  CDS Start-End: 959-2584
ggaccctgaggagccagcgggccgcaagcaagttgctgggcggcggtggagatagcggcggtgctgggaggggtaggtgagggtcgcgaggctgcctgagcttctgagtgagcctggtgattttgggaacgcgggacgggcgacctgcggcgccaggagcggggccgaggtacggcggcacggctgcagcctggatgggaagttcaagtttactgcgaagtccacccagcgttccggaggcattctgaaggcaaatcctgtttagacccaggcaaaggttcctggtgacccaggctctcatgagcagattgtcccttatcattctcctgaggatgtctggagcttcagtgctgtgtgctcttggcctccacactgggggtgccaccaactcccactgtccagggcttctggtggactctccgaggcaccgatgtagaaacttacccattcagtgcaccaagagcagcttcacatggtgtgggccgacatgaagagctgccagatccaacagcccttgaagataaggatggtcaaacaaaataatatcatacctggagaaactcagatcttgctaagatttactggttgggaatccaaagttaatgccaagaagcagctgccagttgggatcaaatgtgagcctatggatcaagacggttacctggcacgctggccacaatctacctcactcttatcagagtctgagcagtgctttcagctctgagttgaggcacctcgaaccttgtttttgtggtgaaggatcctaaagtgctgtggggagtgatcacatttttcacaacatccctgactccacctcttctgccacaaacgtcagcatggtggtatcagccggcccttggtccagcgagaaggcagagatgaacattctagaaatcaacgagaaattgcgcccccagttggcagagaacaaacagcagttcagaaacctcaaagagagatgttttctaactcaactggccggcttcctggccaaccgacagaagaaatacagcaatataaagtcctggttcactctcaggaacgagagctgacccagttaagggagaagttacgggaagggagagatgcctcccgctcattgaatgagcatctccaggccctcctcactccggatgagccggacaagtcccaggggcaggacctccaagaacagctggctgaggggtgtagactggcacagcaccttgtccaaaagctcagcccagaaaatgacgaagatgaggatgaagatgttcaagttgaggaggatgagaaagtactggaatcatctgcccccagggaggtgcagaaggctgaagagagcaaagtccctgaggactcactggaggaatgtgccatcacttgttcaaatagccacggcccttgtgactccatccagcctcacaagaacatcaaaatcacatttgaggaagacaaagtcaactcatctctggttgtagacagagaatcctctcatgatggatgtcaggatgctctaaacattctcccagtccctggccccacctcttctgccacaaacgtcagcatggtggtatcagccggccctttgtccagcgagaaggcagagatgaacattctagaaatcaatgagaaattgtgcccccagctggcagagaagaaacagcagttcagaagcctcaaagagaaatgttttgtaactcaagtggcctgcttcctggccaagcagcagaacaaatacaaatatgaagagtgcaaagacctcataaaatctatgctgaggaatgagcgacagttcaaggaggagaagcttgcagagcagctgaagcaagctgaggagctcaggcaatataaagtcctggttcactctcaggaacgagagctgacccagttaagggagaagttacgggaagggagagatgcctcccgctcattgaatgagcatctccaggccctcctcactccggatgagccggacaagtcccaggggcaggacctccaagaacagctggctgaggggtgtagactggcacagcaccttgtccaaaagctcagcccagaaaatgataacgatgacgatgaagatgttcaagttgaggtggctgagaaagtgcagaaatcgtcttcccccagggagatgcagaaggctgaagaaaaggaagtccctgaggactcactggaggagtgtgccatcacttgttcaaatagccatggcccttatgactccaaccagccacatagaaaaaccaaaatcacatttgaggaagacaaagtcgactcaactctcattggctcatcctctcatgttgaatgggaggatgctgtacacattatcccagaaaatgaaagtgatgatgaggaagaggaagaaaaagggccagtgtctcccaggaatctgcaggagtctgaagaggaggaagtcccccaggagtcctgggatgaaggttattcgactctctcaattcctcctgaaaggttggcctcgtaccagtcttacagcagcacatttcactcattagaggaacagcaagtctgcatggctgttgacataggcagattggacagaggaatgtttctgtgtgcaaggaagaactgcttaatgtaagaggccccatctgaatttatttgcaggacatcggtgggatcaagtgaaaaaggaggaccaagaggcaacaggtcccaggctcagcagggagctgctggatgagaaagagcctgaagtcttgcaggactcactggatagatgttattcaactccttcagtttatcttggactgactgactcatgccagccctacagaagtgccttttacgtattggagcaacagcgtattggcttggctgttgacatggatgaaattgaaaagtaccaagaagtggaagaagaccaagacccatcatgccccaggctcagcagggagctgctggctgagaaagagcctgaagtcttgcaggactcactggatagatgttattcgactccttcaggttatcttgaactgcctgacttaggccagccctacagaagtgctgtttactcattggaggaacagtaccttggcttggctcttgacgtggacagaattaaaaaggaccaagaagaggaagaagaccaaggcccaccgtgccccaggctcagcagggagctgctggaggtagtagagcctgaagtcttgcaggactcactggatgttattcaactccttccagttgtcttgaacagcctgactcctgccagccctacggaagttccttttatgcattggaggaaaaacatgttggcttttctcttgacgtgggagaaattgaaaagaaggggaaggggaagaaaagaaggggaagaagatcaaagaagaaaagaagaaggggaagaaaagaaggggaagaagatcaaaacccaccatgccccaggctcagcagcgtgctgatggaagtggaagtgcctgaagtcttacaggactcactggatagatattattcgactccatcaatgtactttgaactacctgactcattccagcactacagaagtgtgttttactcatttgaggaacagcacatcagctttgcccttgacatggacaataggttttttactttgacggtgagaagtctccacctggtcttccagatgggagtcatattcccacaataagcagcccttactaagccgagaggtgtcattcctgcaggcaggacctataggcacctgaagatttgaatgaaactatagttccatttggaagcccagacataggatgggtcagtgggcatggctctattcctattctcagagcatgccagtggcaacctgtgctcagtctgaagacaatggacccacgttaggtgtgacacgttcacataactgtgcagcacatgccgggagtgatcagtcggacattttaatttgaaccacgtatctctgggtagctacaaaattcctcagggatttcattttgcaggcatgtctctgagcttctatacctgctcaaggtcagtgtcatctttgtgtttagctcatccaaaggtgttaccctggtttcaatgaacctaacctcattctttgtgtcttcagtgttggcttgttttagctgatccatctgtaacacaggagggatccttggctgaggattgtatttcagaaccaccaactgctcttgacaattgttaacccgctaggctcctttggttagagaagccacagtccttcagcctccaattggtgtcagtacttaggaagaccacagctagatggacaaacagcattgggaggccttagccctgctcctctcaattccatcctgtagagaacaggagtcaggagccgctggcaggagacagcatgtcacccaggactctgccggtgcagaatatgagcaatgccatgttcttgcagaaaacgcttagcctgagtttcataggaggtaatcaccagacaactgcagaatgtagaacactgagcaggacaactgacctgtctccttcacatagtccatatcaccacaaatcacacaacaaaaaggagaagagatattttgggttgaaaaaaagtaaaaagataatgtagctgcatttctttagttattttgaaccccaaatatttcctcatctttttgttgttgtcatggatggtggtgacatggacttgtttatagaggacaggtcagctgtctggctcaatgatctacattctgaagttgtctgaaaatgtcttcataattaaattcagcctaaactttttgacgggaacactgcagagacaatgctgtgagtttccaacctcagcccatctgcgggcagagaaggtctagtttgtccaacaccattatgatatcaggactggttacttggttaaggaggggtctaggagatctgtcccttttagagacaccttacttataatgaagtacttgggaaagtggttttcaagagtataaatatcctgtattctaatgatcatcctctaaacattttatcatttattaatcctccctgcctgtgtctattattatattcatatctctacgctgcaaattttgggtctcaatttttactgtgcctttgtttttactagtgtctgctgttgcaaaaagaagaaaacattctttgcctgagttttaatttttgtccaaagttaattttaatctatacaattaaaaccttttgcctatca

SEQ ID NO: 158714 - DNA, 4343 bp, Homo sapiens
  Payload ID: 11055
  Gene Symbol: NBPF11
  Gene Name: neuroblastoma breakpoint family, member 11
  ENST ID: ENST00000614785
  CDS Start-End: 1-2493
atggtggtatcagccggcccttggtccagcgagaaggcagagatgaacattctagaaatcaacgagaaattgcgcccccagttggcagagaacaaacagcagttcagaaacctcaaagagatgttttctaactcaactggccggcttcctggccaaccgacagaagaaatacagcaatataaagtcctggttcactctcaggaacgagagctgacccagttaagggagaagttacgggaagggagagatgcctcccgctcattgaatgagcatctccaggccctcctcactccggatgagccggacaagtcccaggggcaggacctccaagaacagctggctgaggggtgtagactggcacagcaccttgtccaaaagctcagcccagaaaatgacgaagatgaggatgaagatgttcaagttgaggaggatgagaaagtactggaatcatctgcccccagggaggtgcagaaggctgaagagagcaaagtccctgaggactcactggaggaatgtgccatcacttgttcaaatagccacggcccttgtgactccatccagcctcacaagaacatcaaaatcacatttgaggaagacaaagtcaactcatctctggttgtagacagagaatcctctcatgatggatgtcaggatgctctaaacattctcccagtccctggccccacctcttctgccacaaacgtcagcatggtggtatcagccggccctttgtccagcgagaaggcagagatgaacattctagaaatcaatgagaaattgtgcccccagctggcagagaagaaacagcagttcagaagcctcaaagagaaatgttttgtaactcaagtggcctgcttcctggccaagcagcagaacaaatacaaatatgaagagtgcaaagacctcataaaatctatgctgaggaatgagcgacagttcaaggaggagaagcttgcagagcagctgaagcaagctgaggagctcaggcaatataaagtcctggttcactctcaggaacgagagctgacccagttaagggagaagttacgggaagggagagatgcctcccgctcattgaatgagcatctccaggccctcctcactccggatgagccggacaagtcccaggggcaggacctccaagaacagctggctgaggggtgtagactggcacagcaccttgtccaaaagctcagcccagaaaatgataacgatgacgatgaagatgttcaagttgaggtggctgagaaagtgcagaaatcgtcttcccccagggagatgcagaaggctgaagaaaaggaagtccctgaggactcactggaggagtgtgccatcacttgttcaaatagccatggcccttatgactccaaccagccacatagaaaaaccaaaatcacatttgaggaagacaaagtcgactcaactctcattggctcatcctctcatgttgaatgggaggatgctgtacacattatcccagaaaatgaaagtgatgatgaggaagaggaagaaaaagggccagtgtctcccaggaatctgcaggagtctgaagaggaggaagtcccccaggagtcctgggatgaaggttattcgactctctcaattcctcctgaaaggttggcctcgtaccagtcttacagcagcacatttcactcattagaggaacagcaagtctgcatggctgttgacataggcagacatcggtgggatcaagtgaaaaaggaggaccaagaggcaacaggtcccaggctcagcagggagctgctggatgagaaagagcctgaagtcttgcaggactcactggatagatgttattcaactccttcagtttatcttggactgactgactcatgccagccctacagaagtgccttttacgtattggagcaacagcgtattggcttggctgttgacatggatgaaattgaaaagtaccaagaagtggaagaagaccaagacccatcatgccccaggctcagcagggagctgctggctgagaaagagcctgaagtcttgcaggactcactggatagatgttattcgactccttcaggttatcttgaactgcctgacttaggccagccctacagaagtgctgtttactcattggaggaacagtaccttggcttggctcttgacgtggacagaattaaaaaggaccaagaagaggaagaagaccaaggcccaccgtgccccaggctcagcagggagctgctggaggtagtagagcctgaagtcttgcaggactcactggatgttattcaactccttccagttgtcttgaacagcctgactcctgccagccctacggaagttccttttatgcattggaggaaaaacatgttggcttttctcttgacgtgggagaaattgaaaagaaggggaaggggaagaaaagaaggggaagaagatcaaagaagaaaagaagaaggggaagaaaagaaggggaagaagatcaaaacccaccatgccccaggctcagcagcgtgctgatggaagtggaagtgcctgaagtcttacaggactcactggatagatattattcgactccatcaatgtactttgaactacctgactcattccagcactacagaagtgtgttttactcatttgaggaacagcacatcagctttgcccttgacatggacaataggttttttactttgacggtgagaagtctccacctggtcttccagatgggagtcatattcccacaataagcagcccttactaagccgagaggtgtcattcctgcaggcaggacctataggcacctgaagatttgaatgaaactatagttccatttggaagcccagacataggatgggtcagtgggcatggctctattcctattctcagagcatgccagtggcaacctgtgctcagtctgaagacaatggacccacgttaggtgtgacacgttcacataactgtgcagcacatgccgggagtgatcagtcggacattttaatttgaaccacgtatctctgggtagctacaaaattcctcagggatttcattttgcaggcatgtctctgagcttctatacctgctcaaggtcagtgtcatctttgtgtttagctcatccaaaggtgttaccctggtttcaatgaacctaacctcattctttgtgtcttcagtgttggcttgttttagctgatccatctgtaacacaggagggatccttggctgaggattgtatttcagaaccaccaactgctcttgacaattgttaacccgctaggctcctttggttagagaagccacagtccttcagcctccaattggtgtcagtacttaggaagaccacagctagatggacaaacagcattgggaggccttagccctgctcctctcaattccatcctgtagagaacaggagtcaggagccgctggcaggagacagcatgtcacccaggactctgccggtgcagaatatgagcaatgccatgttcttgcagaaaacgcttagcctgagtttcataggaggtaatcaccagacaactgcagaatgtagaacactgagcaggacaactgacctgtctccttcacatagtccatatcaccacaaatcacacaacaaaaaggagaagagatattttgggttgaaaaaaagtaaaaagataatgtagctgcatttctttagttattttgaaccccaaatatttcctcatctttttgttgttgtcatggatggtggtgacatggacttgtttatagaggacaggtcagctgtctggctcaatgatctacattctgaagttgtctgaaaatgtcttcataattaaattcagcctaaactttttgacgggaacactgcagagacaatgctgtgagtttccaacctcagcccatctgcgggcagagaaggtctagtttgtccaacaccattatgatatcaggactggttacttggttaaggaggggtctaggagatctgtcccttttagagacaccttacttataatgaagtacttgggaaagtggttttcaagagtataaatatcctgtattctaatgatcatcctctaaacattttatcatttattaatcctccctgcctgtgtctattattatattcatatctctacgctgcaaattttgggtctcaatttttactgtgcctttgtttttactagtgtctgctgttgcaaaaagaagaaaacattctttgcctgagttttaatttttgtccaaagttaattttaatctatacaattaaaaccttttgcctatcactctggacttttggattgttttttacattcagtgttataatatttgattatgctgattggttttggtgggtactgatgcgaattaataaaaacatttcatttcca

SEQ ID NO: 158715 - DNA, 4630 bp, Homo sapiens
  Payload ID: 11055
  Gene Symbol: NBPF11
  Gene Name: neuroblastoma breakpoint family, member 11
  Uniprot ID: Q86T75
  ENST ID: ENST00000614015
  CDS Start-End: 184-2781
acggttacctggcacgctggccacaatctacctcactcttatcagagtctgagcagtgctttcagctctgagttgaggcacctcgaaccttgtttttgtggtgaaggatcctaaagtgctgtggggagtgatcacatttttcacaacatccctgactccacctcttctgccacaaacgtcagcatggtggtatcagccggcccttggtccagcgagaaggcagagatgaacattctagaaatcaacgagaaattgcgcccccagttggcagagaacaaacagcagttcagaaacctcaaagagagatgttttctaactcaactggccggcttcctggccaaccgacagaagaaatacaagtatgaagagtgtaaagacctcataaaatttatgctgaggaatgagcgacagttcaaggaggagaagcttgcagagcagctcaagcaagctgaggagctcaggcaatataaagtcctggttcactctcaggaacgagagctgacccagttaagggagaagttacgggaagggagagatgcctcccgctcattgaatgagcatctccaggccctcctcactccggatgagccggacaagtcccaggggcaggacctccaagaacagctggctgaggggtgtagactggcacagcaccttgtccaaaagctcagcccagaaaatgacgaagatgaggatgaagatgttcaagttgaggaggatgagaaagtactggaatcatctgcccccagggaggtgcagaaggctgaagagagcaaagtccctgaggactcactggaggaatgtgccatcacttgttcaaatagccacggcccttgtgactccatccagcctcacaagaacatcaaaatcacatttgaggaagacaaagtcaactcatctctggttgtagacagagaatcctctcatgatggatgtcaggatgctctaaacattctcccagtccctggccccacctcttctgccacaaacgtcagcatggtggtatcagccggccctttgtccagcgagaaggcagagatgaacattctagaaatcaatgagaaattgtgcccccagctggcagagaagaaacagcagttcagaagcctcaaagagaaatgttttgtaactcaagtggcctgcttcctggccaagcagcagaacaaatacaaatatgaagagtgcaaagacctcataaaatctatgctgaggaatgagcgacagttcaaggaggagaagcttgcagagcagctgaagcaagctgaggagctcaggcaatataaagtcctggttcactctcaggaacgagagctgacccagttaagggagaagttacgggaagggagagatgcctcccgctcattgaatgagcatctccaggccctcctcactccggatgagccggacaagtcccaggggcaggacctccaagaacagctggctgaggggtgtagactggcacagcaccttgtccaaaagctcagcccagaaaatgataacgatgacgatgaagatgttcaagttgaggtggctgagaaagtgcagaaatcgtcttcccccagggagatgcagaaggctgaagaaaaggaagtccctgaggactcactggaggagtgtgccatcacttgttcaaatagccatggcccttatgactccaaccagccacatagaaaaaccaaaatcacatttgaggaagacaaagtcgactcaactctcattggctcatcctctcatgttgaatgggaggatgctgtacacattatcccagaaaatgaaagtgatgatgaggaagaggaagaaaaagggccagtgtctcccaggaatctgcaggagtctgaagaggaggaagtcccccaggagtcctgggatgaaggttattcgactctctcaattcctcctgaaaggttggcctcgtaccagtcttacagcagcacatttcactcattagaggaacagcaagtctgcatggctgttgacataggcagacatcggtgggatcaagtgaaaaaggaggaccaagaggcaacaggtcccaggctcagcagggagctgctggatgagaaagagcctgaagtcttgcaggactcactggatagatgttattcaactccttcagtttatcttggactgactgactcatgccagccctacagaagtgccttttacgtattggagcaacagcgtattggcttggctgttgacatggatgaaattgaaaagtaccaagaagtggaagaagaccaagacccatcatgccccaggctcagcagggagctgctggctgagaaagagcctgaagtcttgcaggactcactggatagatgttattcgactccttcaggttatcttgaactgcctgacttaggccagccctacagaagtgctgtttactcattggaggaacagtaccttggcttggctcttgacgtggacagaattaaaaaggaccaagaagaggaagaagaccaaggcccaccgtgccccaggctcagcagggagctgctggaggtagtagagcctgaagtcttgcaggactcactggatgttattcaactccttccagttgtcttgaacagcctgactcctgccagccctacggaagttccttttatgcattggaggaaaaacatgttggcttttctcttgacgtgggagaaattgaaaagaaggggaaggggaagaaaagaaggggaagaagatcaaagaagaaaagaagaaggggaagaaaagaaggggaagaagatcaaaacccaccatgccccaggctcagcagcgtgctgatggaagtggaagtgcctgaagtcttacaggactcactggatagatattattcgactccatcaatgtactttgaactacctgactcattccagcactacagaagtgtgttttactcatttgaggaacagcacatcagctttgcccttgacatggacaataggttttttactttgacggtgagaagtctccacctggtcttccagatgggagtcatattcccacaataagcagcccttactaagccgagaggtgtcattcctgcaggcaggacctataggcacctgaagatttgaatgaaactatagttccatttggaagcccagacataggatgggtcagtgggcatggctctattcctattctcagagcatgccagtggcaacctgtgctcagtctgaagacaatggacccacgttaggtgtgacacgttcacataactgtgcagcacatgccgggagtgatcagtcggacattttaatttgaaccacgtatctctgggtagctacaaaattcctcagggatttcattttgcaggcatgtctctgagcttctatacctgctcaaggtcagtgtcatctttgtgtttagctcatccaaaggtgttaccctggtttcaatgaacctaacctcattctttgtgtcttcagtgttggcttgttttagctgatccatctgtaacacaggagggatccttggctgaggattgtatttcagaaccaccaactgctcttgacaattgttaacccgctaggctcctttggttagagaagccacagtccttcagcctccaattggtgtcagtacttaggaagaccacagctagatggacaaacagcattgggaggccttagccctgctcctctcaattccatcctgtagagaacaggagtcaggagccgctggcaggagacagcatgtcacccaggactctgccggtgcagaatatgagcaatgccatgttcttgcagaaaacgcttagcctgagtttcataggaggtaatcaccagacaactgcagaatgtagaacactgagcaggacaactgacctgtctccttcacatagtccatatcaccacaaatcacacaacaaaaaggagaagagatattttgggttgaaaaaaagtaaaaagataatgtagctgcatttctttagttattttgaaccccaaatatttcctcatctttttgttgttgtcatggatggtggtgacatggacttgtttatagaggacaggtcagctgtctggctcaatgatctacattctgaagttgtctgaaaatgtcttcataattaaattcagcctaaactttttgacgggaacactgcagagacaatgctgtgagtttccaacctcagcccatctgcgggcagagaaggtctagtttgtccaacaccattatgatatcaggactggttacttggttaaggaggggtctaggagatctgtcccttttagagacaccttacttataatgaagtacttgggaaagtggttttcaagagtataaatatcctgtattctaatgatcatcctctaaacattttatcatttattaatcctccctgcctgtgtctattattatattcatatctctacgctgcaaattttgggtctcaatttttactgtgcctttgtttttactagtgtctgctgttgcaaaaagaagaaaacattctttgcctgagttttaatttttgtccaaagttaattttaatctatacaattaaaaccttttgcctatcactctggacttttggattgttttttacattcagtgttataatatttgattatgctgattggttttggtgggtactgatgcgaattaataaaaacatttcatttcc

SEQ ID NO: 158716 - DNA, 1831 bp, Homo sapiens
  Payload ID: 11056
  Gene Symbol: NBPF12
  Gene Name: neuroblastoma breakpoint family, member 12
  ENST ID: ENST00000439206
  CDS Start-End: 72-1805
aaagtgctgtggggagtgatcacatttttcacaacatccctgactccacctcttctgccacaaacgtcagcatggtggtatcagccggcccttggtccagcgagaaggcagagatgaacattctagaaatcaacgagaaattgcgcccccagttggcagagaacaaacagcagttcagaaacctcaaagagagatgttttctaactcaactggccggcttcctggccaaccgacagaagaaatacaaatatgaagagtgcaaagacctcataaaatctatgctgaggaatgagctacagttcaaggaggagaagcttgcagagcagctgaagcaagctgaggagctcaggcaatataaagtcctggttcactctcaggaacgagagctgacccagttaagggagaagttacgggaagggagagatgcctcccgctcattgaatgagcatctccaggccctcctcactccggatgagccggacaagtcccaggggcaggacctccaagaacagctggctgaggggtgtagactggcacagcaccttgtccaaaagctcagcccagaaaatgatgaagatgaggatgaagatgttcaagttgaggaggatgagaaagtgctggaatcatcttcccccagggagatgcagaaggctgaagaaaaggaagtccctgaggactcactggaggagtgtgccatcacttgttcaaatagccatggcccttatgactccaaccagccacataggaaaaccaaaatcacatttgaggaagacaaagtcgactcaactctcattggctcatcctctcatgttgaatgggaggatgctgtacacattatcccagaaaatgaaagtgatgatgaggaagaggaagaaaaagggccagtgtctcccaggaatctgcaggagtctgaagaggaggaagtcccccaggagtcctgggatgaaggttattcgactctctcaattcctcctgaaaggttggcctcataccagtcttacagcagcacatttcactcattagaggaacagcaagtctgcatggctgttgacataggcagacatcggtgggatcaagtgaaaaaggaggaccaagaggcaacaggtcccaggctcagcagggagctgctggctgagaaagagcctgaagtcttgcaggactcactggatagatgttattcgactccttcaggttatcttgaactgcctgacttaggccagccctacagaagtgctgtttactcattggaggaacagtaccttggcttggctcttgacgtggacagaattaaaaaggaccaagaagaggaagaagaccaaggcccaccatgccccaggctcagcagggagctgctggaggtagtagagcctgaagtcttgcaggactcactggatagatgttattcaactccttccagttgtcttgaacagcctgactcctgccagccctacagaagttccttttatgcattggaggaaaaacatgttggcttttctcttgacgtgggagaaattgaaaagtaccaagaagtggaagaagaccaagacccatcatgccccaggctcaacagcgtgctgatggaagtggaagagcctgaagtcttgcaggactcactggatagatgttattcgactccatcaatgtactttgaactacctgactcattccagcactacagaagtgtgttttactcatttgaggaacagcacatcacctttgcccttgacatggacaatagcttttttactttgacggtgacaagtctccacctggtcttccagatgggagtcatattcccacaataagcagcccttactaagccgagaggttt

SEQ ID NO: 158717 - DNA, 5035 bp, Homo sapiens
  Payload ID: 11056
  Gene Symbol: NBPF12
  Gene Name: neuroblastoma breakpoint family, member 12
  ENST ID: ENST00000579935
  CDS Start-End: 77-3412
aaagtgctgtggggagtgatcacatttttcacaacagtaagtccctgactccacctcttctgccacaaacgtcagcatggtggtatcagccggcccttggtccagcgagaaggcagagatgaacattctagaaatcaacgagaaattgcgcccccagttggcagagaacaaacagcagttcagaaacctcaaagagagatgttttctaactcaactggccggcttcctggccaaccgacagaagaaatacaagtatgaagagtgtaaagacctcataaaatttatgctgaggaatgagcgacagttcaaggaggagaagcttgcagagcagctgaaacaagctgaggagctcaggcaatataaagtcctggttcactctcaggaacgagagctgacccagttaagggagaagttacgggaagggagagatgcctcccgctcattgaatgagcatctccaggccctcctcactccggatgagccggacaagtcccaggggcaggacctccaagaacagctggctgaggggtgtagactggcacagcaacttgtccaaaagctcagcccagaaaatgatgaagatgaggatgaagatgttcaagttgaggaggatgagaaagtactggaatcatctgcccccagggaggtgcagaaggctgaagagagcaaagtccctgaggactcactggaggaatgtgccatcacttgttcaaatagccacggcccttgtgactccatccagcctcacaagaacatcaaaatcacatttgaggaagacaaagtcaactcaactgtggttgtagacagaaaatcctctcatgatgaatgtcaggatgctctaaacattctcccagtccctggccccacctcttctgccacaaacgtcagcatggtggtatcagccggccctttgtccagcgagaaggcagagatgaacattctagaaatcaatgagaagttgcgcccccagctggcagagaagaaacagcagttcagaagcctcaaagagaaatgttttgtaactcaactggccggcttcctggccaagcagcagaacaaatacaaatatgaagagtgcaaagacctcataaaatctatgctgaggaatgagctacagttcaaggaggagaagcttgcagagcagctgaagcaagctgaggagctcaggcaatataaagtcctggttcactctcaggaacgagagctgacccagttaagggagaagttacgggaagggagagatgcctcccgctcattgaatgagcatctccaggccctcctcactccggatgagccggacaagtcccaggggcaggacctccaagaacagctggctgaggggtgtagactggcacagcaccttgtccaaaagctcagcccagaaaatgataacgatgacgatgaagatgttcaagttgaggtggctgagaaagtgcagaaatcgtcttcccccagggagatgcagaaggctgaagaaaaggaagtccctgaggactcactggaggagtgtgccatcacttgttcaaatagccatggcccttatgactccaaccagccacataggaaaaccaaaatcacatttgaggaagacaaagtcgactcaactctcattggctcatcctctcatgttgaatgggaggatgctgtacacattatcccagaaaatgaaagtgatgatgaggaagaggaagaaaaagggccagtgtctcccaggaatctgcaggagtctgaagaggaggaagtcccccaggagtcctgggatgaaggttattcgactctctcaattcctcctgaaaggttggcctcataccagtcttacagcagcacatttcactcattagaggaacagcaagtctgcatggctgttgacataggcagacatcggtgggatcaagtgaaaaaggaggaccaagaggcaacaggtcccaggctcagcagggagctgctggctgagaaagagcctgaagtcttgcaggactcactggatagatgttattcaactccttcagtttatcttggactgactgactcatgccagccctacagaagtgccttttacgtattggagcaacagcgtgttggcttggctgttgacatggatgaaattgaaaagtaccaagaagtggaagaagaccaagacccatcatgccccaggctcagcagggagctgctggctgagaaagagcctgaagtcttgcaggactcactggatagatgttattcgactccttcaggttatcttgaactgcctgacttaggccagccctacagaagtgctgtttactcattggaggaacagtaccttggcttggctcttgacgtggacagaattaaaaaggaccaagaagaggaagaagaccaaggcccaccatgccccaggctcagcagggagctgctggaggtagtagagcctgaagtcttgcaggactcactggatagatgttattcaactccttccagttgtcttgaacagcctgactcctgccagccctacagaagttccttttatgcattggaggaaaaacatgttggcttttctcttgacgtgggagaaattgaaaagaaggggaaggggaagaaaagaaggggaagaagatcaaagaagaaaagaagaaggggaagaaaagaaggggaagaagatcaaaacccaccatgccccaggctcagcagggagctgctggctgagaaagagcctgaagtcttgcaggactcactggatagatgttattcgactccttcaggttatcttgaactgcctgacttaggccagccctacagaagtgctgtttactcattggaggaacagtaccttggcttggctcttgacgtggacagaattaaaaaggaccaagaagaggaagaagaccaaggcccaccatgccccaggctcagcagggagctgctggaggtagtagagcctgaagtcttgcaggactcactggatagatgttattcaactccttccagttgtcttgaacagcctgactcctgccagccctacagaagttccttttatgcattggaggaaaaacatgttggcttttctcttgacgtgggagaaattgaaaagaaggggaaggggaagaaaagaaggggaagaagatcaaagaagaaaagaagaaggggaagaaaagaaggggaagaagatcaaaacccaccatgccccaggctcaacagcgtgctgatggaagtggaagagcctgaagtcttgcaggactcactggatagatgttattcgactccatcaatgtactttgaactacctgactcattccagcactacagaagtgtgttttactcatttgaggaacagcacatcacctttgcccttgacatggacaatagcttttttactttgacggtgacaagtctccacctggtcttccagatgggagtcatattcccacaataagcagcccttactaagccgagaggtttcattcctgcaggcaggacctataggcacctgaagatttgaatgaaactatagttccatttggaagcccagacataggatgggtcagtgggcatggctctattcctattctcagagcatgccagtggcaacctgtgctcagtctgaagacaatggacccacgttaggtgtgacacgttcacataactgtgcagcacatgccgggagtgatcagccggacattttaatttgaaccatgtatctctgggtagctacaaaattcctcagggatttcattttgcaggcatgtctctgagcttctatacctactcaaggtcagtgtcatctttgtgtttagttcatccaaaggtgttaccctggtttcaatgaacctaacctcattatttgtgtcttcagtgttggcttgttttagctgatccatctgtaacacaggagggatccttggctgaggattgtatttcagaaccaccaactgctcttgacaattgttaacccactaggctcctttggttagagaagccacagtccttcagcctccaattggtgtcagtacttaggaagaccacagctagatggacaaacagcattgggaggccttagccctgctcctctcaattccatcctgtagagaacaggagtcaggagccgctggcaggagacagcatgtcacccaggactctgccggtgcagaatatgagcaatgccatgttcttgcagaaaacgcttagcctgagtttcataggaggtaatcaccagacaactgcagaatgtagaacactgagcaggacaactgacctgtctccttcacatagtccatatcaccacaaatcacacaacaaaaaggagaagagatattttgggttgaaaaaaagtaaaaagataatgtagctgcatttctttagttattttgaaccccaaatatttcctcatctttttgttgttgtcattgatggtggtgacatggacttgtttatagaggacaggtcagctctctggctcaatgatctacattctgaagttgtctgaaaatgtcttcatgattaaattcagcctaaactttttgctgggaacactgcagagacaatgctgtgagtttccaacctcagcccatctgcgggcagagaaggtctagtttgtccatcaccattatgatatcaggactggttacttggttaaggaggggtctaggagatctgtcccttttagagacaccttacttataatgaagtacttgggaaagcggttttcaagagtataaatatcctgtattctaatgatcatcctctaaacattttatcatttattaatcctccctgcctgtgtctattattatatacatatctctacgctgcaaattttgggtctcaatttttactgtgcctttgtttttactagtgtctgctgttgcaaaaagaagaaaacattctctgcctgagttttaatttttgtccaaagttaattttaatctatacaattaaaaccttttgcctatcactctggacttttggattgttttttacattcagtgttataatatttgattatgctgattggttttggtgggtactgatgtgaattaataaaaacatttcatttcca

SEQ ID NO: 158718 - DNA, 7061 bp, Homo sapiens
  Payload ID: 11056
  Gene Symbol: NBPF12
  Gene Name: neuroblastoma breakpoint family, member 12
  ENST ID: ENST00000617931
  CDS Start-End: 1061-5434
ggaccctgaggagccagcgggccgcaagcaagttgctgggcggcggttgagatagcggcggtgctgggaggggtaggtgagggtcgcgaggctgcctgagcttctgagtgagcctggtgattttgggaacgcgggacgggcgacctgcggcgccaggagcggggccgaggtacggcggcacggctgcagcctggatgggaagttcaagtttactgcgaagtccacccagcgttccggaggcattctgaaggcaaatcctgtttagacccaggcaaaggttcctggtgacccaggctctcatgagcagattgtcccttatcattctcctgaggatgtctggagcttcagtgctgtgtgctcttggcctccacactgggggtgccaccaactcccactgtccagggcttctggtggactctccgaggcaccgatgtagaaacttacccattcagtgcaccaagagcagcctcacatggtgtgggccgacatgaagagctgccagatccaacagcccttgaagataaggatggtcaaacaaaataatatcatacctggagaaactcagatcttgctaagatttactggttgggaatccaaagttaatgccaagaagcagctgccagttgggatcaaatgtgagcctatggatcaagaaaatgagcaaacaggtggccatgaaacagatggtcatagaattgtttcagtgcttgtgagtgcagcaacccaagagtgtcttatctgaaataccaccaggaatgtctggacacagtagacaaaggtttttcaactggatgccttaggatacatgcttccaaaaacaaagtagccaaaaagaaaccagagtcacagaatatcagagccagaggaacatttggagacggttacctggcacgctggccacaatctacctcactcttatcagagtctgagcagtgctttcagctctgagttgaggcacctcgaaccttgtttttgtggtgaaggatcctaaagtgctgtggggagtgatcacatttttcacaacatccctgactccacctcttctgccacaaacgtcagcatggtggtatcagccggcccttggtccagcgagaaggcagagatgaacattctagaaatcaacgagaaattgcgcccccagttggcagagaacaaacagcagttcagaaacctcaaagagagatgttttctaactcaactggccggcttcctggccaaccgacagaagaaatacaagtatgaagagtgtaaagacctcataaaatttatgctgaggaatgagcgacagttcaaggaggagaagcttgcagagcagctgaaacaagctgaggagctcaggcaatataaagtcctggttcactctcaggaacgagagctgacccagttaagggagaagttacgggaagggagagatgcctcccgctcattgaatgagcatctccaggccctcctcactccggatgagccggacaagtcccaggggcaggacctccaagaacagctggctgaggggtgtagactggcacagcaacttgtccaaaagctcagcccagaaaatgatgaagatgaggatgaagatgttcaagttgaggaggatgagaaagtactggaatcatctgcccccagggaggtgcagaaggctgaagagagcaaagtccctgaggactcactggaggaatgtgccatcacttgttcaaatagccacggcccttgtgactccatccagcctcacaagaacatcaaaatcacatttgaggaagacaaagtcaactcaactgtggttgtagacagaaaatcctctcatgatgaatgtcaggatgctctaaacattctcccagtccctggccccacctcttctgccacaaacgtcagcatggtggtatcagccggccctttgtccagcgagaaggcagagatgaacattctagaaatcaatgagaagttgcgcccccagctggcagagaagaaacagcagttcagaagcctcaaagagaaatgttttgtaactcaactggccggcttcctggccaagcagcagaacaaatacaaatatgaagagtgcaaagacctcataaaatctatgctgaggaatgagctacagttcaaggaggagaagcttgcagagcagctgaagcaagctgaggagctcaggcaatataaagtcctggttcactctcaggaacgagagctgacccagttaagggagaagttacgggaagggagagatgcctcccgctcattgaatgagcatctccaggccctcctcactccggatgagccggacaagtcccaggggcaggacctccaagaacagctggctgaggggtgtagactggcacagcaccttgtccaaaagctcagcccagaaaatgatgaagatgaggatgaagatgttcaagttgaggaggatgagaaagtgctggaatcatcttcccccagggagatgcagaaggctgaagaaagcaaagtccctgaggactcactggaggaatgtgccatcacttgttcaaatagccacggcccttgtgactccaaccagcctcacaagaacatcaaaatcacatttgaggaagacaaagtcaactcatctctggttgtagacagagaatcctctcatgatgaatgtcaggatgctctaaacattctcccagtccctggccccacctcttctgccacaaacgtcagcatggtggtatcagccggccctttgtccagcgagaaggcagagatgaacattctagaaatcaatgagaagttgcgcccccagctggcagagaagaaacagcagttcagaagcctcaaagagaaatgttttgtaactcaagtggcctgcttcctggccaagcagcagaacaaatacaaatatgaagagtgcaaagacctcctaaaatctatgctgaggaatgagctacagttcaaggaggagaagcttgcagagcagctgaagcaagctgaggagctcaggcaatataaagtcctggttcactctcaggaacgagagctgacccagttaagggagaagttacgggaagggagagatgcctcccgctcattgaatgagcatctccaggccctcctcactccggatgagccggacaagtcccaggggcaggacctccaagaacagctggctgaggggtgtagactggcacaacaccttgtccaaaagctcagcccagaaaatgataacgatgacgatgaagatgttcaagttgaggtggctgagaaagtgcagaaatcgtcttcccccagggagatgcagaaggctgaagaaaaggaagtccctgaggactcactggaggagtgtgccatcacttgttcaaatagccatggcccttatgactccaaccagccacataggaaaaccaaaatcacatttgaggaagacaaagtcgactcaactctcattggctcatcctctcatgttgaatgggaggatgctgtacacattatcccagaaaatgaaagtgatgatgaggaagaggaagaaaaagggccagtgtctcccaggaatctgcaggagtctgaagaggaggaagtcccccaggagtcctgggatgaaggttattcgactctctcaattcctcctgaaaggttggcctcataccagtcttacagcagcacatttcactcattagaggaacagcaagtctgcatggctgttgacataggcagacatcggtgggatcaagtgaaaaaggaggaccaagaggcaacaggtcccaggctcagcagggagctgctggctgagaaagagcctgaagtcttgcaggactcactggatagatgttattcaactccttcagtttatcttggactgactgactcatgccagccctacagaagtgccttttacgtattggagcaacagcgtgttggcttggctgttgacatggatgaaattgaaaagtaccaagaagtggaagaagaccaagacccatcatgccccaggctcagcagggagctgctggctgagaaagagcctgaagtcttgcaggactcactggatagatgttattcgactccttcaggttatcttgaactgcctgacttaggccagccctacagaagtgctgtttactcattggaggaacagtaccttggcttggctcttgacgtggacagaattaaaaaggaccaagaagaggaagaagaccaaggcccaccatgccccaggctcagcagggagctgctggaggtagtagagcctgaagtcttgcaggactcactggatagatgttattcaactccttccagttgtcttgaacagcctgactcctgccagccctacagaagttccttttatgcattggaggaaaaacatgttggcttttctcttgacgtgggagaaattgaaaagaaggggaaggggaagaaaagaaggggaagaagatcaaagaagaaaagaagaaggggaagaaaagaaggggaagaagatcaaaacccaccatgccccaggctcagcagggagctgctggctgagaaagagcctgaagtcttgcaggactcactggatagatggtattcgactccttcagtttatcttggactgactgacccatgccagccctacagaagtgccttttacgtattggagcaacagcgtgttggcttggctgttgacatggatgaaattgaaaagtaccaagaagtggaagaagaccaagacccatcatgccccaggctcagcagggagctgctggctgagaaagagcctgaagtcttgcaggactcactggatagatgttattcgactccttcaggttatcttgaactgcctgacttaggccagccctacagaagtgctgtttactcattggaggaacagtaccttggcttggctcttgacgtggacagaattaaaaaggaccaagaagaggaagaagaccaaggcccaccatgccccaggctcagcagggagctgctggaggtagtagagcctgaagtcttgcaggactcactggatagatgttattcaactccttccagttgtcttgaacagcctgactcctgccagccctacagaagttccttttatgcattggaggaaaaacatgttggcttttctcttgacgtgggagaaattgaaaagaaggggaaggggaagaaaagaaggggaagaagatcaaagaagaaaagaagaaggggaagaaaagaaggggaagaagatcaaaacccaccatgccccaggctcaacagcgtgctgatggaagtggaagagcctgaagtcttgcaggactcactggatagatgttattcgactccatcaatgtactttgaactacctgactcattccagcactacagaagtgtgttttactcatttgaggaacagcacatcacctttgcccttgacatggacaatagcttttttactttgacggtgacaagtctccacctggtcttccagatgggagtcatattcccacaataagcagcccttactaagccgagaggtttcattcctgcaggcaggacctataggcacctgaagatttgaatgaaactatagttccatttggaagcccagacataggatgggtcagtgggcatggctctattcctattctcagagcatgccagtggcaacctgtgctcagtctgaagacaatggacccacgttaggtgtgacacgttcacataactgtgcagcacatgccgggagtgatcagccggacattttaatttgaaccatgtatctctgggtagctacaaaattcctcagggatttcattttgcaggcatgtctctgagcttctatacctactcaaggtcagtgtcatctttgtgtttagttcatccaaaggtgttaccctggtttcaatgaacctaacctcattatttgtgtcttcagtgttggcttgttttagctgatccatctgtaacacaggagggatccttggctgaggattgtatttcagaaccaccaactgctcttgacaattgttaacccactaggctcctttggttagagaagccacagtccttcagcctccaattggtgtcagtacttaggaagaccacagctagatggacaaacagcattgggaggccttagccctgctcctctcaattccatcctgtagagaacaggagtcaggagccgctggcaggagacagcatgtcacccaggactctgccggtgcagaatatgagcaatgccatgttcttgcagaaaacgcttagcctgagtttcataggaggtaatcaccagacaactgcagaatgtagaacactgagcaggacaactgacctgtctccttcacatagtccatatcaccacaaatcacacaacaaaaaggagaagagatattttgggttgaaaaaaagtaaaaagataatgtagctgcatttctttagttattttgaaccccaaatatttcctcatctttttgttgttgtcattgatggtggtgacatggacttgtttatagaggacaggtcagctctctggctcaatgatctacattctgaagttgtctgaaaatgtcttcatgattaaattcagcctaaactttttgctgggaacactgcagagacaatgctgtgagtttccaacctcagcccatctgcgggcagagaaggtctagtttgtccatcaccattatgatatcaggactggttacttggttaaggaggggtctaggagatctgtcccttttagagacaccttacttataatgaagtacttgggaaagcggttttcaagagtataaatatcctgtattctaatgatcatcctctaaacattttatcatttattaatcctccctgcctgtgtctattattatatacatatctctacgctgcaaattttgggtctcaatttttactgtgcctttgtttttactagtgtctgctgttgcaaaaagaagaaaacattctctgcctgagttttaatttttgtccaaagttaattttaatctatacaattaaaaccttttgcctatcactctggacttttggattgttttttacattcagtgttataatatttgattatgctgattggttttggtgggtactgatgtgaattaataaaaacatttcatttccatgtt

SEQ ID NO: 158719 - DNA, 4630 bp, Homo sapiens
  Payload ID: 11056
  Gene Symbol: NBPF12
  Gene Name: neuroblastoma breakpoint family, member 12
  ENST ID: ENST00000617614
  CDS Start-End: 184-2781
acggttacctggcacgctggccacaatctacctcactcttatcagagtctgagcagtgctttcagctctgagttgaggcacctcgaaccttgtttttgtggtgaaggatcctaaagtgctgtggggagtgatcacatttttcacaacatccctgactccacctcttctgccacaaacgtcagcatggtggtatcagccggcccttggtccagcgagaaggcagagatgaacattctagaaatcaacgagaaattgcgcccccagttggcagagaacaaacagcagttcagaaacctcaaagagagatgttttctaactcaactggccggcttcctggccaaccgacagaagaaatacaagtatgaagagtgtaaagacctcataaaatttatgctgaggaatgagcgacagttcaaggaggagaagcttgcagagcagctgaaacaagctgaggagctcaggcaatataaagtcctggttcactctcaggaacgagagctgacccagttaagggagaagttacgggaagggagagatgcctcccgctcattgaatgagcatctccaggccctcctcactccggatgagccggacaagtcccaggggcaggacctccaagaacagctggctgaggggtgtagactggcacagcaacttgtccaaaagctcagcccagaaaatgatgaagatgaggatgaagatgttcaagttgaggaggatgagaaagtactggaatcatctgcccccagggaggtgcagaaggctgaagagagcaaagtccctgaggactcactggaggaatgtgccatcacttgttcaaatagccacggcccttgtgactccatccagcctcacaagaacatcaaaatcacatttgaggaagacaaagtcaactcatctctggttgtagacagagaatcctctcatgatgaatgtcaggatgctctaaacattctcccagtccctggccccacctcttctgccacaaacgtcagcatggtggtatcagccggccctttgtccagcgagaaggcagagatgaacattctagaaatcaatgagaagttgcgcccccagctggcagagaagaaacagcagttcagaagcctcaaagagaaatgttttgtaactcaagtggcctgcttcctggccaagcagcagaacaaatacaaatatgaagagtgcaaagacctcctaaaatctatgctgaggaatgagctacagttcaaggaggagaagcttgcagagcagctgaagcaagctgaggagctcaggcaatataaagtcctggttcactctcaggaacgagagctgacccagttaagggagaagttacgggaagggagagatgcctcccgctcattgaatgagcatctccaggccctcctcactccggatgagccggacaagtcccaggggcaggacctccaagaacagctggctgaggggtgtagactggcacaacaccttgtccaaaagctcagcccagaaaatgataacgatgacgatgaagatgttcaagttgaggtggctgagaaagtgcagaaatcgtcttcccccagggagatgcagaaggctgaagaaaaggaagtccctgaggactcactggaggagtgtgccatcacttgttcaaatagccatggcccttatgactccaaccagccacataggaaaaccaaaatcacatttgaggaagacaaagtcgactcaactctcattggctcatcctctcatgttgaatgggaggatgctgtacacattatcccagaaaatgaaagtgatgatgaggaagaggaagaaaaagggccagtgtctcccaggaatctgcaggagtctgaagaggaggaagtcccccaggagtcctgggatgaaggttattcgactctctcaattcctcctgaaaggttggcctcataccagtcttacagcagcacatttcactcattagaggaacagcaagtctgcatggctgttgacataggcagacatcggtgggatcaagtgaaaaaggaggaccaagaggcaacaggtcccaggctcagcagggagctgctggctgagaaagagcctgaagtcttgcaggactcactggatagatgttattcaactccttcagtttatcttggactgactgactcatgccagccctacagaagtgccttttacgtattggagcaacagcgtgttggcttggctgttgacatggatgaaattgaaaagtaccaagaagtggaagaagaccaagacccatcatgccccaggctcagcagggagctgctggctgagaaagagcctgaagtcttgcaggactcactggatagatgttattcgactccttcaggttatcttgaactgcctgacttaggccagccctacagaagtgctgtttactcattggaggaacagtaccttggcttggctcttgacgtggacagaattaaaaaggaccaagaagaggaagaagaccaaggcccaccatgccccaggctcagcagggagctgctggaggtagtagagcctgaagtcttgcaggactcactggatgttattcaactccttccagttgtcttgaacagcctgactcctgccagccctacagaagttccttttatgcattggaggaaaaacatgttggcttttctcttgacgtgggagaaattgaaaagaaggggaaggggaagaaaagaaggggaagaagatcaaagaagaaaagaagaaggggaagaaaagaaggggaagaagatcaaaacccaccatgccccaggctcaacagcgtgctgatggaagtggaagagcctgaagtcttgcaggactcactggatagatgttattcgactccatcaatgtactttgaactacctgactcattccagcactacagaagtgtgttttactcatttgaggaacagcacatcacctttgcccttgacatggacaatagcttttttactttgacggtgacaagtctccacctggtcttccagatgggagtcatattcccacaataagcagcccttactaagccgagaggtttcattcctgcaggcaggacctataggcacctgaagatttgaatgaaactatagttccatttggaagcccagacataggatgggtcagtgggcatggctctattcctattctcagagcatgccagtggcaacctgtgctcagtctgaagacaatggacccacgttaggtgtgacacgttcacataactgtgcagcacatgccgggagtgatcagccggacattttaatttgaaccatgtatctctgggtagctacaaaattcctcagggatttcattttgcaggcatgtctctgagcttctatacctactcaaggtcagtgtcatctttgtgtttagttcatccaaaggtgttaccctggtttcaatgaacctaacctcattatttgtgtcttcagtgttggcttgttttagctgatccatctgtaacacaggagggatccttggctgaggattgtatttcagaaccaccaactgctcttgacaattgttaacccactaggctcctttggttagagaagccacagtccttcagcctccaattggtgtcagtacttaggaagaccacagctagatggacaaacagcattgggaggccttagccctgctcctctcaattccatcctgtagagaacaggagtcaggagccgctggcaggagacagcatgtcacccaggactctgccggtgcagaatatgagcaatgccatgttcttgcagaaaacgcttagcctgagtttcataggaggtaatcaccagacaactgcagaatgtagaacactgagcaggacaactgacctgtctccttcacatagtccatatcaccacaaatcacacaacaaaaaggagaagagatattttgggttgaaaaaaagtaaaaagataatgtagctgcatttctttagttattttgaaccccaaatatttcctcatctttttgttgttgtcattgatggtggtgacatggacttgtttatagaggacaggtcagctctctggctcaatgatctacattctgaagttgtctgaaaatgtcttcatgattaaattcagcctaaactttttgctgggaacactgcagagacaatgctgtgagtttccaacctcagcccatctgcgggcagagaaggtctagtttgtccatcaccattatgatatcaggactggttacttggttaaggaggggtctaggagatctgtcccttttagagacaccttacttataatgaagtacttgggaaagcggttttcaagagtataaatatcctgtattctaatgatcatcctctaaacattttatcatttattaatcctccctgcctgtgtctattattatatacatatctctacgctgcaaattttgggtctcaatttttactgtgcctttgtttttactagtgtctgctgttgcaaaaagaagaaaacattctctgcctgagttttaatttttgtccaaagttaattttaatctatacaattaaaaccttttgcctatcactctggacttttggattgttttttacattcagtgttataatatttgattatgctgattggttttggtgggtactgatgtgaattaataaaaacatttcatttcc

SEQ ID NO: 158720 - DNA, 2701 bp, Homo sapiens
  Payload ID: 11056
  Gene Symbol: NBPF12
  Gene Name: neuroblastoma breakpoint family, member 12
  ENST ID: ENST00000613714
  CDS Start-End: 72-2675
aaagtgctgtggggagtgatcacatttttcacaacatccctggccccacctcttctgccacaaacgtcagcatggtggtatcagccggccctttgtccagcgagaaggcagagatgaacattctagaaatcaatgagaagttgcgcccccagctggcagagaagaaacagcagttcagaagcctcaaagagaaatgttttgtaactcaactggccggcttcctggccaagcagcagaacaaatacaaatatgaagagtgcaaagacctcataaaatctatgctgaggaatgagctacagttcaaggaggagaagcttgcagagcagctgaagcaagctgaggagctcaggcaatataaagtcctggttcactctcaggaacgagagctgacccagttaagggagaagttacgggaagggagagatgcctcccgctcattgaatgagcatctccaggccctcctcactccggatgagccggacaagtcccaggggcaggacctccaagaacagctggctgaggggtgtagactggcacagcaccttgtccaaaagctcagcccagaaaatgatgaagatgaggatgaagatgttcaagttgaggaggatgagaaagtgctggaatcatcttcccccagggagatgcagaaggctgaagaaagcaaagtccctgaggactcactggaggaatgtgccatcacttgttcaaatagccacggcccttgtgactccaaccagcctcacaagaacatcaaaatcacatttgaggaagacaaagtcaactcatctctggttgtagacagagaatcctctcatgatgaatgtcaggatgctctaaacattctcccagtccctggccccacctcttctgccacaaacgtcagcatggtggtatcagccggccctttgtccagcgagaaggcagagatgaacattctagaaatcaatgagaagttgcgcccccagctggcagagaagaaacagcagttcagaagcctcaaagagaaatgttttgtaactcaagtggcctgcttcctggccaagcagcagaacaaatacaaatatgaagagtgcaaagacctcctaaaatctatgctgaggaatgagctacagttcaaggaggagaagcttgcagagcagctgaagcaagctgaggagctcaggcaatataaagtcctggttcactctcaggaacgagagctgacccagttaagggagaagttacgggaagggagagatgcctcccgctcattgaatgagcatctccaggccctcctcactccggatgagccggacaagtcccaggggcaggacctccaagaacagctggctgaggggtgtagactggcacaacaccttgtccaaaagctcagcccagaaaatgataacgatgacgatgaagatgttcaagttgaggtggctgagaaagtgcagaaatcgtcttcccccagggagatgcagaaggctgaagaaaaggaagtccctgaggactcactggaggagtgtgccatcacttgttcaaatagccatggcccttatgactccaaccagccacataggaaaaccaaaatcacatttgaggaagacaaagtcgactcaactctcattggctcatcctctcatgttgaatgggaggatgctgtacacattatcccagaaaatgaaagtgatgatgaggaagaggaagaaaaagggccagtgtctcccaggaatctgcaggagtctgaagaggaggaagtcccccaggagtcctgggatgaaggttattcgactctctcaattcctcctgaaaggttggcctcataccagtcttacagcagcacatttcactcattagaggaacagcaagtctgcatggctgttgacataggcagacatcggtgggatcaagtgaaaaaggaggaccaagaggcaacaggtcccaggctcagcagggagctgctggctgagaaagagcctgaagtcttgcaggactcactggatagatgttattcgactccttcaggttatcttgaactgcctgacttaggccagccctacagaagtgctgtttactcattggaggaacagtaccttggcttggctcttgacgtggacagaattaaaaaggaccaagaagaggaagaagaccaaggcccaccatgccccaggctcagcagggagctgctggaggtagtagagcctgaagtcttgcaggactcactggatagatgttattcaactccttccagttgtcttgaacagcctgactcctgccagccctacagaagttccttttatgcattggaggaaaaacatgttggcttttctcttgacgtgggagaaattgaaaagaaggggaaggggaagaaaagaaggggaagaagatcaaagaagaaaagaagaaggggaagaaaagaaggggaagaagatcaaaacccaccatgccccaggctcaacagcgtgctgatggaagtggaagagcctgaagtcttgcaggactcactggatagatgttattcgactccatcaatgtactttgaactacctgactcattccagcactacagaagtgtgttttactcatttgaggaacagcacatcacctttgcccttgacatggacaatagcttttttactttgacggtgacaagtctccacctggtcttccagatgggagtcatattcccacaataagcagcccttactaagccgagaggttt

SEQ ID NO: 158721 - DNA, 5594 bp, Homo sapiens
  Payload ID: 11056
  Gene Symbol: NBPF12
  Gene Name: neuroblastoma breakpoint family, member 12
  ENST ID: ENST00000611443
  CDS Start-End: 435-4076
attctttcagaaatgtgattgataacagtaaagccacactcctcaagtgcctgaaatacccctcattgtcttcttcaggtggcaagggctctggaacagccacataaagcccttgaagataaggatggtcaaacaaaataatatcatacctggagaaactcagatcttgctaagatttactggttgggaatccaaagttaatgccaagaagcagctgccagttgggatcaaatgtgagcctatggatcaagacggttacctggcacgctggccacaatctacctcactcttatcagagtctgagcagtgctttcagctctgagttgaggcacctcgaaccttgtttttgtggtgaaggatcctaaagtgctgtggggagtgatcacatttttcacaacatccctgactccacctcttctgccacaaacgtcagcatggtggtatcagccggcccttggtccagcgagaaggcagagatgaacattctagaaatcaacgagaaattgcgcccccagttggcagagaacaaacagcagttcagaaacctcaaagagagatgttttctaactcaactggccggcttcctggccaaccgacagaagaaatacaagtatgaagagtgtaaagacctcataaaatttatgctgaggaatgagcgacagttcaaggaggagaagcttgcagagcagctgaaacaagctgaggagctcaggcaatataaagtcctggttcactctcaggaacgagagctgacccagttaagggagaagttacgggaagggagagatgcctcccgctcattgaatgagcatctccaggccctcctcactccggatgagccggacaagtcccaggggcaggacctccaagaacagctggctgaggggtgtagactggcacagcaacttgtccaaaagctcagcccagaaaatgatgaagatgaggatgaagatgttcaagttgaggaggatgagaaagtactggaatcatctgcccccagggaggtgcagaaggctgaagagagcaaagtccctgaggactcactggaggaatgtgccatcacttgttcaaatagccacggcccttgtgactccatccagcctcacaagaacatcaaaatcacatttgaggaagacaaagtcaactcaactgtggttgtagacagaaaatcctctcatgatgaatgtcaggatgctctaaacattctcccagtccctggccccacctcttctgccacaaacgtcagcatggtggtatcagccggccctttgtccagcgagaaggcagagatgaacattctagaaatcaatgagaagttgcgcccccagctggcagagaagaaacagcagttcagaagcctcaaagagaaatgttttgtaactcaactggccggcttcctggccaagcagcagaacaaatacaaatatgaagagtgcaaagacctcataaaatctatgctgaggaatgagctacagttcaaggaggagaagcttgcagagcagctgaagcaagctgaggagctcaggcaatataaagtcctggttcactctcaggaacgagagctgacccagttaagggagaagttacgggaagggagagatgcctcccgctcattgaatgagcatctccaggccctcctcactccggatgagccggacaagtcccaggggcaggacctccaagaacagctggctgaggggtgtagactggcacagcaccttgtccaaaagctcagcccagaaaatgatgaagatgaggatgaagatgttcaagttgaggaggatgagaaagtgctggaatcatcttcccccagggagatgcagaaggctgaagaaagcaaagtccctgaggactcactggaggaatgtgccatcacttgttcaaatagccacggcccttgtgactccaaccagcctcacaagaacatcaaaatcacatttgaggaagacaaagtcaactcatctctggttgtagacagagaatcctctcatgatgaatgtcaggatgctctaaacattctcccagtccctggccccacctcttctgccacaaacgtcagcatggtggtatcagccggccctttgtccagcgagaaggcagagatgaacattctagaaatcaatgagaagttgcgcccccagctggcagagaagaaacagcagttcagaagcctcaaagagaaatgttttgtaactcaagtggcctgcttcctggccaagcagcagaacaaatacaaatatgaagagtgcaaagacctcctaaaatctatgctgaggaatgagctacagttcaaggaggagaagcttgcagagcagctgaagcaagctgaggagctcaggcaatataaagtcctggttcactctcaggaacgagagctgacccagttaagggagaagttacgggaagggagagatgcctcccgctcattgaatgagcatctccaggccctcctcactccggatgagccggacaagtcccaggggcaggacctccaagaacagctggctgaggggtgtagactggcacaacaccttgtccaaaagctcagcccagaaaatgataacgatgacgatgaagatgttcaagttgaggtggctgagaaagtgcagaaatcgtcttcccccagggagatgcagaaggctgaagaaaaggaagtccctgaggactcactggaggagtgtgccatcacttgttcaaatagccatggcccttatgactccaaccagccacataggaaaaccaaaatcacatttgaggaagacaaagtcgactcaactctcattggctcatcctctcatgttgaatgggaggatgctgtacacattatcccagaaaatgaaagtgatgatgaggaagaggaagaaaaagggccagtgtctcccaggaatctgcaggagtctgaagaggaggaagtcccccaggagtcctgggatgaaggttattcgactctctcaattcctcctgaaaggttggcctcataccagtcttacagcagcacatttcactcattagaggaacagcaagtctgcatggctgttgacataggcagacatcggtgggatcaagtgaaaaaggaggaccaagaggcaacaggtcccaggctcagcagggagctgctggctgagaaagagcctgaagtcttgcaggactcactggatagatgttattcaactccttcagtttatcttggactgactgactcatgccagccctacagaagtgccttttacgtattggagcaacagcgtgttggcttggctgttgacatggatgaaattgaaaagtaccaagaagtggaagaagaccaagacccatcatgccccaggctcagcagggagctgctggctgagaaagagcctgaagtcttgcaggactcactggatagatgttattcgactccttcaggttatcttgaactgcctgacttaggccagccctacagaagtgctgtttactcattggaggaacagtaccttggcttggctcttgacgtggacagaattaaaaaggaccaagaagaggaagaagaccaaggcccaccatgccccaggctcagcagggagctgctggaggtagtagagcctgaagtcttgcaggactcactggatagatgttattcaactccttccagttgtcttgaacagcctgactcctgccagccctacagaagttccttttatgcattggaggaaaaacatgttggcttttctcttgacgtgggagaaattgaaaagaaggggaaggggaagaaaagaaggggaagaagatcaaagaagaaaagaagaaggggaagaaaagaaggggaagaagatcaaaacccaccatgccccaggctcaacagcgtgctgatggaagtggaagagcctgaagtcttgcaggactcactggatagatgttattcgactccatcaatgtactttgaactacctgactcattccagcactacagaagtgtgttttactcatttgaggaacagcacatcacctttgcccttgacatggacaatagcttttttactttgacggtgacaagtctccacctggtcttccagatgggagtcatattcccacaataagcagcccttactaagccgagaggtttcattcctgcaggcaggacctataggcacctgaagatttgaatgaaactatagttccatttggaagcccagacataggatgggtcagtgggcatggctctattcctattctcagagcatgccagtggcaacctgtgctcagtctgaagacaatggacccacgttaggtgtgacacgttcacataactgtgcagcacatgccgggagtgatcagccggacattttaatttgaaccatgtatctctgggtagctacaaaattcctcagggatttcattttgcaggcatgtctctgagcttctatacctactcaaggtcagtgtcatctttgtgtttagttcatccaaaggtgttaccctggtttcaatgaacctaacctcattatttgtgtcttcagtgttggcttgttttagctgatccatctgtaacacaggagggatccttggctgaggattgtatttcagaaccaccaactgctcttgacaattgttaacccactaggctcctttggttagagaagccacagtccttcagcctccaattggtgtcagtacttaggaagaccacagctagatggacaaacagcattgggaggccttagccctgctcctctcaattccatcctgtagagaacaggagtcaggagccgctggcaggagacagcatgtcacccaggactctgccggtgcagaatatgagcaatgccatgttcttgcagaaaacgcttagcctgagtttcataggaggtaatcaccagacaactgcagaatgtagaacactgagcaggacaactgacctgtctccttcacatagtccatatcaccacaaatcacacaacaaaaaggagaagagatattttgggttgaaaaaaagtaaaaagataatgtagctgcatttctttagttattttgaaccccaaatatttcctcatctttttgttgttgtcattgatggtggtgacatggacttgtttatagaggacaggtcagctctctggctcaatgatctacattctgaagttgtctgaaaatgtcttcatgattaaattcagcctaaactttttgctgggaacactgcagagacaatgctgtgagtttccaacctcagcccatctgcgggcagagaaggtctagtttgtccatcaccattatgatatcaggactggttacttggttaaggaggggtctaggagatctgtcccttttagagacaccttacttataatgaagtacttgggaaagcggttttcaagagtataaatatcctgtattctaatgatcatcctctaaacattttatcatttattaatcctccctgcctgtgtctattattatatacatatctctacgctgcaaattttgggtctcaatttttactgtgcctttgtttttactagtgtctgctgttgcaaaaagaagaaaacattctctgcctgagttttaatttttgtccaaagttaattttaatctatacaattaaaaccttttgcctatca

SEQ ID NO: 158722 - DNA, 2051 bp, Homo sapiens
  Payload ID: 11056
  Gene Symbol: NBPF12
  Gene Name: neuroblastoma breakpoint family, member 12
  ENST ID: ENST00000617864
  CDS Start-End: 174-1073
aaagtgctgtggggagtgatcacatttttcacaacagtaagttaagaatttcagttactgacatccctcagtcctgattaaacctatttgatttcaccagtttttaacccatcatatgtttgggtttcttctccccagtccctgactccacctcttctgccacaaacgtcagcatggtggtatcagccggcccttggtccagcgagaaggcagagatgaacattctagaaatcaacgagaaattgcgcccccagctggcagagaagaaacagcagttcagaagcctcaaagagaaatgttttgtaactcaactggccggcttcctggccaagcagcagaacaaatacaaatatgaagagtgcaaagacctcataaaatctatgctgaggaatgagctacagttcaaggaggagaagcttgcagagcagctgaagcaagctgaggagctcaggcaatataaagtcctggttcactctcaggaacgagagctgacccagttaagggagaagttacgggaagggagagatgcctcccgctcattgaatgagcatctccaggccctcctcactccggatgagccggacaagtcccaggggcaggacctccaagaacagctggctgaggggtgtagactggcacagcaccttgtccaaaagctcagcccagaaaatgataacgatgacgatgaagatgttcaagttgaggtggctgagaaagtgcagaaatcgtcttcccccagggagatgcagaaggctgaagaaaaggaagtccctgaggactcactggaggagtgtgccatcacttgttcaaatagccatggcccttatgactccaaccagccacataggaaaaccaaaatcacatttgaggaagacaaagtcgactcaactctcattggctcatcctctcatgttgaatgggaggatgctgtacacattatcccagaaaatgaaagtgatgatgaggaagaggaagaaaaagggccagtgtctcccaggacatcggtgggatcaagtgaaaaaggaggaccaagaggcaacaggtcccaggctcagcagggagctgctggctgagaaagagcctgaagtcttgcaggactcactggatagatgttattcaactccttcagtttatcttggactgactgactcatgccagccctacagaagtgccttttacgtattggagcaacagcgtgttggcttggctgttgacatggatgaaattgaaaagtaccaagaagtggaagaagaccaagacccatcatgccccaggctcagcagggagctgctggctgagaaagagcctgaagtcttgcaggactcactggatagatgttattcgactccttcaggttatcttgaactgcctgacttaggccagccctacagaagtgctgtttactcattggaggaacagtaccttggcttggctcttgacgtggacagaattaaaaaggaccaagaagaggaagaagaccaaggcccaccatgccccaggctcagcagggagctgctggaggtagtagagcctgaagtcttgcaggactcactggatagatgttattcaactccttccagttgtcttgaacagcctgactcctgccagccctacagaagttccttttatgcattggaggaaaaacatgttggcttttctcttgacgtgggagaaattgaaaagaaggggaaggggaagaaaagaaggggaagaagatcaaagaagaaaagaagaaggggaagaaaagaaggggaagaagatcaaaacccaccatgccccaggctcaacagcgtgctgatggaagtggaagagcctgaagtcttgcaggactcactggatagatgttattcgactccatcaatgtactttgaactacctgactcattccagcactacagaagtgtgttttactcatttgaggaacagcacatcacctttgcccttgacatggacaatagcttttttactttgacggtgacaagtctccacctggtcttccagatgggagtcatattcccacaataagcagcccttactaagccgagaggttt

SEQ ID NO: 158723 - DNA, 6326 bp, Homo sapiens
  Payload ID: 11056
  Gene Symbol: NBPF12
  Gene Name: neuroblastoma breakpoint family, member 12
  ENST ID: ENST00000617844
  CDS Start-End: 435-4808
attctttcagaaatgtgattgataacagtaaagccacactcctcaagtgcctgaaatacccctcattgtcttcttcaggtggcaagggctctggaacagccacataaagcccttgaagataaggatggtcaaacaaaataatatcatacctggagaaactcagatcttgctaagatttactggttgggaatccaaagttaatgccaagaagcagctgccagttgggatcaaatgtgagcctatggatcaagacggttacctggcacgctggccacaatctacctcactcttatcagagtctgagcagtgctttcagctctgagttgaggcacctcgaaccttgtttttgtggtgaaggatcctaaagtgctgtggggagtgatcacatttttcacaacatccctgactccacctcttctgccacaaacgtcagcatggtggtatcagccggcccttggtccagcgagaaggcagagatgaacattctagaaatcaacgagaaattgcgcccccagttggcagagaacaaacagcagttcagaaacctcaaagagagatgttttctaactcaactggccggcttcctggccaaccgacagaagaaatacaagtatgaagagtgtaaagacctcataaaatttatgctgaggaatgagcgacagttcaaggaggagaagcttgcagagcagctgaaacaagctgaggagctcaggcaatataaagtcctggttcactctcaggaacgagagctgacccagttaagggagaagttacgggaagggagagatgcctcccgctcattgaatgagcatctccaggccctcctcactccggatgagccggacaagtcccaggggcaggacctccaagaacagctggctgaggggtgtagactggcacagcaacttgtccaaaagctcagcccagaaaatgatgaagatgaggatgaagatgttcaagttgaggaggatgagaaagtactggaatcatctgcccccagggaggtgcagaaggctgaagagagcaaagtccctgaggactcactggaggaatgtgccatcacttgttcaaatagccacggcccttgtgactccatccagcctcacaagaacatcaaaatcacatttgaggaagacaaagtcaactcaactgtggttgtagacagaaaatcctctcatgatgaatgtcaggatgctctaaacattctcccagtccctggccccacctcttctgccacaaacgtcagcatggtggtatcagccggccctttgtccagcgagaaggcagagatgaacattctagaaatcaatgagaagttgcgcccccagctggcagagaagaaacagcagttcagaagcctcaaagagaaatgttttgtaactcaactggccggcttcctggccaagcagcagaacaaatacaaatatgaagagtgcaaagacctcataaaatctatgctgaggaatgagctacagttcaaggaggagaagcttgcagagcagctgaagcaagctgaggagctcaggcaatataaagtcctggttcactctcaggaacgagagctgacccagttaagggagaagttacgggaagggagagatgcctcccgctcattgaatgagcatctccaggccctcctcactccggatgagccggacaagtcccaggggcaggacctccaagaacagctggctgaggggtgtagactggcacagcaccttgtccaaaagctcagcccagaaaatgatgaagatgaggatgaagatgttcaagttgaggaggatgagaaagtgctggaatcatcttcccccagggagatgcagaaggctgaagaaagcaaagtccctgaggactcactggaggaatgtgccatcacttgttcaaatagccacggcccttgtgactccaaccagcctcacaagaacatcaaaatcacatttgaggaagacaaagtcaactcatctctggttgtagacagagaatcctctcatgatgaatgtcaggatgctctaaacattctcccagtccctggccccacctcttctgccacaaacgtcagcatggtggtatcagccggccctttgtccagcgagaaggcagagatgaacattctagaaatcaatgagaagttgcgcccccagctggcagagaagaaacagcagttcagaagcctcaaagagaaatgttttgtaactcaagtggcctgcttcctggccaagcagcagaacaaatacaaatatgaagagtgcaaagacctcctaaaatctatgctgaggaatgagctacagttcaaggaggagaagcttgcagagcagctgaagcaagctgaggagctcaggcaatataaagtcctggttcactctcaggaacgagagctgacccagttaagggagaagttacgggaagggagagatgcctcccgctcattgaatgagcatctccaggccctcctcactccggatgagccggacaagtcccaggggcaggacctccaagaacagctggctgaggggtgtagactggcacaacaccttgtccaaaagctcagcccagaaaatgataacgatgacgatgaagatgttcaagttgaggtggctgagaaagtgcagaaatcgtcttcccccagggagatgcagaaggctgaagaaaaggaagtccctgaggactcactggaggagtgtgccatcacttgttcaaatagccatggcccttatgactccaaccagccacataggaaaaccaaaatcacatttgaggaagacaaagtcgactcaactctcattggctcatcctctcatgttgaatgggaggatgctgtacacattatcccagaaaatgaaagtgatgatgaggaagaggaagaaaaagggccagtgtctcccaggaatctgcaggagtctgaagaggaggaagtcccccaggagtcctgggatgaaggttattcgactctctcaattcctcctgaaaggttggcctcataccagtcttacagcagcacatttcactcattagaggaacagcaagtctgcatggctgttgacataggcagacatcggtgggatcaagtgaaaaaggaggaccaagaggcaacaggtcccaggctcagcagggagctgctggctgagaaagagcctgaagtcttgcaggactcactggatagatgttattcaactccttcagtttatcttggactgactgactcatgccagccctacagaagtgccttttacgtattggagcaacagcgtgttggcttggctgttgacatggatgaaattgaaaagtaccaagaagtggaagaagaccaagacccatcatgccccaggctcagcagggagctgctggctgagaaagagcctgaagtcttgcaggactcactggatagatgttattcgactccttcaggttatcttgaactgcctgacttaggccagccctacagaagtgctgtttactcattggaggaacagtaccttggcttggctcttgacgtggacagaattaaaaaggaccaagaagaggaagaagaccaaggcccaccatgccccaggctcagcagggagctgctggaggtagtagagcctgaagtcttgcaggactcactggatagatgttattcaactccttccagttgtcttgaacagcctgactcctgccagccctacagaagttccttttatgcattggaggaaaaacatgttggcttttctcttgacgtgggagaaattgaaaagaaggggaaggggaagaaaagaaggggaagaagatcaaagaagaaaagaagaaggggaagaaaagaaggggaagaagatcaaaacccaccatgccccaggctcagcagggagctgctggctgagaaagagcctgaagtcttgcaggactcactggatagatggtattcgactccttcagtttatcttggactgactgacccatgccagccctacagaagtgccttttacgtattggagcaacagcgtgttggcttggctgttgacatggatgaaattgaaaagtaccaagaagtggaagaagaccaagacccatcatgccccaggctcagcagggagctgctggctgagaaagagcctgaagtcttgcaggactcactggatagatgttattcgactccttcaggttatcttgaactgcctgacttaggccagccctacagaagtgctgtttactcattggaggaacagtaccttggcttggctcttgacgtggacagaattaaaaaggaccaagaagaggaagaagaccaaggcccaccatgccccaggctcagcagggagctgctggaggtagtagagcctgaagtcttgcaggactcactggatagatgttattcaactccttccagttgtcttgaacagcctgactcctgccagccctacagaagttccttttatgcattggaggaaaaacatgttggcttttctcttgacgtgggagaaattgaaaagaaggggaaggggaagaaaagaaggggaagaagatcaaagaagaaaagaagaaggggaagaaaagaaggggaagaagatcaaaacccaccatgccccaggctcaacagcgtgctgatggaagtggaagagcctgaagtcttgcaggactcactggatagatgttattcgactccatcaatgtactttgaactacctgactcattccagcactacagaagtgtgttttactcatttgaggaacagcacatcacctttgcccttgacatggacaatagcttttttactttgacggtgacaagtctccacctggtcttccagatgggagtcatattcccacaataagcagcccttactaagccgagaggtttcattcctgcaggcaggacctataggcacctgaagatttgaatgaaactatagttccatttggaagcccagacataggatgggtcagtgggcatggctctattcctattctcagagcatgccagtggcaacctgtgctcagtctgaagacaatggacccacgttaggtgtgacacgttcacataactgtgcagcacatgccgggagtgatcagccggacattttaatttgaaccatgtatctctgggtagctacaaaattcctcagggatttcattttgcaggcatgtctctgagcttctatacctactcaaggtcagtgtcatctttgtgtttagttcatccaaaggtgttaccctggtttcaatgaacctaacctcattatttgtgtcttcagtgttggcttgttttagctgatccatctgtaacacaggagggatccttggctgaggattgtatttcagaaccaccaactgctcttgacaattgttaacccactaggctcctttggttagagaagccacagtccttcagcctccaattggtgtcagtacttaggaagaccacagctagatggacaaacagcattgggaggccttagccctgctcctctcaattccatcctgtagagaacaggagtcaggagccgctggcaggagacagcatgtcacccaggactctgccggtgcagaatatgagcaatgccatgttcttgcagaaaacgcttagcctgagtttcataggaggtaatcaccagacaactgcagaatgtagaacactgagcaggacaactgacctgtctccttcacatagtccatatcaccacaaatcacacaacaaaaaggagaagagatattttgggttgaaaaaaagtaaaaagataatgtagctgcatttctttagttattttgaaccccaaatatttcctcatctttttgttgttgtcattgatggtggtgacatggacttgtttatagaggacaggtcagctctctggctcaatgatctacattctgaagttgtctgaaaatgtcttcatgattaaattcagcctaaactttttgctgggaacactgcagagacaatgctgtgagtttccaacctcagcccatctgcgggcagagaaggtctagtttgtccatcaccattatgatatcaggactggttacttggttaaggaggggtctaggagatctgtcccttttagagacaccttacttataatgaagtacttgggaaagcggttttcaagagtataaatatcctgtattctaatgatcatcctctaaacattttatcatttattaatcctccctgcctgtgtctattattatatacatatctctacgctgcaaattttgggtctcaatttttactgtgcctttgtttttactagtgtctgctgttgcaaaaagaagaaaacattctctgcctgagttttaatttttgtccaaagttaattttaatctatacaattaaaaccttttgcctatca

SEQ ID NO: 158724 - DNA, 2931 bp, Homo sapiens
  Payload ID: 11057
  Gene Symbol: NBPF14
  Gene Name: neuroblastoma breakpoint family, member 14
  ENST ID: ENST00000581201
  CDS Start-End: 77-2905
aaagtgctgtggggagtgatcacatttttcacaacagtaagtccctgactccacctcttctgccacaaacgtcagcatggtggtatcagccggcccttggtccagtgagaaggcagagatgaacattctagaaatcaacgagacattgcgcccccagctggcagagaagaaacagcagttcagaaacctcaaagagaaatgttttctaactcaactggccggcttcctggccaaccaacagaagaaatacaagtatgaagagtgtaaagacctcataaaatttatgctgaggaatgagcgacagttcaaggaggagaagcttgcagagcagctgaagcaagctgaggagctcaggcaatataaagtcctggttcactctcaggaacgagagctgacccagctaagggagaagttacgggaagggagagatgcctcccgctcattgtatgagcatctccaggccctcctcactccgtatgagccggacaagtcccaggggcaggacctccaagaacagctggctgaggggtgtagactggcacagcaccttgtccaaaagctcagcccagaaaatgacgaagatgaggatgaagatgttcaagttgaggaggctgagaaagtactggaatcatctgcccccagggaggtgcagaaggctgaagagagcaaagtccctgaggactcactggaggaatgtgccatcacttgttcaaatagccacggcccttgtgactccaaccagcctcacaagaacatcaaaatcacatttgaggaagacgaagtcaactcaactctggttgtagacagagaatcctctcatgatgaatgtcaggatgctctaaacattctcccagtccctggccccacctcttctgccacaaacgtcagcatggtggtatcagccggccctttgtccagcgagaaggcagagatgaacattctagaaatcaatgagaaattgcgcccccagctggcagagaagaaacagcagttcagaaacctcaaagagaaatgttttctaactcaactgtccggcttcctggccaaccaacagaagaaatacaaatatgaagagtgcaaagacctcataaaatttatgctgaggaatgagcgacagttcaaggaggagaagcttgcggagcagctgaagcaagctgaggagctcaggcaatataaagtcctggttcacgctcaggaacgagagctgacccagttaagggagaagttgcgggaagggagagatgcctcccgctcattgaatgagcatctccaggccctcctcactccggatgagccggacaagtcccaggggcaggacctccaagaacagctggctgaggggtgtagactggcacagcaccttgtccaaaagctcagcccagaaaatgacaacgatgacgatgaagatgttcaagttgaggtggctgagaaagtgcagaaatcgtctgcccccagggagatgcagaaggctgaagaaaaggaagtccctgaggactcactggaggaatgtgccatcacttattcaaatagccatggctcttatgactccaaccagccacataggaaaaccaaaatcacatttgaggaagacaaagtcgactcaactctcattggctcatcctctcatgttgaatgggaggatgctgtacacattattccagaaaatgaaagtgatgatgaggaagaggaagaaaaagggccagtgtctcccaggaatctgcaggagtctgaagaggaggaagtcccccaggagtcctgggatgaaggttattcgactctctcaattcctcctgaaatgttggcctcgtaccagtcttacagcagcacatttcactcattagaggaacagcaagtctgcatggctgttgacataggcagacatcggtgggatcaagtgaaaaaggaggaccaagaggcaacaggtcccaggctcagcagggagctgctggatgagaaagggcctgaagtcttgcaggactcactggatagatgttattcaactccttcaggttgtcttgaactgactgactcatgccagccctacagaagtgccttttatgtattggagcaacagcgtgttggcttggctgttgacatggatgaaattgaaaagtaccaagaagtggaagaagaccaagacccatcatgccccaggctcagcagggagctgctggatgagaaagagcctgaagtcttgcaggactcactggatagatgttattcgactccttcaggttatcttgaactgcctgacttaggccagccctacagcagtgctgtttactcattggaggaacagtaccttggcttggctcttgacgtggacagaattaaaaaggaccaagaagaggaagaagaccaaggcccaccatgccccaggctcagcagggagctgctggaggtagtagagcctgaagtcttgcaggactcactggatagatgttattcaactccttccagttgtcttgaacagcctgactcctgccagccctatggaagttccttttatgcattggaggaaaaacatgttggcttttctcttgacgtgggagaaattgaaaagaaggggaaggggaagaaaagaaggggaagaagatcaaagaaggaaagaagaaggggaagaaaagaaggggaagaagatcaaaacccaccatgccccaggctcaacggcgtgctgatggaagtggaagagcgtgaagtcttacaggactcactggatagatgttattcgactccgtcaatgtactttgaactacctgactcattccagcactacagaagtgtgttttactcatttgaggaacagcacatcagcttcgccctttacgtggacaataggttttttactttgacggtgacaagtctccacctggtgttccagatgggagtcatattcccacaataagcagcccttagtaatccgagagatgt

SEQ ID NO: 158725 - DNA, 1082 bp, Homo sapiens
  Payload ID: 11057
  Gene Symbol: NBPF14
  Gene Name: neuroblastoma breakpoint family, member 14
  ENST ID: ENST00000593495
  CDS Start-End: 288-1037
gtttcagccaaacttcgggcggctgaggcggcggccgaggagcggcggactccgggcgcggggagtcgaggcatttgcgcctgggcttcggagcgtagcgccagggcctgagcctttgaagcaggaggaggggaggagagagtggggctcctctatcgggaccccctccccatgtggatctgcccaggcggcggcggcggaggaggcgaccgagaagatgcccgccctgcgccccgctctgctgtgggcgctgctggcgctctggctgtgctgcgcgacccccgcgcatgtgtcgagatggctatgaaccctgtgtaaatgaaggaatgtgtgttacctaccacaatggcacaggatactgcaaatgtccagaaggcttcttgggggaatattgtcaacatcgagacccctgtgagaagaaccgctgccagaatggtgggacttgtgtggcccaggccatgctggggaaagccacgtgccgatgtgcctcagggtttacaggagaggactgccaatactcgacatctcatccatgctttgtgtctcgaccttgcctgaatggcggcacatgccatatgctcagccgggatacctatgagtgcacctgtcaagtcgggtttacaggtaaggagtgccaatggaccgatgcctgcctgtctcatccctgtgcaaatggaagtacctgtaccactgtggccaaccagttctcctgcaaatgcctcacaggcttcacagggcagaagtgtgagactgatgtcaatgagtgtgacattccaggacactgccagcatggtggcatctgcctcaacctgcctggttcctaccagtgccagtgccttcagggcttcacaggccagtactgtgacagcctgtatgtgccctgtgcaccctcgccttgtgtcaatggaggcacctgtcggcagactggtgacttcacttttgagtgcaactgccttccagaaacagtgagaagaggaacagagctctgggaaagagacagggaagtctggaatggaaaagaacacgatgagaattagacactggaaaatatgtatgtgtggttaataaagtgctttaaactg

SEQ ID NO: 158726 - DNA, 1370 bp, Homo sapiens
  Payload ID: 11057
  Gene Symbol: NBPF14
  Gene Name: neuroblastoma breakpoint family, member 14
  ENST ID: ENST00000606877
  CDS Start-End: 1140-1370
aaacttcgggcggctgaggcggcggccgaggagcggcggactccgggcgcggggagtcgaggcatttgcgcctgggcttcggagcgtagcgccagggcctgagcctttgaagcaggaggaggggaggagagagtggggctcctctatcgggaccccctccccatgtggatctgcccaggcggcggcggcggaggaggcgaccgagaagatgcccgccctgcgccccgctctgctgtgggcgctgctggcgctctggctgtgctgcgcgacccccgcgcatgtgtcgagatggctatgaaccctgtgtaaatgaaggaatgtgtgttacctaccacaatggcacaggatactgcaaatgtccagaaggcttcttgggggaatattgtcaacatcgagacccctgtgagaagaaccgctgccagaatggtgggacttgtgtggcccaggccatgctggggaaagccacgtgccgatgtgcctcagggtttacaggagaggactgccaatactcgacatctcatccatgctttgtgtctcgaccttgcctgaatggcggcacatgccatatgctcagccgggatacctatgagtgcacctgtcaagtcgggtttacaggtaaggagtgccaatggaccgatgcctgcctgtctcatccctgtgcaaatggaagtacctgtaccactgtggccaaccagttctcctgcaaatgcctcacaggcttcacagggcagaagtgtgagactgatgtcaatgagtgtgacattccaggacactgccagcatggtggcatctgcctcaacctgcctggttcctaccagtgccagtgccttcagggcttcacaggccagtactgtgacagcctgtatgtgccctgtgcaccctcgccttgtgtcaatggaggcacctgtcggcagactggtgacttcacttttgagtgcaactgccttccagcaacatggccaatctttcctaagctgctcagcttacaagaaaaggaatcatactgctaagaattcaaacttcagcagtcatagggagccttgggaggaccccgaatcactgatggaattgcgcagtgcatggagatggctcagcaggatgaggtccctgactccacctcttctgccacaaacgtcagcatggtggtatcagccggcccttggtccagtgagaaggcagagatgaacattctagaaatcaacgagacattgcgcccccagctggcagagaagaaacagcagttcagaaacctcaaagagaaatgttttctaactcaactggccggcttcctggccaaccaacagaagaaatacaagtatgaagagtgtaaagacctcataaaatttatgctgaggaatgagcgacagttc

SEQ ID NO: 158727 - DNA, 2051 bp, Homo sapiens
  Payload ID: 11057
  Gene Symbol: NBPF14
  Gene Name: neuroblastoma breakpoint family, member 14
  ENST ID: ENST00000614329
  CDS Start-End: 174-1073
aaagtgctgtggggagtgatcacatttttcacaacagtaagttaagaatttcagttactgacatccctcagtcctgattaaaccgatttgatttcaccagtttttaacccatcatatgtttgggtttcttctccccagtccctgactccacctcttctgccacaaacgtcagcatggtggtatcagccggccctttgtccagcgagaaggcagagatgaacattctagaaatcaatgagaaattgcgcccccagctggcagagaagaaacagcagttcagaaacctcaaagagaaatgttttctaactcaactgtccggcttcctggccaaccaacagaagaaatacaaatatgaagagtgcaaagacctcataaaatttatgctgaggaatgagcgacagttcaaggaggagaagcttgcggagcagctgaagcaagctgaggagctcaggcaatataaagtcctggttcacgctcaggaacgagagctgacccagttaagggagaagttgcgggaagggagagatgcctcccgctcattgaatgagcatctccaggccctcctcactccggatgagccggacaagtcccaggggcaggacctccaagaacagctggctgaggggtgtagactggcacagcaccttgtccaaaagctcagcccagaaaatgacaacgatgacgatgaagatgttcaagttgaggtggctgagaaagtgcagaaatcgtctgcccccagggagatgcagaaggctgaagaaaaggaagtccctgaggactcactggaggaatgtgccatcacttattcaaatagccatggctcttatgactccaaccagccacataggaaaaccaaaatcacatttgaggaagacaaagtcgactcaactctcattggctcatcctctcatgttgaatgggaggatgctgtacacattattccagaaaatgaaagtgatgatgaggaagaggaagaaaaagggccagtgtctcccaggacatcggtgggatcaagtgaaaaaggaggaccaagaggcaacaggtcccaggctcagcagggagctgctggatgagaaagggcctgaagtcttgcaggactcactggatagatgttattcaactccttcaggttgtcttgaactgactgactcatgccagccctacagaagtgccttttatgtattggagcaacagcgtgttggcttggctgttgacatggatgaaattgaaaagtaccaagaagtggaagaagaccaagacccatcatgccccaggctcagcagggagctgctggatgagaaagagcctgaagtcttgcaggactcactggatagatgttattcgactccttcaggttatcttgaactgcctgacttaggccagccctacagcagtgctgtttactcattggaggaacagtaccttggcttggctcttgacgtggacagaattaaaaaggaccaagaagaggaagaagaccaaggcccaccatgccccaggctcagcagggagctgctggaggtagtagagcctgaagtcttgcaggactcactggatagatgttattcaactccttccagttgtcttgaacagcctgactcctgccagccctatggaagttccttttatgcattggaggaaaaacatgttggcttttctcttgacgtgggagaaattgaaaagaaggggaaggggaagaaaagaaggggaagaagatcaaagaaggaaagaagaaggggaagaaaagaaggggaagaagatcaaaacccaccatgccccaggctcaacggcgtgctgatggaagtggaagagcgtgaagtcttacaggactcactggatagatgttattcgactccgtcaatgtactttgaactacctgactcattccagcactacagaagtgtgttttactcatttgaggaacagcacatcagcttcgccctttacgtggacaataggttttttactttgacggtgacaagtctccacctggtgttccagatgggagtcatattcccacaataagcagcccttagtaatccgagagatgt

SEQ ID NO: 158728 - DNA, 3670 bp, Homo sapiens
  Payload ID: 11057
  Gene Symbol: NBPF14
  Gene Name: neuroblastoma breakpoint family, member 14
  ENST ID: ENST00000621066
  CDS Start-End: 18-2783
aagacctcataaaatttatgctgaggaatgagcgacagttcaaggaggagaagcttgcagagcagctgaagcaagctgaggagctcaggcaatataaagtcctggttcacgctcaggaacgagagctgacccagttaagggagaagttgcgggaagggagagatgcctcccgctcattgaatgagcatctccaggccctcctcactccggatgagccggacaagtcccaggggcaggacctccaagaacagctggctgaggggtgtagactggcacagcaccttgtccaaaagctcagcccagaaaatgacaacgatgacgatgaagatgttcaagttgaggtggctgagaaagtgcagaaatcgtctgcccccagggagatgcagaaggctgaagaaaaggaagtccctgaggactcactggaggaatgtgccatcacttattcaaatagccatggctcttatgactccaaccagccacataggaaaaccaaaatcacatttgaggaagacaaagtcgactcaactctcattggctcatcctctcatgttgaatgggaggatgctgtacacattattccagaaaatgaaagtgatgatgaggaagaggaagaaaaagggccagtgtctcccaggaatctgcaggagtctgaagaggaggaagtcccccaggagtcctgggatgaaggttattcgactctctcaattcctcctgaaatgttggcctcgtaccagtcttacagcagcacatttcactcattagaggaacagcaagtctgcatggctgttgacataggcagacatcggtgggatcaagtgaaaaaggaggaccaagaggcaacaggtcccaggctcagcagggagctgctggatgagaaagggcctgaagtcttgcaggactcactggatagatgttattcaactccttcaggttgtcttgaactgactgactcatgccagccctacagaagtgccttttatgtattggagcaacagcgtgttggcttggctgttgacatggatgaaattgaaaagtaccaagaagtggaagaagaccaagacccatcatgccccaggctcagcagggagctgctggatgagaaagagcctgaagtcttgcaggactcactggatagatgttattcgactccttcaggttatcttgaactgcctgacttaggccagccctacagcagtgctgtttactcattggaggaacagtaccttggcttggctcttgacgtggacagaattaaaaaggacgaagaagaggaagaagaccaagacccaccatgccccaggctcagcagggagctgctggaggtagtagagcctgaagtcttgcaggactcactggatagatgttattcaactccttccagttgtcttgaacagcctgactcctgccagccctatggaagttccttttatgcattggaggaaaaacatgttggcttttctcttgacgtgggagaaattgaaaagaaggggaaggggaagaaaagaaggggaagaagatcaaagaaggaaagaagaaggggaagaaaagaaggggaagaagatcaaaacccaccatgccccaggctcagcagggagctgctggatgagaaagggcctgaagtcttgcaggactcactggatagatgttattcaactccttcaggttgtcttgaactgactgactcatgccagccctacagaagtgccttttatgtattggagcaacagcgtgttggcttggctgttgacatggatgaaattgaaaagtaccaagaagtggaagaagaccaagacccatcatgccccaggctcagcagggagctgctggatgagaaagggcctgaagtcttgcaggactcactggatagatgttattcaactccttcaggttgtcttgaactgactgactcatgccagccctacagaagtgccttttatgtattggagcaacagcgtgttggcttggctgttgacatggatgaaattgaaaagtaccaagaagtggaagaagaccaagacccatcatgccccaggctcagcagggagctgctggatgagaaagagcctgaagtcttgcaggactcactggatagatgttattcgactccttcaggttatcttgaactgcctgacttaggccagccctacagcagtgctgtttactcattggaggaacagtaccttggcttggctcttgacgtggacagaattaaaaaggaccaagaagaggaagaagaccaaggcccaccatgccccaggctcagcagggagctgctggaggtagtagagcctgaagtcttgcaggactcactggatagatgttattcaactccttccagttgtcttgaacagcctgactcctgccagccctatggaagttccttttatgcattggaggaaaaacatgttggcttttctcttgacgtgggagaaattgaaaagaaggggaaggggaagaaaagaaggggaagaagatcaaagaaggaaagaagaaggggaagaaaagaaggggaagaagatcaaaacccaccatgccccaggctcaacggcgtgctgatggaagtggaagagcgtgaagtcttacaggactcactggatagatgttattcgactccgtcaatgtactttgaactacctgactcattccagcactacagaagtgtgttttactcatttgaggaacagcacatcagcttcgccctttacgtggacaataggttttttactttgacggtgacaagtctccacctggtgttccagatgggagtcatattcccacaataagcagcccttagtaatccgagagatgtcattcctgcaggcaggacctataggcaagtgaagatttgaatgaaagtacagttccatttggaagcccagacataggatgggtcagtgggcatggctctattcctattctcaaaccatgccagtggaaacctgtgcgcagtctgaagacaatggacccacgttaggtgtgacacgttcacataactgtgcagcacatgccgggagtgatcagtcagacattttaatttgaaccacgtatctctgggtagctacaaaattcctcagggatttcattttgcaggcatgtctctgagcttctatacctgctcaaggtcattgtcatctttgtgtttagctcatccaaaggtgttaccctggtttcaatgaacctaacctcattctttgtgtcttcagtgttggcttgttttagctgatccatctgtaacacaggagggatccttggctgaggattgtatttcagaaccaccaactgctcttgacaattgttaacccgctagactcctttggttagagaagccacagtccttcagcctccaattggtgtcagtacttaggaagaccacagctagatggacaaacagcattgggaggccttagccctgctcctctctattccatcctgtagaggtcaggagtcaggagtcgctggcaggagacagcatgtcacccaggactctgccggtgcagaatatgaacaatgccatgttcttgcagaaaacgcttagcctgagtttcataggaggtaatcaccagacaactgcagaatgtagaacactgagcaggacaactgacctgtctccttcacatagtccatatcaccacaaatcacacaacaaaaaggagaagagatattttgggtt

SEQ ID NO: 158729 - DNA, 2656 bp, Homo sapiens
  Payload ID: 11057
  Gene Symbol: NBPF14
  Gene Name: neuroblastoma breakpoint family, member 14
  ENST ID: ENST00000620240
  CDS Start-End: 72-1679
aaagtgctgtggggagtgatcacatttttcacaacatccctgactccacctcttctgccacaaacgtcagcatggtggtatcagccggcccttggtccagtgagaaggcagagatgaacattctagaaatcaacgagacattgcgcccccagctggcagagaagaaacagcagttcagaaacctcaaagagatgttttctaactcaactggccggcttcctggccaaccaacagaagaaatacagcaatataaagtcctggttcactctcaggaacgagagctgacccagctaagggagaagttacgggaagggagagatgcctcccgctcattgtatgagcatctccaggccctcctcactccgtatgagccggacaagtcccaggggcaggacctccaagaacagctggctgaggggtgtagactggcacagcaccttgtccaaaagctcagcccagaaaatgacgaagatgaggatgaagatgttcaagttgaggaggctgagaaagtactggaatcatctgcccccagggaggtgcagaaggctgaagagagcaaagtccctgaggactcactggaggaatgtgccatcacttgttcaaatagccacggcccttgtgactccaaccagcctcacaagaacatcaaaatcacatttgaggaagacgaagtcaactcaactctggttgtagacagagaatcctctcatgatgaatgtcaggatgctctaaacattctcccagtccctggccccacctcttctgccacaaacgtcagcatggtggtatcagccggccctttgtccagcgagaaggcagagatgaacattctagaaatcaatgagaaattgcgcccccagctggcagagaagaaacagcagttcagaaacctcaaagagaaatgttttctaactcaactgtccggcttcctggccaaccaacagaagaaatacaaatatgaagagtgcaaagacctcataaaatttatgctgaggaatgagcgacagttcaaggaggagaagcttgcggagcagctgaagcaagctgaggagctcaggcaatataaagtcctggttcacgctcaggaacgagagctgacccagttaagggagaagttgcgggaagggagagatgcctcccgctcattgaatgagcatctccaggccctcctcactccggatgagccggacaagtcccaggggcaggacctccaagaacagctggctgaggggtgtagactggcacagcaccttgtccaaaagctcagcccagaaaatgacaacgatgacgatgaagatgttcaagttgaggtggctgagaaagtgcagaaatcgtctgcccccagggagatgcagaaggctgaagaaaaggaagtccctgaggactcactggaggaatgtgccatcacttattcaaatagccatggctcttatgactccaaccagccacataggaaaaccaaaatcacatttgaggaagacaaagtcgactcaactctcattggctcatcctctcatgttgaatgggaggatgctgtacacattattccagaaaatgaaagtgatgatgaggaagaggaagaaaaagggccagtgtctcccaggacatcggtgggatcaagtgaaaaaggaggaccaagaggcaacaggtcccaggctcagcagggagctgctggatgagaaagggcctgaagtcttgcaggactcactggatagatgttattcaactccttcaggttgtcttgaactgactgactcatgccagccctacagaagtgccttttatgtattggagcaacagcgtgttggcttggctgttgacatggatgaaattgaaaagtaccaagaagtggaagaagaccaagacccatcatgccccaggctcagcagggagctgctggatgagaaagagcctgaagtcttgcaggactcactggatagatgttattcgactccttcaggttatcttgaactgcctgacttaggccagccctacagcagtgctgtttactcattggaggaacagtaccttggcttggctcttgacgtggacagaattaaaaaggaccaagaagaggaagaagaccaaggcccaccatgccccaggctcagcagggagctgctggaggtagtagagcctgaagtcttgcaggactcactggatagatgttattcaactccttccagttgtcttgaacagcctgactcctgccagccctatggaagttccttttatgcattggaggaaaaacatgttggcttttctcttgacgtgggagaaattgaaaagaaggggaaggggaagaaaagaaggggaagaagatcaaagaaggaaagaagaaggggaagaaaagaaggggaagaagatcaaaacccaccatgccccaggctcaacggcgtgctgatggaagtggaagagcgtgaagtcttacaggactcactggatagatgttattcgactccgtcaatgtactttgaactacctgactcattccagcactacagaagtgtgttttactcatttgaggaacagcacatcagcttcgccctttacgtggacaataggttttttactttgacggtgacaagtctccacctggtgttccagatgggagtcatattcccacaataagcagcccttagtaatccgagagatg

SEQ ID NO: 158730 - DNA, 2051 bp, Homo sapiens
  Payload ID: 11057
  Gene Symbol: NBPF14
  Gene Name: neuroblastoma breakpoint family, member 14
  ENST ID: ENST00000616120
  CDS Start-End: 174-1073
aaagtgctgtggggagtgatcacatttttcacaacagtaagttaagaatttcagttactgacatccctcagtcctgattaaaccgatttgatttcaccagtttttaacccatcatatgtttgggtttcttctccccagtccctgactccacctcttctgccacaaacgtcagcatggtggtatcagccggcccttggtccagtgagaaggcagagatgaacattctagaaatcaacgagacattgcgcccccagctggcagagaagaaacagcagttcagaaacctcaaagagaaatgttttctaactcaactggccggcttcctggccaaccaacagaagaaatacaaatatgaagagtgcaaagacctcataaaatttatgctgaggaatgagcgacagttcaaggaggagaagcttgcggagcagctgaagcaagctgaggagctcaggcaatataaagtcctggttcacgctcaggaacgagagctgacccagttaagggagaagttgcgggaagggagagatgcctcccgctcattgaatgagcatctccaggccctcctcactccggatgagccggacaagtcccaggggcaggacctccaagaacagctggctgaggggtgtagactggcacagcaccttgtccaaaagctcagcccagaaaatgacaacgatgacgatgaagatgttcaagttgaggtggctgagaaagtgcagaaatcgtctgcccccagggagatgcagaaggctgaagaaaaggaagtccctgaggactcactggaggaatgtgccatcacttattcaaatagccatggctcttatgactccaaccagccacataggaaaaccaaaatcacatttgaggaagacaaagtcgactcaactctcattggctcatcctctcatgttgaatgggaggatgctgtacacattattccagaaaatgaaagtgatgatgaggaagaggaagaaaaagggccagtgtctcccaggacatcggtgggatcaagtgaaaaaggaggaccaagaggcaacaggtcccaggctcagcagggagctgctggatgagaaagggcctgaagtcttgcaggactcactggatagatgttattcaactccttcaggttgtcttgaactgactgactcatgccagccctacagaagtgccttttatgtattggagcaacagcgtgttggcttggctgttgacatggatgaaattgaaaagtaccaagaagtggaagaagaccaagacccatcatgccccaggctcagcagggagctgctggatgagaaagagcctgaagtcttgcaggactcactggatagatgttattcgactccttcaggttatcttgaactgcctgacttaggccagccctacagcagtgctgtttactcattggaggaacagtaccttggcttggctcttgacgtggacagaattaaaaaggaccaagaagaggaagaagaccaaggcccaccatgccccaggctcagcagggagctgctggaggtagtagagcctgaagtcttgcaggactcactggatagatgttattcaactccttccagttgtcttgaacagcctgactcctgccagccctatggaagttccttttatgcattggaggaaaaacatgttggcttttctcttgacgtgggagaaattgaaaagaaggggaaggggaagaaaagaaggggaagaagatcaaagaaggaaagaagaaggggaagaaaagaaggggaagaagatcaaaacccaccatgccccaggctcaacggcgtgctgatggaagtggaagagcgtgaagtcttacaggactcactggatagatgttattcgactccgtcaatgtactttgaactacctgactcattccagcactacagaagtgtgttttactcatttgaggaacagcacatcagcttcgccctttacgtggacaataggttttttactttgacggtgacaagtctccacctggtgttccagatgggagtcatattcccacaataagcagcccttagtaatccgagagatgt

SEQ ID NO: 158731 - DNA, 1831 bp, Homo sapiens
  Payload ID: 11057
  Gene Symbol: NBPF14
  Gene Name: neuroblastoma breakpoint family, member 14
  ENST ID: ENST00000611826
  CDS Start-End: 72-1805
aaagtgctgtggggagtgatcacatttttcacaacatccctgactccacctcttctgccacaaacgtcagcatggtggtatcagccggcccttggtccagtgagaaggcagagatgaacattctagaaatcaacgagacattgcgcccccagctggcagagaagaaacagcagttcagaaacctcaaagagaaatgttttctaactcaactggccggcttcctggccaaccaacagaagaaatacaagtatgaagagtgtaaagacctcataaaatttatgctgaggaatgagcgacagttcaaggaggagaagcttgcagagcagctgaagcaagctgaggagctcaggcaatataaagtcctggttcactctcaggaacgagagctgacccagctaagggagaagttacgggaagggagagatgcctcccgctcattgtatgagcatctccaggccctcctcactccgtatgagccggacaagtcccaggggcaggacctccaagaacagctggctgaggggtgtagactggcacagcaccttgtccaaaagctcagcccagaaaatgacgaagatgaggatgaagatgttcaagttgaggaggctgagaaagtactggaatcatctgcccccagggagatgcagaaggctgaagaaaaggaagtccctgaggactcactggaggaatgtgccatcacttattcaaatagccatggctcttatgactccaaccagccacataggaaaaccaaaatcacatttgaggaagacaaagtcgactcaactctcattggctcatcctctcatgttgaatgggaggatgctgtacacattattccagaaaatgaaagtgatgatgaggaagaggaagaaaaagggccagtgtctcccaggaatctgcaggagtctgaagaggaggaagtcccccaggagtcctgggatgaaggttattcgactctctcaattcctcctgaaatgttggcctcgtaccagtcttacagcagcacatttcactcattagaggaacagcaagtctgcatggctgttgacataggcagacatcggtgggatcaagtgaaaaaggaggaccaagaggcaacaggtcccaggctcagcagggagctgctggatgagaaagagcctgaagtcttgcaggactcactggatagatgttattcgactccttcaggttatcttgaactgcctgacttaggccagccctacagcagtgctgtttactcattggaggaacagtaccttggcttggctcttgacgtggacagaattaaaaaggaccaagaagaggaagaagaccaaggcccaccatgccccaggctcagcagggagctgctggaggtagtagagcctgaagtcttgcaggactcactggatagatgttattcaactccttccagttgtcttgaacagcctgactcctgccagccctatggaagttccttttatgcattggaggaaaaacatgttggcttttctcttgacgtgggagaaattgaaaagtaccaagaagtggaagaagaccaagacccatcatgccccaggctcaacggcgtgctgatggaagtggaagagcgtgaagtcttacaggactcactggatagatgttattcgactccgtcaatgtactttgaactacctgactcattccagcactacagaagtgtgttttactcatttgaggaacagcacatcagcttcgccctttacgtggacaataggttttttactttgacggtgacaagtctccacctggtgttccagatgggagtcatattcccacaataagcagcccttagtaatccgagagatgt

SEQ ID NO: 158732 - DNA, 10779 bp, Homo sapiens
  Payload ID: 11057
  Gene Symbol: NBPF14
  Gene Name: neuroblastoma breakpoint family, member 14
  ENST ID: ENST00000619423
  CDS Start-End: 193-9159
agacggttacctggcacgctggccacattctgcctcactcttatcagagtctgagctactggcagtgctttcagctctgagttgaggcacctcgaaccttgtttttgtggtgaaggatcctaaagtgctgtggggagtgatcacatttttcacaacatccctgactccacctcttctgccacaaacgtcagcatggtggtatcagccggcccttggtccagtgagaaggcagagatgaacattctagaaatcaacgagacattgcgcccccagctggcagagaagaaacagcagttcagaaacctcaaagagaaatgttttctaactcaactggccggcttcctggccaaccaacagaagaaatacaagtatgaagagtgtaaagacctcataaaatttatgctgaggaatgagcgacagttcaaggaggagaagcttgcagagcagctgaagcaagctgaggagctcaggcaatataaagtcctggttcactctcaggaacgagagctgacccagctaagggagaagttacgggaagggagagatgcctcccgctcattgtatgagcatctccaggccctcctcactccgtatgagccggacaagtcccaggggcaggacctccaagaacagctggctgaggggtgtagactggcacagcaccttgtccaaaagctcagcccagaaaatgacgaagatgaggatgaagatgttcaagttgaggaggctgagaaagtactggaatcatctgcccccagggaggtgcagaaggctgaagagagcaaagtccctgaggactcactggaggaatgtgccatcacttgttcaaatagccacggcccttgtgactccaaccagcctcacaagaacatcaaaatcacatttgaggaagacgaagtcaactcaactctggttgtagacagagaatcctctcatgatgaatgtcaggatgctctaaacattctcccagtccctggccccacctcttctgccacaaacgtcagcatggtggtatcagccggccctttgtccagcgagaaggcagagatgaacattctagaaatcaatgagaaattgcgcccccagctggcagagaagaaacagcagttcagaaacctcaaagagaaatgttttctaactcaactgtccggcttcctggccaaccaacagaagaaatacaaatatgaagagtgcaaagacctcataaaatttatgctgaggaatgagcgacagttcaaggaggagaagcttgcggagcagctgaagcaagctgaggagctcaggcaatataaagtcctggttcacgctcaggaacgagagctgacccagttaagggagaagttgcgggaagggagagatgcctcccgctcattgaatgagcatctccaggccctcctcactccggatgagccggacaagtcccaggggcaggacctccaagaacagctggctgaggggtgtagactggcacagcaccttgtccaaaagctcagcccagaaaatgacaacgatgacgatgaagatgttcaagttgaggtggctgagaaagtgcagaaatcgtctgcccccagggagatgcagaaggctgaagaaaaggaagtccctgaggactcactggaggaatgtgccatcacttattcaaatagccatggctcttatgactccaaccagccacataggaaaaccaaaatcacatttgaggaagacaaagtcgactcaactctcattggctcatcctctcatgttgaatgggaggatgctgtacacattattccagaaaatgaaagtgatgatgaggaagaggaagaaaaagggccagtgtctcccaggaatctgcaggagtctgaagaggaggaagtcccccaggagtcctgggatgaaggttattcgactctctcaattcctcctgaaatgttggcctcgtaccagtcttacagcagcacatttcactcattagaggaacagcaagtctgcatggctgttgacataggcagacatcggtgggatcaagtgaaaaaggaggaccaagaggcaacaggtcccaggctcagcagggagctgctggatgagaaagggcctgaagtcttgcaggactcactggatagatgttattcaactccttcaggttgtcttgaactgactgactcatgccagccctacagaagtgccttttatgtattggagcaacagcgtgttggcttggctgttgacatggatgaaattgaaaagtaccaagaagtggaagaagaccaagacccatcatgccccaggctcagcagggagctgctggatgagaaagagcctgaagtcttgcaggactcactggatagatgttattcgactccttcaggttatcttgaactgcctgacttaggccagccctacagcagtgctgtttactcattggaggaacagtaccttggcttggctcttgacgtggacagaattaaaaaggacgaagaagaggaagaagaccaagacccaccatgccccaggctcagcagggagctgctggaggtagtagagcctgaagtcttgcaggactcactggatagatgttattcaactccttccagttgtcttgaacagcctgactcctgccagccctatggaagttccttttatgcattggaggaaaaacatgttggcttttctcttgacgtgggagaaattgaaaagaaggggaaggggaagaaaagaaggggaagaagatcaaagaaggaaagaagaaggggaagaaaagaaggggaagaagatcaaaacccaccatgccccaggctcagcagggagctgctggatgagaaagagcctgaagtcttgcaggactcactggatagatgttattcgactccttcaggttatcttgaactgcctgacttaggccagccctacagcagtgctgtttactcattggaggaacagtaccttggcttggctcttgacgtggacagaattaaaaaggacgaagaagaggaagaagaccaagacccaccatgccccaggctcagcagggagctgctggaggtagtagagcctgaagtcttgcaggactcactggatagatgttattcaactccttccagttgtcttgaacagcctgactcctgccagccctatggaagttccttttatgcattggaggaaaaacatgttggcttttctcttgacgtgggagaaattgaaaagaaggggaaggggaagaaaagaaggggaagaagatcaaagaaggaaagaagaaggggaagaaaagaaggggaagaagatcaaaacccaccatgccccaggctcagcagggagctgctggatgagaaagggcctgaagtcttgcaggactcactggatagatgttattcaactccttcaggttgtcttgaactgactgactcatgccagccctacagaagtgccttttatgtattggagcaacagcgtgttggcttggctgttgacatggatgaaattgaaaagtaccaagaagtggaagaagaccaagacccatcatgccccaggctcagcagggagctgctggatgagaaagagcctgaagtcttgcaggactcactggatagatgttattcgactccttcaggttatcttgaactgcctgacttaggccagccctacagcagtgctgtttactcattggaggaacagtaccttggcttggctcttgacgtggacagaattaaaaaggacgaagaagaggaagaagaccaagacccaccatgccccaggctcagcagggagctgctggaggtagtagagcctgaagtcttgcaggactcactggatagatgttattcaactccttccagttgtcttgaacagcctgactcctgccagccctatggaagttccttttatgcattggaggaaaaacatgttggcttttctcttgacgtgggagaaattgaaaagaaggggaaggggaagaaaagaaggggaagaagatcaaagaaggaaagaagaaggggaagaaaagaaggggaagaagatcaaaacccaccatgccccaggctcagcagggagctgctggatgagaaagggcctgaagtcttgcaggactcactggatagatgttattcaactccttcaggttgtcttgaactgactgactcatgccagccctacagaagtgccttttatgtattggagcaacagcgtgttggcttggctgttgacatggatgaaattgaaaagtaccaagaagtggaagaagaccaagacccatcatgccccaggctcagcagggagctgctggatgagaaagagcctgaagtcttgcaggactcactggatagatgttattcgactccttcaggttatcttgaactgcctgacttaggccagccctacagcagtgctgtttactcattggaggaacagtaccttggcttggctcttgacgtggacagaattaaaaaggacgaagaagaggaagaagaccaagacccaccatgccccaggctcagcagggagctgctggaggtagtagagcctgaagtcttgcaggactcactggatagatgttattcaactccttccagttgtcttgaacagcctgactcctgccagccctatggaagttccttttatgcattggaggaaaaacatgttggcttttctcttgacgtgggagaaattgaaaagaaggggaaggggaagaaaagaaggggaagaagatcaaagaaggaaagaagaaggggaagaaaagaaggggaagaagatcaaaacccaccatgccccaggctcagcagggagctgctgcatgagaaagggcctgaagtcttgcaggactcactggatagatgttattcaactccttcaggttgtcttgaactgactgactcatgccagccctatagaagtgccttttacatattggagcagcagcgtgttggcttggctgttgacatggatgaaattgaaaagtacaaagaagtggaagaagaccaagacccatcatgccccaggctcagcagggagctgctggatgagaaagagcctgaagtcttgcaggactcactggatagatgttattcgactccttcaggttatcttgaactgcctgacttaggccagccctacagcagtgctgtttactcattggaggaacagtaccttggcttggctcttgacgtggacagatttaaaaaggacgaagaagaggaagaagaccaagacccaccatgccccaggctcagcagggagctgctggaggtagtagagcctgaagtcttgcaggactcactggatagatgttattcaactccttccagttgtcttgaacagcctgactcctgccagccctatggaagttccttttatgcattggaggaaaaacatgttggcttttctcttgatgtgggagaaattgaaaagaaggggaaggggaagaaaagaaggggaagaagatcaaagaaggaaagaagaaggggaagaaaagaaggggaagaagatcaaaacccaccatgccccaggctcagcagggagctgctggatgagaaagggcctgaagtcttgcaggactcactggatagatgttattcaactccttcaggttgtcttgaactgactgactcatgccagccctacagaagtgccttttatgtattggagcaacagcgtgttggcttggctgttgacatggatgaaattgaaaagtacaaagaagtggaagaagaccaagacccatcatgccccaggctcagcagggagctgctggatgagaaagagcctgaagtcttgcaggactcactggatagatgttattcgactccttcaggttatcttgaactgcctgacttaggccagccctacagcagtgctgtttactcattggaggaacagtaccttggcttggctcttgacgtggacagaattaaaaaggaccaagaagaggaagaagaccaaggcccaccatgccccaggctcagcagggagctgctggaggtagtagagcctgaagtcttgcaggactcactggatagatgttattcaactccttccagttgtcttgaacagcctgactcctgccagccctatggaagttccttttatgcattggaggaaaaacatgttggcttttctcttgacgtgggagaaattgaaaagaaggggaaggggaagaaaagaaggggaagaagatcaaagaaggaaagaagaaggggaagaaaagaaggggaagaagatcaaaacccaccatgccccaggctcagcagggagctgctggatgagaaagggcctgaagtcttgcaggactcactggatagatgttattcaactccttcaggttgtcttgaactgactgactcatgccagccctacagaagtgccttttatgtattggagcaacagcgtgttggcttggctgttgacatggatgaaattgaaaagtacaaagaagtggaagaagaccaagacccatcatgccccaggctcagcagggagctgctggatgagaaagagcctgaagtcttgcaggactcactggatagatgttattcgactccttcaggttatcttgaactgcctgacttaggccagccctacagcagtgctgtttactcattggaggaacagtaccttggcttggctcttgacgtggacagaattaaaaaggaccaagaagaggaagaagaccaaggcccaccatgccccaggctcagcagggagctgctggaggtagtagagcctgaagtcttgcaggactcactggatagatgttattcaactccttccagttgtcttgaacagcctgactcctgccagccctatggaagttccttttatgcattggaggaaaaacatgttggcttttctcttgacgtgggagaaattgaaaagaaggggaaggggaagaaaagaaggggaagaagatcaaagaaggaaagaagaaggggaagaaaagaaggggaagaagatcaaaacccaccatgccccaggctcagcagggagctgctggatgagaaagggcctgaagtcttgcaggactcactggatagatgttattcaactccttcaggttgtcttgaactgactgactcatgccagccctacagaagtgccttttatgtattggagcaacagcgtgttggcttggctgttgacatggatgaaattgaaaagtacaaagaagtggaagaagaccaagacccatcatgccccaggctcagcagggagctgctggatgagaaagagcctgaagtcttgcaggactcactggatagatgttattcgactccttcaggttatcttgaactgcctgacttaggccagccctacagcagtgctgtttactcattggaggaacagtaccttggcttggctcttgacgtggacagaattaaaaaggaccaagaagaggaagaagaccaaggcccaccatgccccaggctcagcagggagctgctggaggtagtagagcctgaagtcttgcaggactcactggatagatgttattcaactccttccagttgtcttgaacagcctgactcctgccagccctatggaagttccttttatgcattggaggaaaaacatgttggcttttctcttgatgtgggagaaattgaaaagaaggggaaggggaagaaaagaaggggaagaagatcaaagaaggaaagaagaaggggaagaaaagaaggggaagaagatcaaaacccaccatgccccaggctcagcagggagctgctggatgagaaagggcctgaagtcttgcaggactcactggatagatgttattcaactccttcaggttgtcttgaactgactgactcatgccagccctacagaagtgccttttatgtattggagcaacagcgtgttggcttggctgttgacatggatgaaattgaaaagtacaaagaagtggaagaagaccaagacccatcatgccccaggctcagcagggagctgctggatgagaaagagcctgaagtcttgcaggactcactggatagatgttattcgactccttcaggttatcttgaactgcctgacttaggccagccctacagcagtgctgtttactcattggaggaacagtaccttggcttggctcttgacgtggacagaattaaaaaggaccaagaagaggaagaagaccaaggcccaccatgccccaggctcagcagggagctcctggaggtagtagagcctgaagtcttgcaggactcactggatagatgttattcaactccttccagttgtcttgaacagcctgactcctgccagccctatggaagttccttttatgcattggaggaaaaacatgttggcttttctcttgacgtgggagaaattgaaaagaaggggaaggggaagaaaagaaggggaagaagatcaaagaaggaaagaagaaggggaagaaaagaaggggaagaagatcaaaacccaccatgccccaggctcagcagggagctgctggatgagaaagggcctgaagtcttgcaggactcactggatagatgttattcaactccttcaggttgtcttgaactgactgactcatgccagccctacagaagtgccttttatgtattggagcaacagcgtgttggcttggctgttgacatggatgaaattgaaaagtaccaagaagtggaagaagaccaagacccatcatgccccaggctcagcagggagctgctggatgagaaagatcctgaagtcttgcaggactcactggatagatgttattcgactccttcaggttatcttgaactgcctgacttaggccagccctacagcagtgctgtttactcattggaggaacagtaccttggcttggctcttgacgtggacaaaattgaaaagaaggggaaggggaaaaaaagaaggggaagaagatcaaagaaggaaagaagaaggggaagaaaagaaggggaagaagatcaaaacccaccatgccccaggctcaacggcgtgctgatggaagtggaagagcgtgaagtcttacaggactcactggatagatgttattcgactccgtcaatgtactttgaactacctgactcattccagcactacagaagtgtgttttactcatttgaggaacagcacatcagcttcgccctttacgtggacaataggttttttactttgacggtgacaagtctccacctggtgttccagatgggagtcatattcccacaataagcagcccttagtaatccgagagatgtcattcctgcaggcaggacctataggcaagtgaagatttgaatgaaagtacagttccatttggaagcccagacataggatgggtcagtgggcatggctctattcctattctcaaaccatgccagtggaaacctgtgcgcagtctgaagacaatggacccacgttaggtgtgacacgttcacataactgtgcagcacatgccgggagtgatcagtcagacattttaatttgaaccacgtatctctgggtagctacaaaattcctcagggatttcattttgcaggcatgtctctgagcttctatacctgctcaaggtcattgtcatctttgtgtttagctcatccaaaggtgttaccctggtttcaatgaacctaacctcattctttgtgtcttcagtgttggcttgttttagctgatccatctgtaacacaggagggatccttggctgaggattgtatttcagaaccaccaactgctcttgacaattgttaacccgctagactcctttggttagagaagccacagtccttcagcctccaattggtgtcagtacttaggaagaccacagctagatggacaaacagcattgggaggccttagccctgctcctctctattccatcctgtagaggtcaggagtcaggagtcgctggcaggagacagcatgtcacccaggactctgccggtgcagaatatgaacaatgccatgttcttgcagaaaacgcttagcctgagtttcataggaggtaatcaccagacaactgcagaatgtagaacactgagcaggacaactgacctgtctccttcacatagtccatatcaccacaaatcacacaacaaaaaggagaagagatattttgggttcaaaaaaagtaaaaagataatgtagctgcatttctttagttattttgaaccccaaatatttcctcatctttttgttgttgtcatggatggtggtgacatggacttgtttatagaagacaggtcagctgtctggctcaatgatctacattctgaagttgtctgaaaatgtcttcatgattaaattcagcctaaacgttttgccaggaacactgcagagacaatgctgtgagtttccaacctcagcccatctgcgggcagagaaggtctagtttgtccatcaccattatgatatcaggactggttacttggttaaggaggggtctaggagatctgtcccttttagagacaccttacttacaatgaagtacttgggaaagtggttttcaagagtataaatatcctgtattctaatgatcatcctctaaacattttatcatttattaatcctccctgcctgtgtctattattatattcatatctctacactgcaaatttggggtctcaatttttactgtgcctttgtttttactagtgtctgctgttgcaaaaagaagacattctctgcctgagttttaatttttgtccaaagttaattttaatctatacaattaaaaccttttgcctatcactctggacttttggattgttttttacattcagtgttataatatttgattatggtgattggttttggtgggtactgatgcgaattaataaaaacatttcatttcca

SEQ ID NO: 158733 - DNA, 2701 bp, Homo sapiens
  Payload ID: 11057
  Gene Symbol: NBPF14
  Gene Name: neuroblastoma breakpoint family, member 14
  ENST ID: ENST00000621070
  CDS Start-End: 72-2675
aaagtgctgtggggagtgatcacatttttcacaacatccctgactccacctcttctgccacaaacgtcagcatggtggtatcagccggcccttggtccagtgagaaggcagagatgaacattctagaaatcaacgagacattgcgcccccagctggcagagaagaaacagcagttcagaaacctcaaagagaaatgttttctaactcaactggccggcttcctggccaaccaacagaagaaatacaagtatgaagagtgtaaagacctcataaaatttatgctgaggaatgagcgacagttcaaggaggagaagcttgcagagcagctgaagcaagctgaggagctcaggcaatataaagtcctggttcactctcaggaacgagagctgacccagctaagggagaagttacgggaagggagagatgcctcccgctcattgtatgagcatctccaggccctcctcactccgtatgagccggacaagtcccaggggcaggacctccaagaacagctggctgaggggtgtagactggcacagcaccttgtccaaaagctcagcccagaaaatgacgaagatgaggatgaagatgttcaagttgaggaggctgagaaagtactggaatcatctgcccccagggaggtgcagaaggctgaagagagcaaagtccctgaggactcactggaggaatgtgccatcacttgttcaaatagccacggcccttgtgactccaaccagcctcacaagaacatcaaaatcacatttgaggaagacgaagtcaactcaactctggttgtagacagagaatcctctcatgatgaatgtcaggatgctctaaacattctcccagtccctggccccacctcttctgccacaaacgtcagcatggtggtatcagccggccctttgtccagcgagaaggcagagatgaacattctagaaatcaatgagaaattgcgcccccagctggcagagaagaaacagcagttcagaaacctcaaagagaaatgttttctaactcaactgtccggcttcctggccaaccaacagaagaaatacaaatatgaagagtgcaaagacctcataaaatttatgctgaggaatgagcgacagttcaaggaggagaagcttgcggagcagctgaagcaagctgaggagctcaggcaatataaagtcctggttcacgctcaggaacgagagctgacccagttaagggagaagttgcgggaagggagagatgcctcccgctcattgaatgagcatctccaggccctcctcactccggatgagccggacaagtcccaggggcaggacctccaagaacagctggctgaggggtgtagactggcacagcaccttgtccaaaagctcagcccagaaaatgacaacgatgacgatgaagatgttcaagttgaggtggctgagaaagtgcagaaatcgtctgcccccagggagatgcagaaggctgaagaaaaggaagtccctgaggactcactggaggaatgtgccatcacttattcaaatagccatggctcttatgactccaaccagccacataggaaaaccaaaatcacatttgaggaagacaaagtcgactcaactctcattggctcatcctctcatgttgaatgggaggatgctgtacacattattccagaaaatgaaagtgatgatgaggaagaggaagaaaaagggccagtgtctcccaggaatctgcaggagtctgaagaggaggaagtcccccaggagtcctgggatgaaggttattcgactctctcaattcctcctgaaatgttggcctcgtaccagtcttacagcagcacatttcactcattagaggaacagcaagtctgcatggctgttgacataggcagacatcggtgggatcaagtgaaaaaggaggaccaagaggcaacaggtcccaggctcagcagggagctgctggatgagaaagagcctgaagtcttgcaggactcactggatagatgttattcgactccttcaggttatcttgaactgcctgacttaggccagccctacagcagtgctgtttactcattggaggaacagtaccttggcttggctcttgacgtggacagaattaaaaaggaccaagaagaggaagaagaccaaggcccaccatgccccaggctcagcagggagctgctggaggtagtagagcctgaagtcttgcaggactcactggatagatgttattcaactccttccagttgtcttgaacagcctgactcctgccagccctatggaagttccttttatgcattggaggaaaaacatgttggcttttctcttgacgtgggagaaattgaaaagaaggggaaggggaagaaaagaaggggaagaagatcaaagaaggaaagaagaaggggaagaaaagaaggggaagaagatcaaaacccaccatgccccaggctcaacggcgtgctgatggaagtggaagagcgtgaagtcttacaggactcactggatagatgttattcgactccgtcaatgtactttgaactacctgactcattccagcactacagaagtgtgttttactcatttgaggaacagcacatcagcttcgccctttacgtggacaataggttttttactttgacggtgacaagtctccacctggtgttccagatgggagtcatattcccacaataagcagcccttagtaatccgagagatgt

SEQ ID NO: 158734 - DNA, 10080 bp, Homo sapiens
  Payload ID: 11057
  Gene Symbol: NBPF14
  Gene Name: neuroblastoma breakpoint family, member 14
  ENST ID: ENST00000614999
  CDS Start-End: 1-8460
atggtggtatcagccggcccttggtccagtgagaaggcagagatgaacattctagaaatcaacgagacattgcgcccccagctggcagagaagaaacagcagttcagaaacctcaaagagaaatgttttctaactcaactggccggcttcctggccaaccaacagaagaaatacaagtatgaagagtgtaaagacctcataaaatttatgctgaggaatgagcgacagttcaaggaggagaagcttgcagagcagctgaagcaagctgaggagctcaggcaatataaagtcctggttcactctcaggaacgagagctgacccagctaagggagaagttacgggaagggagagatgcctcccgctcattgtatgagcatctccaggccctcctcactccgtatgagccggacaagtcccaggggcaggacctccaagaacagctggctgaggggtgtagactggcacagcaccttgtccaaaagctcagcccagaaaatgacgaagatgaggatgaagatgttcaagttgaggaggctgagaaagtactggaatcatctgcccccagggaggtgcagaaggctgaagagagcaaagtccctgaggactcactggaggaatgtgccatcacttgttcaaatagccacggcccttgtgactccaaccagcctcacaagaacatcaaaatcacatttgaggaagacgaagtcaactcaactctggttgtagacagagaatcctctcatgatgaatgtcaggatgctctaaacattctcccagtccctggccccacctcttctgccacaaacgtcagcatggtggtatcagccggccctttgtccagcgagaaggcagagatgaacattctagaaatcaatgagaaattgcgcccccagctggcagagaagaaacagcagttcagaaacctcaaagagaaatgttttctaactcaactgtccggcttcctggccaaccaacagaagaaatacaaatatgaagagtgcaaagacctcataaaatttatgctgaggaatgagcgacagttcaaggaggagaagcttgcggagcagctgaagcaagctgaggagctcaggcaatataaagtcctggttcacgctcaggaacgagagctgacccagttaagggagaagttgcgggaagggagagatgcctcccgctcattgaatgagcatctccaggccctcctcactccggatgagccggacaagtcccaggggcaggacctccaagaacagctggctgaggggtgtagactggcacagcaccttgtccaaaagctcagcccagaaaatgacaacgatgacgatgaagatgttcaagttgaggtggctgagaaagtgcagaaatcgtctgcccccagggagatgcagaaggctgaagaaaaggaagtccctgaggactcactggaggaatgtgccatcacttattcaaatagccatggctcttatgactccaaccagccacataggaaaaccaaaatcacatttgaggaagacaaagtcgactcaactctcattggctcatcctctcatgttgaatgggaggatgctgtacacattattccagaaaatgaaagtgatgatgaggaagaggaagaaaaagggccagtgtctcccaggaatctgcaggagtctgaagaggaggaagtcccccaggagtcctgggatgaaggttattcgactctctcaattcctcctgaaatgttggcctcgtaccagtcttacagcagcacatttcactcattagaggaacagcaagtctgcatggctgttgacataggcagacatcggtgggatcaagtgaaaaaggaggaccaagaggcaacaggtcccaggctcagcagggagctgctggatgagaaagggcctgaagtcttgcaggactcactggatagatgttattcaactccttcaggttgtcttgaactgactgactcatgccagccctacagaagtgccttttatgtattggagcaacagcgtgttggcttggctgttgacatggatgaaattgaaaagtaccaagaagtggaagaagaccaagacccatcatgccccaggctcagcagggagctgctggatgagaaagagcctgaagtcttgcaggactcactggatagatgttattcgactccttcaggttatcttgaactgcctgacttaggccagccctacagcagtgctgtttactcattggaggaacagtaccttggcttggctcttgacgtggacagaattaaaaaggacgaagaagaggaagaagaccaagacccaccatgccccaggctcagcagggagctgctggaggtagtagagcctgaagtcttgcaggactcactggatagatgttattcaactccttccagttgtcttgaacagcctgactcctgccagccctatggaagttccttttatgcattggaggaaaaacatgttggcttttctcttgacgtgggagaaattgaaaagaaggggaaggggaagaaaagaaggggaagaagatcaaagaaggaaagaagaaggggaagaaaagaaggggaagaagatcaaaacccaccatgccccaggctcagcagggagctgctggatgagaaagggcctgaagtcttgcaggactcactggatagatgttattcaactccttcaggttgtcttgaactgactgactcatgccagccctacagaagtgccttttatgtattggagcaacagcgtgttggcttggctgttgacatggatgaaattgaaaagtaccaagaagtggaagaagaccaagacccatcatgccccaggctcagcagggagctgctggatgagaaagagcctgaagtcttgcaggactcactggatagatgttattcgactccttcaggttatcttgaactgcctgacttaggccagccctacagcagtgctgtttactcattggaggaacagtaccttggcttggctcttgacgtggacagaattaaaaaggacgaagaagaggaagaagaccaagacccaccatgccccaggctcagcagggagctgctggaggtagtagagcctgaagtcttgcaggactcactggatagatgttattcaactccttccagttgtcttgaacagcctgactcctgccagccctatggaagttccttttatgcattggaggaaaaacatgttggcttttctcttgacgtgggagaaattgaaaagaaggggaaggggaagaaaagaaggggaagaagatcaaagaaggaaagaagaaggggaagaaaagaaggggaagaagatcaaaacccaccatgccccaggctcagcagggagctgctggatgagaaagggcctgaagtcttgcaggactcactggatagatgttattcaactccttcaggttgtcttgaactgactgactcatgccagccctacagaagtgccttttatgtattggagcaacagcgtgttggcttggctgttgacatggatgaaattgaaaagtaccaagaagtggaagaagaccaagacccatcatgccccaggctcagcagggagctgctggatgagaaagagcctgaagtcttgcaggactcactggatagatgttattcgactccttcaggttatcttgaactgcctgacttaggccagccctacagcagtgctgtttactcattggaggaacagtaccttggcttggctcttgacgtggacagaattaaaaaggacgaagaagaggaagaagaccaagacccaccatgccccaggctcagcagggagctgctggaggtagtagagcctgaagtcttgcaggactcactggatagatgttattcaactccttccagttgtcttgaacagcctgactcctgccagccctatggaagttccttttatgcattggaggaaaaacatgttggcttttctcttgacgtgggagaaattgaaaagaaggggaaggggaagaaaagaaggggaagaagatcaaagaaggaaagaagaaggggaagaaaagaaggggaagaagatcaaaacccaccatgccccaggctcagcagggagctgctgcatgagaaagggcctgaagtcttgcaggactcactggatagatgttattcaactccttcaggttgtcttgaactgactgactcatgccagccctatagaagtgccttttacatattggagcagcagcgtgttggcttggctgttgacatggatgaaattgaaaagtacaaagaagtggaagaagaccaagacccatcatgccccaggctcagcagggagctgctggatgagaaagagcctgaagtcttgcaggactcactggatagatgttattcgactccttcaggttatcttgaactgcctgacttaggccagccctacagcagtgctgtttactcattggaggaacagtaccttggcttggctcttgacgtggacagatttaaaaaggacgaagaagaggaagaagaccaagacccaccatgccccaggctcagcagggagctgctggaggtagtagagcctgaagtcttgcaggactcactggatagatgttattcaactccttccagttgtcttgaacagcctgactcctgccagccctatggaagttccttttatgcattggaggaaaaacatgttggcttttctcttgatgtgggagaaattgaaaagaaggggaaggggaagaaaagaaggggaagaagatcaaagaaggaaagaagaaggggaagaaaagaaggggaagaagatcaaaacccaccatgccccaggctcagcagggagctgctggatgagaaagggcctgaagtcttgcaggactcactggatagatgttattcaactccttcaggttgtcttgaactgactgactcatgccagccctacagaagtgccttttatgtattggagcaacagcgtgttggcttggctgttgacatggatgaaattgaaaagtacaaagaagtggaagaagaccaagacccatcatgccccaggctcagcagggagctgctggatgagaaagagcctgaagtcttgcaggactcactggatagatgttattcgactccttcaggttatcttgaactgcctgacttaggccagccctacagcagtgctgtttactcattggaggaacagtaccttggcttggctcttgacgtggacagaattaaaaaggaccaagaagaggaagaagaccaaggcccaccatgccccaggctcagcagggagctgctggaggtagtagagcctgaagtcttgcaggactcactggatagatgttattcaactccttccagttgtcttgaacagcctgactcctgccagccctatggaagttccttttatgcattggaggaaaaacatgttggcttttctcttgacgtgggagaaattgaaaagaaggggaaggggaagaaaagaaggggaagaagatcaaagaaggaaagaagaaggggaagaaaagaaggggaagaagatcaaaacccaccatgccccaggctcagcagggagctgctggatgagaaagggcctgaagtcttgcaggactcactggatagatgttattcaactccttcaggttgtcttgaactgactgactcatgccagccctacagaagtgccttttatgtattggagcaacagcgtgttggcttggctgttgacatggatgaaattgaaaagtacaaagaagtggaagaagaccaagacccatcatgccccaggctcagcagggagctgctggatgagaaagagcctgaagtcttgcaggactcactggatagatgttattcgactccttcaggttatcttgaactgcctgacttaggccagccctacagcagtgctgtttactcattggaggaacagtaccttggcttggctcttgacgtggacagaattaaaaaggaccaagaagaggaagaagaccaaggcccaccatgccccaggctcagcagggagctgctggaggtagtagagcctgaagtcttgcaggactcactggatagatgttattcaactccttccagttgtcttgaacagcctgactcctgccagccctatggaagttccttttatgcattggaggaaaaacatgttggcttttctcttgacgtgggagaaattgaaaagaaggggaaggggaagaaaagaaggggaagaagatcaaagaaggaaagaagaaggggaagaaaagaaggggaagaagatcaaaacccaccatgccccaggctcagcagggagctgctggatgagaaagggcctgaagtcttgcaggactcactggatagatgttattcaactccttcaggttgtcttgaactgactgactcatgccagccctacagaagtgccttttatgtattggagcaacagcgtgttggcttggctgttgacatggatgaaattgaaaagtacaaagaagtggaagaagaccaagacccatcatgccccaggctcagcagggagctgctggatgagaaagagcctgaagtcttgcaggactcactggatagatgttattcgactccttcaggttatcttgaactgcctgacttaggccagccctacagcagtgctgtttactcattggaggaacagtaccttggcttggctcttgacgtggacagaattaaaaaggaccaagaagaggaagaagaccaaggcccaccatgccccaggctcagcagggagctgctggaggtagtagagcctgaagtcttgcaggactcactggatagatgttattcaactccttccagttgtcttgaacagcctgactcctgccagccctatggaagttccttttatgcattggaggaaaaacatgttggcttttctcttgatgtgggagaaattgaaaagaaggggaaggggaagaaaagaaggggaagaagatcaaagaaggaaagaagaaggggaagaaaagaaggggaagaagatcaaaacccaccatgccccaggctcagcagggagctgctggatgagaaagggcctgaagtcttgcaggactcactggatagatgttattcaactccttcaggttgtcttgaactgactgactcatgccagccctacagaagtgccttttatgtattggagcaacagcgtgttggcttggctgttgacatggatgaaattgaaaagtacaaagaagtggaagaagaccaagacccatcatgccccaggctcagcagggagctgctggatgagaaagagcctgaagtcttgcaggactcactggatagatgttattcgactccttcaggttatcttgaactgcctgacttaggccagccctacagcagtgctgtttactcattggaggaacagtaccttggcttggctcttgacgtggacagaattaaaaaggaccaagaagaggaagaagaccaaggcccaccatgccccaggctcagcagggagctcctggaggtagtagagcctgaagtcttgcaggactcactggatagatgttattcaactccttccagttgtcttgaacagcctgactcctgccagccctatggaagttccttttatgcattggaggaaaaacatgttggcttttctcttgacgtgggagaaattgaaaagaaggggaaggggaagaaaagaaggggaagaagatcaaagaaggaaagaagaaggggaagaaaagaaggggaagaagatcaaaacccaccatgccccaggctcagcagggagctgctggatgagaaagggcctgaagtcttgcaggactcactggatagatgttattcaactccttcaggttgtcttgaactgactgactcatgccagccctacagaagtgccttttatgtattggagcaacagcgtgttggcttggctgttgacatggatgaaattgaaaagtaccaagaagtggaagaagaccaagacccatcatgccccaggctcagcagggagctgctggatgagaaagatcctgaagtcttgcaggactcactggatagatgttattcgactccttcaggttatcttgaactgcctgacttaggccagccctacagcagtgctgtttactcattggaggaacagtaccttggcttggctcttgacgtggacaaaattgaaaagaaggggaaggggaaaaaaagaaggggaagaagatcaaagaaggaaagaagaaggggaagaaaagaaggggaagaagatcaaaacccaccatgccccaggctcaacggcgtgctgatggaagtggaagagcgtgaagtcttacaggactcactggatagatgttattcgactccgtcaatgtactttgaactacctgactcattccagcactacagaagtgtgttttactcatttgaggaacagcacatcagcttcgccctttacgtggacaataggttttttactttgacggtgacaagtctccacctggtgttccagatgggagtcatattcccacaataagcagcccttagtaatccgagagatgtcattcctgcaggcaggacctataggcaagtgaagatttgaatgaaagtacagttccatttggaagcccagacataggatgggtcagtgggcatggctctattcctattctcaaaccatgccagtggaaacctgtgcgcagtctgaagacaatggacccacgttaggtgtgacacgttcacataactgtgcagcacatgccgggagtgatcagtcagacattttaatttgaaccacgtatctctgggtagctacaaaattcctcagggatttcattttgcaggcatgtctctgagcttctatacctgctcaaggtcattgtcatctttgtgtttagctcatccaaaggtgttaccctggtttcaatgaacctaacctcattctttgtgtcttcagtgttggcttgttttagctgatccatctgtaacacaggagggatccttggctgaggattgtatttcagaaccaccaactgctcttgacaattgttaacccgctagactcctttggttagagaagccacagtccttcagcctccaattggtgtcagtacttaggaagaccacagctagatggacaaacagcattgggaggccttagccctgctcctctctattccatcctgtagaggtcaggagtcaggagtcgctggcaggagacagcatgtcacccaggactctgccggtgcagaatatgaacaatgccatgttcttgcagaaaacgcttagcctgagtttcataggaggtaatcaccagacaactgcagaatgtagaacactgagcaggacaactgacctgtctccttcacatagtccatatcaccacaaatcacacaacaaaaaggagaagagatattttgggttcaaaaaaagtaaaaagataatgtagctgcatttctttagttattttgaaccccaaatatttcctcatctttttgttgttgtcatggatggtggtgacatggacttgtttatagaagacaggtcagctgtctggctcaatgatctacattctgaagttgtctgaaaatgtcttcatgattaaattcagcctaaacgttttgccaggaacactgcagagacaatgctgtgagtttccaacctcagcccatctgcgggcagagaaggtctagtttgtccatcaccattatgatatcaggactggttacttggttaaggaggggtctaggagatctgtcccttttagagacaccttacttacaatgaagtacttgggaaagtggttttcaagagtataaatatcctgtattctaatgatcatcctctaaacattttatcatttattaatcctccctgcctgtgtctattattatattcatatctctacactgcaaatttggggtctcaatttttactgtgcctttgtttttactagtgtctgctgttgcaaaaagaagacattctctgcctgagttttaatttttgtccaaagttaattttaatctatacaattaaaaccttttgcctatcactctggacttttggattgttttttacattcagtgttataatatttgattatggtgattggttttggtgggtactgatgcgaattaataaaaacatttcatttcca

SEQ ID NO: 158735 - DNA, 4707 bp, Homo sapiens
  Payload ID: 11058
  Gene Symbol: NBPF15
  Gene Name: neuroblastoma breakpoint family, member 15
  Uniprot ID: Q8N660
  ENST ID: ENST00000577412
  CDS Start-End: 1068-3080
ataggcaatctgaaagcaaatcctgtttagatgcaggcgaaggttcctggtgacccaggctctcaccttaccgtcccttaccgtcctcctgagggtgtcctggagcttcagtgctgtgtgttcttggcctccacgctggggctgccaccaactcccactgtccagggcttccagtggactctccgaggtactgatgtagaaacttccccattcggtgcaccaagagcaacctcacacggtgtgggctgaatgaagagctgccagatcccacaggtggcaagggctctggaacagccacataaagcccttgaagataaggatggtcaaacaaaataatatcatacctggagaaactcagatcttggtaagatttactggttgggaatccaaagttaatgccaagaagcagccgccagttgggatcaaatgtgagcctatggatcaagcaggcctagcgtcttggcagtcatggtgacaatgacgttgaaggtggggactccaccgatgctcttcatatgaagatccacggtcaattccccatcctgcagcagtgagtccaggaccacagtatatttctggccccccagtgtcagtccattcatgacaaagtttgaccagtctttgccaaccaggacaccaacctcagctggcgtgatgttgaggaaggttttccctgggatggcggcccagatggaagaaaatataacctgttgggaaactgtttctgccttgatgatgttgtacagacaagagataaacagtgaggaatatgcttagatgtattgggaaagacatgggtctgtggcattgtcacaagggtacacgaatactgagagtgaatgctgaaggaatgatccccattggtggtgaccctcagacggttacctggcacgctggccacaatctacctcactcttatcagagtctgcgctactgacagtgctttcagctctgagttgaggcacctcgaaccttgtttttgtggtgaaggatcctaaagtgctgtggggagtgatcacatttttgacaacatccctgactccacctcttctgccacaaacgtcagcatggtggtatcagccggccctttgtccagcgagaaggcagagatgaacattctagaaatcaatgagaaattgcgcccccagttggcagagaagaaacagcagttcagaaacctcaaagagaaatgttttctaactcaactggccggcttcctggccaaccgacagaagaaatacaaatatgaagagtgcaaagatctcataaaatttatgctgaggaatgagcgacagttcaaggaggagaagcttgcagagcagctcaagcaagctgaggagctcaggcaatataaagtcctggttcacgctcaggaacgagagctgacccagttaagggagaagttacgggaagggagagatgcctcccgctcattgaatgagcatctccaggccctcctcactccggatgagccggacaagtcccaggggcaggacctccaagaacagctggctgaggggtgtagactgacacagcaccttgtccaaaagctcagcccagaaaatgacaacgatgacgatgaagatgttcaagttgaggtggctgagaaagtgcagaaatcgtctgcccccagggagatgcagaaggctgaagaaaaggaagtccctgaggactcactggaggaatgtgccatcacttgttcaaatagccatggcccttatgactccaaccagccacataagaaaaccaaaatcacatttgaggaagacaaagtcgactcaactctcattggctcatcctctcatgttgaatgggaggatgctgtacacattattccagaaaatgaaagtgatgatgaggaagaggaagaaaaagggccagtgtctcccaggaatctgcaggagtctgaagaggaggaagtcccccaggagtcctgggatgaaggttattcgactctctcaattcctcctgaaatgttggcctcgtaccagtcttacagcagcacatttcactcattagaggaacagcaagtctgcatggctgttgacataggcagacatcggtgggatcaagtgaaaaaggaggaccaagaggcaacaggtcccaggctcagcagggagctgctggatgagaaagagcctgaagtcttgcaggactcactggatagatgttattcaactccttcaggttgtcttgaactgactgactcatgccagccctacagaagtgccttttacgtattggagcaacagcgtgttggcttggctattgacatggatgaaattgaaaagtaccaagaagtggaagaagaccaagacccatcatgccccaggctcagcagggagctgctggatgagaaagagcctgaagtcttgcaggactcactggatagatgttattcgactccttcagattatcttgaactgcctgacttaggccagccctacagcagtgctgtttactcattggaggaacagtaccttggcttggctcttgacgtggacagaattaaaaaggaccaagaagaggaagaagaccaaggcccaccatgccccaggctcagcagggagctgctggaggtagtagagcctgaagtcttgcaggactcactggatagatgttattcaactccttccagttgtcttgaacagcctgactcctgccagccctatggaagttccttttatgcattggaggaaaaacatgttggcttttctcttgacgtgggagaaattgaaaagaaggggaaggggaagaaaagaaggggaagaagatcaaagaagaaaagaagaaggggaagaaaagaaggggaagatgacaacccaccatgccccaggctctacggcgtgctgatggaagtggaagagcctgaagtcttacaggactcactggatagatgttattcgactccgtcaatgtactttgaacaacctgactcattccagcactacagaagtgtgttttactcatttgaggaagagcatatcagcttcgccctttacgtggacaataggttttttactttgacggtgacaagtctccacctggtgttccagatgggagtcatattcccacaataagcagctcttactaagccgagagatgtcattcctgcaggcaggacctataggcacgagaagatttgaatgaaagtacagttccatttggaagcccagacataggatgggtcagtgagcatggctctattcctattctcaaaccatgccattggcaacctgtgctcaatctgaagacaatggacccatgttaggtgtgacacgttcacataactgtgcagaacatgccgggagtgatcagtcagacattttaatttgaaccacgtatctctgggtagctacaaaattcctcagggatttcattttgcaggcatgtctctgagcttctatacctgctcaaggtcattgtcatctttgtgtttagctcatccaaaggtgttaccctggtttcaatgaacctaacctcattctttgtgtcttcagtgttggcttgttttagctgatccatctgtaacacaggagggatccttggctgaggattgtatttcagaaccaccaactgctcttgacaattgttaacccgctaggctcctttggttagagaagccacagtccttcagcctccaattggtgtcagtacttaggaagaccacagctagatggacaaacagcattgggaggccttagccctgctcctctcaattccatcctgtagagaacaggagtcaggagccgctggcaggagacagcatgtcacccaggactctgccggtgcagaatatgaacaatgccatgttcttgcagaaaacacttagcctgagtttcataggaggtaatcaccagacaactgcagaatgtagaacactgagcaggacaactgacctgtctccttcacatagtccatatcaccacaaatcacacaacaaaaaggagaagagatattttgggttcaaaaaaagtaaaaagataatgtagctgcatttctttagttattttgaaccccaaatatttcctcatctttttgttgttgtcatggatggtggtgacatggacttgtttatagaggacaggtcagctgtctggctcaatgatctacattctgaagttgtctgaaaatgtcttcatgattaaattcagcctaaacattttgccgggaacactgcagagacaatgctgtgagtttccaacctcagcccatctgcgggcagagaaggtctagtttgtccatcaccattatgatatcaggactggttacttggttaaggaggggtctaggagatctgtcccttttagagacaccttacttataatgaagtacttgggaaagcggttttcaagagtataaatatcctgtattctaatgatcatcctctaaacattttatcatttattaatcctccctgcctgtgtctattattatattcatatctctacactgcaaattttgggtctcaatttttactgtgcctttgtttttactagtgtctgctgttgcaaaaagaagaaaacattctctgcctgagttttaatttttgtccaaagttaattttaatctatacaattaaaaccttttgcctatcactctggacttctggattgttttttacattcagtgttataatatttgattatgctgattggttttggtgggtactgatgcgaattaataaaaacatttcatttccatgtt

SEQ ID NO: 158736 - DNA, 4272 bp, Homo sapiens
  Payload ID: 11058
  Gene Symbol: NBPF15
  Gene Name: neuroblastoma breakpoint family, member 15
  Uniprot ID: Q8N660
  ENST ID: ENST00000581897
  CDS Start-End: 633-2645
gcaatctgaaagcaaatcctgtttagatgcaggcgaaggttcctggtgacccaggctctcaccttaccgtcccttaccgtcctcctgagggtgtcctggagcttcagtgctgtgtgttcttggcctccacgctggggctgccaccaactcccactgtccagggcttccagtggactctccgaggtactgatgtagaaacttccccattcggtgcaccaagagcaacctcacacggtgtgggctgaatgaagagctgccagatcccacaggtggcaagggctctggaacagccacataaagcccttgaagataaggatggtcaaacaaaataatatcatacctggagaaactcagatcttggtaagatttactggttgggaatccaaagttaatgccaagaagcagccgccagttgggatcaaatgtgagcctatggatcaagacggttacctggcacgctggccacaatctacctcactcttatcagagtctgcgctactgacagtgctttcagctctgagttgaggcacctcgaaccttgtttttgtggtgaaggatcctaaagtgctgtggggagtgatcacatttttgacaacatccctgactccacctcttctgccacaaacgtcagcatggtggtatcagccggccctttgtccagcgagaaggcagagatgaacattctagaaatcaatgagaaattgcgcccccagttggcagagaagaaacagcagttcagaaacctcaaagagaaatgttttctaactcaactggccggcttcctggccaaccgacagaagaaatacaaatatgaagagtgcaaagatctcataaaatttatgctgaggaatgagcgacagttcaaggaggagaagcttgcagagcagctcaagcaagctgaggagctcaggcaatataaagtcctggttcacgctcaggaacgagagctgacccagttaagggagaagttacgggaagggagagatgcctcccgctcattgaatgagcatctccaggccctcctcactccggatgagccggacaagtcccaggggcaggacctccaagaacagctggctgaggggtgtagactgacacagcaccttgtccaaaagctcagcccagaaaatgacaacgatgacgatgaagatgttcaagttgaggtggctgagaaagtgcagaaatcgtctgcccccagggagatgcagaaggctgaagaaaaggaagtccctgaggactcactggaggaatgtgccatcacttgttcaaatagccatggcccttatgactccaaccagccacataagaaaaccaaaatcacatttgaggaagacaaagtcgactcaactctcattggctcatcctctcatgttgaatgggaggatgctgtacacattattccagaaaatgaaagtgatgatgaggaagaggaagaaaaagggccagtgtctcccaggaatctgcaggagtctgaagaggaggaagtcccccaggagtcctgggatgaaggttattcgactctctcaattcctcctgaaatgttggcctcgtaccagtcttacagcagcacatttcactcattagaggaacagcaagtctgcatggctgttgacataggcagacatcggtgggatcaagtgaaaaaggaggaccaagaggcaacaggtcccaggctcagcagggagctgctggatgagaaagagcctgaagtcttgcaggactcactggatagatgttattcaactccttcaggttgtcttgaactgactgactcatgccagccctacagaagtgccttttacgtattggagcaacagcgtgttggcttggctattgacatggatgaaattgaaaagtaccaagaagtggaagaagaccaagacccatcatgccccaggctcagcagggagctgctggatgagaaagagcctgaagtcttgcaggactcactggatagatgttattcgactccttcagattatcttgaactgcctgacttaggccagccctacagcagtgctgtttactcattggaggaacagtaccttggcttggctcttgacgtggacagaattaaaaaggaccaagaagaggaagaagaccaaggcccaccatgccccaggctcagcagggagctgctggaggtagtagagcctgaagtcttgcaggactcactggatagatgttattcaactccttccagttgtcttgaacagcctgactcctgccagccctatggaagttccttttatgcattggaggaaaaacatgttggcttttctcttgacgtgggagaaattgaaaagaaggggaaggggaagaaaagaaggggaagaagatcaaagaagaaaagaagaaggggaagaaaagaaggggaagatgacaacccaccatgccccaggctctacggcgtgctgatggaagtggaagagcctgaagtcttacaggactcactggatagatgttattcgactccgtcaatgtactttgaacaacctgactcattccagcactacagaagtgtgttttactcatttgaggaagagcatatcagcttcgccctttacgtggacaataggttttttactttgacggtgacaagtctccacctggtgttccagatgggagtcatattcccacaataagcagctcttactaagccgagagatgtcattcctgcaggcaggacctataggcacgagaagatttgaatgaaagtacagttccatttggaagcccagacataggatgggtcagtgagcatggctctattcctattctcaaaccatgccattggcaacctgtgctcaatctgaagacaatggacccatgttaggtgtgacacgttcacataactgtgcagaacatgccgggagtgatcagtcagacattttaatttgaaccacgtatctctgggtagctacaaaattcctcagggatttcattttgcaggcatgtctctgagcttctatacctgctcaaggtcattgtcatctttgtgtttagctcatccaaaggtgttaccctggtttcaatgaacctaacctcattctttgtgtcttcagtgttggcttgttttagctgatccatctgtaacacaggagggatccttggctgaggattgtatttcagaaccaccaactgctcttgacaattgttaacccgctaggctcctttggttagagaagccacagtccttcagcctccaattggtgtcagtacttaggaagaccacagctagatggacaaacagcattgggaggccttagccctgctcctctcaattccatcctgtagagaacaggagtcaggagccgctggcaggagacagcatgtcacccaggactctgccggtgcagaatatgaacaatgccatgttcttgcagaaaacacttagcctgagtttcataggaggtaatcaccagacaactgcagaatgtagaacactgagcaggacaactgacctgtctccttcacatagtccatatcaccacaaatcacacaacaaaaaggagaagagatattttgggttcaaaaaaagtaaaaagataatgtagctgcatttctttagttattttgaaccccaaatatttcctcatctttttgttgttgtcatggatggtggtgacatggacttgtttatagaggacaggtcagctgtctggctcaatgatctacattctgaagttgtctgaaaatgtcttcatgattaaattcagcctaaacattttgccgggaacactgcagagacaatgctgtgagtttccaacctcagcccatctgcgggcagagaaggtctagtttgtccatcaccattatgatatcaggactggttacttggttaaggaggggtctaggagatctgtcccttttagagacaccttacttataatgaagtacttgggaaagcggttttcaagagtataaatatcctgtattctaatgatcatcctctaaacattttatcatttattaatcctccctgcctgtgtctattattatattcatatctctacactgcaaattttgggtctcaatttttactgtgcctttgtttttactagtgtctgctgttgcaaaaagaagaaaacattctctgcctgagttttaatttttgtccaaagttaattttaatctatacaattaaaaccttttgcctatcactctggacttctggattgttttttacattcagtgttataatatttgattatgctgattggttttggtgggtactgatgcgaattaataaaaacatttcatttccatgtt

SEQ ID NO: 158737 - DNA, 4535 bp, Homo sapiens
  Payload ID: 11058
  Gene Symbol: NBPF15
  Gene Name: neuroblastoma breakpoint family, member 15
  Uniprot ID: Q8N660
  ENST ID: ENST00000488031
  CDS Start-End: 900-2912
gggaccctgaggagccagctggcgcaggctatgggctgggcggcggttgagacagcggcggtatcgggaggggtaggtgagggtcgcgaggctgcgtgagcatctgagtgaacgcggtgcttttgggaacgcgggacgggcgacctgtggcgccaggagcgggccgaggcgtggcgcacggatgccgtctggatgggaagttacggtttacagcgaagtccacccagcgtttccgaggtgaaggcgccgcgccaggccgggcgggcggcaatctgaaagcaaatcctgtttagatgcaggcgaaggttcctggtgacccaggctctcaccttaccgtcccttaccgtcctcctgagggtgtcctggagcttcagtgctgtgtgttcttggcctccacgctggggctgccaccaactcccactgtccagggcttccagtggactctccgaggtactgatgtagaaacttccccattcggtgcaccaagagcaacctcacacggtgtgggctgaatgaagagctgccagatcccacaggtggcaagggctctggaacagccacataaagcccttgaagataaggatggtcaaacaaaataatatcatacctggagaaactcagatcttggtaagatttactggttgggaatccaaagttaatgccaagaagcagccgccagttgggatcaaatgtgagcctatggatcaagacggttacctggcacgctggccacaatctacctcactcttatcagagtctgcgctactgacagtgctttcagctctgagttgaggcacctcgaaccttgtttttgtggtgaaggatcctaaagtgctgtggggagtgatcacatttttgacaacatccctgactccacctcttctgccacaaacgtcagcatggtggtatcagccggccctttgtccagcgagaaggcagagatgaacattctagaaatcaatgagaaattgcgcccccagttggcagagaagaaacagcagttcagaaacctcaaagagaaatgttttctaactcaactggccggcttcctggccaaccgacagaagaaatacaaatatgaagagtgcaaagatctcataaaatttatgctgaggaatgagcgacagttcaaggaggagaagcttgcagagcagctcaagcaagctgaggagctcaggcaatataaagtcctggttcacgctcaggaacgagagctgacccagttaagggagaagttacgggaagggagagatgcctcccgctcattgaatgagcatctccaggccctcctcactccggatgagccggacaagtcccaggggcaggacctccaagaacagctggctgaggggtgtagactgacacagcaccttgtccaaaagctcagcccagaaaatgacaacgatgacgatgaagatgttcaagttgaggtggctgagaaagtgcagaaatcgtctgcccccagggagatgcagaaggctgaagaaaaggaagtccctgaggactcactggaggaatgtgccatcacttgttcaaatagccatggcccttatgactccaaccagccacataagaaaaccaaaatcacatttgaggaagacaaagtcgactcaactctcattggctcatcctctcatgttgaatgggaggatgctgtacacattattccagaaaatgaaagtgatgatgaggaagaggaagaaaaagggccagtgtctcccaggaatctgcaggagtctgaagaggaggaagtcccccaggagtcctgggatgaaggttattcgactctctcaattcctcctgaaatgttggcctcgtaccagtcttacagcagcacatttcactcattagaggaacagcaagtctgcatggctgttgacataggcagacatcggtgggatcaagtgaaaaaggaggaccaagaggcaacaggtcccaggctcagcagggagctgctggatgagaaagagcctgaagtcttgcaggactcactggatagatgttattcaactccttcaggttgtcttgaactgactgactcatgccagccctacagaagtgccttttacgtattggagcaacagcgtgttggcttggctattgacatggatgaaattgaaaagtaccaagaagtggaagaagaccaagacccatcatgccccaggctcagcagggagctgctggatgagaaagagcctgaagtcttgcaggactcactggatagatgttattcgactccttcagattatcttgaactgcctgacttaggccagccctacagcagtgctgtttactcattggaggaacagtaccttggcttggctcttgacgtggacagaattaaaaaggaccaagaagaggaagaagaccaaggcccaccatgccccaggctcagcagggagctgctggaggtagtagagcctgaagtcttgcaggactcactggatagatgttattcaactccttccagttgtcttgaacagcctgactcctgccagccctatggaagttccttttatgcattggaggaaaaacatgttggcttttctcttgacgtgggagaaattgaaaagaaggggaaggggaagaaaagaaggggaagaagatcaaagaagaaaagaagaaggggaagaaaagaaggggaagatgacaacccaccatgccccaggctctacggcgtgctgatggaagtggaagagcctgaagtcttacaggactcactggatagatgttattcgactccgtcaatgtactttgaacaacctgactcattccagcactacagaagtgtgttttactcatttgaggaagagcatatcagcttcgccctttacgtggacaataggttttttactttgacggtgacaagtctccacctggtgttccagatgggagtcatattcccacaataagcagctcttactaagccgagagatgtcattcctgcaggcaggacctataggcacgagaagatttgaatgaaagtacagttccatttggaagcccagacataggatgggtcagtgagcatggctctattcctattctcaaaccatgccattggcaacctgtgctcaatctgaagacaatggacccatgttaggtgtgacacgttcacataactgtgcagaacatgccgggagtgatcagtcagacattttaatttgaaccacgtatctctgggtagctacaaaattcctcagggatttcattttgcaggcatgtctctgagcttctatacctgctcaaggtcattgtcatctttgtgtttagctcatccaaaggtgttaccctggtttcaatgaacctaacctcattctttgtgtcttcagtgttggcttgttttagctgatccatctgtaacacaggagggatccttggctgaggattgtatttcagaaccaccaactgctcttgacaattgttaacccgctaggctcctttggttagagaagccacagtccttcagcctccaattggtgtcagtacttaggaagaccacagctagatggacaaacagcattgggaggccttagccctgctcctctcaattccatcctgtagagaacaggagtcaggagccgctggcaggagacagcatgtcacccaggactctgccggtgcagaatatgaacaatgccatgttcttgcagaaaacacttagcctgagtttcataggaggtaatcaccagacaactgcagaatgtagaacactgagcaggacaactgacctgtctccttcacatagtccatatcaccacaaatcacacaacaaaaaggagaagagatattttgggttcaaaaaaagtaaaaagataatgtagctgcatttctttagttattttgaaccccaaatatttcctcatctttttgttgttgtcatggatggtggtgacatggacttgtttatagaggacaggtcagctgtctggctcaatgatctacattctgaagttgtctgaaaatgtcttcatgattaaattcagcctaaacattttgccgggaacactgcagagacaatgctgtgagtttccaacctcagcccatctgcgggcagagaaggtctagtttgtccatcaccattatgatatcaggactggttacttggttaaggaggggtctaggagatctgtcccttttagagacaccttacttataatgaagtacttgggaaagcggttttcaagagtataaatatcctgtattctaatgatcatcctctaaacattttatcatttattaatcctccctgcctgtgtctattattatattcatatctctacactgcaaattttgggtctcaatttttactgtgcctttgtttttactagtgtctgctgttgcaaaaagaagaaaacattctctgcctgagttttaatttttgtccaaagttaattttaatctatacaattaaaaccttttgcctatcactctggacttctggattgttttttacattcagtgttataatatttgattatgctgattggttttggtgggtactgatgcgaattaataaaaacatttcatttcca

SEQ ID NO: 158738 - DNA, 3670 bp, Homo sapiens
  Payload ID: 11059
  Gene Symbol: NBPF19
  Gene Name: neuroblastoma breakpoint family, member 19
  ENST ID: ENST00000369227
  CDS Start-End: 18-2783
aagacctcataaaatttatgctgaggaatgagcgacagttcaaggaggagaagcttgcagagcagctgaagcaagctgaggagctcaggcaatataaagtcctgtttcactctcaggaacgagagctgacccagttaagggagaagttacgggaagggagagatgcctcccgctcattgaatgagcatctccaggccctcctcactccggatgagccggacaagtcccaggggcaggacctccaagaacagctggctgaggggtgtagactggcacagcaccttgtccaaaagctcagcccagaaaatgacaacgatgacgatgaagatgttcaagttgaggtggctgagaaagtgcagaaatcgtctgcccccagggagatgcagaaggctgaagaaaaggaagtccctgaggactcactggaggaatgtgccatcacttattcaaatagccatggcccttatgactccaaccagccacataggaaaaccaaaatcacatttgaggaagacaaagtcgactcaactctcattggctcatcctctcatgttgaatgggaggatgctgtacacattattccagaaaatgaaagtgatgatgaggaagaggaagaaaaagggccagtgtctcccaggaatctgcaggagtctgaagaggaggaagtcccccaggagtcctgggatgaaggttattcgactctctcaattcctcctgaaatgttggcctcgtaccagtcttacagcagcacatttcactcattagaggaacagcaagtctgcatggctgttgacataggcagacatcgctgggatcaagtgaaaaaggaggaccaagaggcaacaggtcccaggctcagcagggagctgctggatgagaaagggcctgaagtcttgcaggactcactggatagatgttattcaactccttcaggttgtcttgaactgactgactcatgccagccctacagaagtgccttttacgtattggagcaacagcgtgttggcttggctattgacatggatgaaattgaaaagtaccaagaagtggaagaagaccaagacccatcatgccccaggctcagcagggagctgctggatgagaaagagcctgaagtcttgcaggactcactggatagatgttattcgactccttcaggttatcttgaactgcctgacttaggccagccctacagcagtgctgtttactcattggaggaacagtaccttggcttggctcttgacgtggacagaattaaaaaggaccaagaagaggaagaagaccaaggcccaccatgccccaggctcagcagggagctgctggaggtagtagagcctgaagtcttgcaggactcactggatagatgttattcaactccttccagttgtcttgaacagcctgactcctgccagccctatggaagttccttttatgcattggaggaaaaacatgttggcttttctcttgacgtgggagaaattgaaaagaaggggaaggggaagaaaagaaggggaagaagatcaaagaaggaaagaagaaggggaagaaaagaaggggaagaagatcaaaacccaccatgccccaggctcagcagggagctgctggatgagaaagggcctgaagtcttgcaggactcactggatagatgttattcaactccttcaggttgtcttgaactgactgactcatgccagccctacagaagtgccttttacatattggagcaacagtgtgttggcttggctgttgacatggatgaaattgaaaagtaccaagaagtggaagaagaccaagacccatcatgccccaggctcagcagggagctgctggatgagaaagggcctgaagtcttgcaggactcactggatagatgttattcaactccttcaggttgtcttgaactgactgactcatgccagccctacagaagtgccttttacatattggagcaacagtgtgttggcttggctgttgacatggatgaaattgaaaagtaccaagaagtggaagaagaccaagacccatcatgccccaggctcagcagggagctgctggatgagaaagagcctgaagtcttgcaggactcactggatagatgttattcgactccttcaggttatcttgaactgcctgacttaggccagccctacagcagtgctgtttactcattggaggaacagtaccttggcttggctcttgacgtggacagaattaaaaaggaccaagaagaggaagaagaccaaggcccaccatgccccaggctcagcagggagctgctggaggtagtagagcctgaagtcttgcaggactcactggatagatgttattcaactccttccagttgtcttgaacagcctgactcctgccagccctatggaagttccttttatgcattggaggaaaaacatgttggcttttctcttgacgtgggagaaattgaaaagaaggggaaggggaagaaaagaaggggaagaagatcaaagaaggaaagaagaaggggaagaaaagaaggggaagaagatcaaaacccaccatgccccaggctcaacagcgtgctgatggaagtggaagagcctgaagtcttacaggactcactggatggatgttattcgactccgtcaatgtactttgaactacctgactcattccagcactacagaagtgtgttttactcatttgaggaagagcatatcagcttcgccctttacttggacaataggttttttactttgacggtgacaagtctccatctggtgttccagatgttagtcatattcccacaataggcagcccttactaagccgagagatgtcattcctgcaggcaggacctataggcacgtgaagatttgaatgaaactacagttccatttggaagcccagacataggatgggtcagtgggcatggctcttttcctattctcaaaccatgccagtggcaacctgtgctcagtctgaagacaatggacccacgttaggtgtgacacgttcacataactgtgcagcacatgccgggagtgatcagtcggacattttaatttgaaccacgtatctttgggtagctacaaaattcctcagggatttcattttgcaggcatgtctctgagcttctatacctgctcaaggtcagtgtcatctttgtgtttagctcatccaaaggtgttaccctggtttcaatgaacctaacctcattctttgtgtcttcagtgttggcttgttttagctgatccatctgtaacacaggagggatccttggctgaggattgtatttcagaaccaccaactgctctttacaattgttaacccgctaggctcctttggttagagaagccacagtccttcagcctccaattggtgtcagtacttaggaagaccacagctagatggacaaacagcattgggaggccttagccctgctcctctcaattccatcctgtagagaacaggagtcaggagccgctggcaggagacagcatgtcacccaggactctgccggtgcagaatatgaacaatgccatgttcttgcagaaaacgcttagcctgagtttcataggaggtaatcaccagacaactgcagaatgtagaacactgagcaggacaactgacctgtctccttcacatagtccatatcaccacaaatcacacaacaaaaaggagaagatatattttgggtt

SEQ ID NO: 158739 - DNA, 5034 bp, Homo sapiens
  Payload ID: 11059
  Gene Symbol: NBPF19
  Gene Name: neuroblastoma breakpoint family, member 19
  ENST ID: ENST00000578189
  CDS Start-End: 447-1157
agacatgtgggttctttcaaacatactggacttcctccttaggttttagttgtgttagtcaatagttgaatgttgaaggagaggatgccaagggatattaaagaagttgtccagtgtacagaagcttactggaaggagtggccaactagttaaaggtttgacacctcaatatcaacaaaatgccaagtggatcattttgactctcacagcaatccaactggacatttgaccatgccccgtggtcagtggagagcttcttctctgaaggccacttttgtctagcacatcaaggctatacacctctttcactaagaagaatttggcacttttatgttgtgagagctgagattcaccattctccaccatcctgagaagagctttgatagaagggctactcctgagcattgcagtgtcgagatggctatgaaccctgtgtaaatgaaggaatgtgtgttacctaccacaatggcacaggatactgcaaatgtccagaaggcttcttgggggaatattgtcaacatcgagacccctgtgagaagaaccgctgccagaatggtgggacttgtgtggcccaggccatgctggggaaagccacgtgccgatgtgcctcagggtttacaggagaggactgccagtactcgacatctcatccatgctttgtgtctcgaccttgcctgaatggcggcacatgccatatgctcagccgggatacctatgagtgcacctgtcaagtcgggtttacaggtaaggagtgccaatggaccgatgcctgcctgtctcatccctgtgcaaatggaagtacctgtaccactgtggccaaccagttctcctgcaaatgcctcacaggcttcacagggcagaagtgtgagactgatgtcaatgagtgtgacattccaggacactgccagcatggtggcacctgcctcaacctgcctggttcctaccagtgccagtgccttcagggcttcacaggccagtactgtgacagcctgtatgtgccctgtgcaccctcgccttgtgtcaatggaggcacctgtcggcagactggtgacttcacttttgagtgcaactgccttccagaaacagtgagaagaggaacagagctctgggaaagagacagggaagtctggaatggaaaagaacacgatgagaattagacactggaaaatatgtatgtgtggttaataaagtgctttaaactgaattgacattaacagtaggtgatcaactttactatgtgcttgtgcttttgcttttgatggagtaattcattgttttcttatccacctaaatgcacccagctgcccttgattttctctgggctactggccttcacaaccctctcccatgtaccctctctgactttggggtaaccctcccctaacttaaagctagagaattctgaaactgaggaggggatcctctgttaatcagtgagcactttttgatgagctgatagatgatatatgagagactatgcgtggcacaatactttgttacactcttcactgatacaagtgttctagagtgcacacacaacccaaagatagaaataaaaagaggagcagtgtcggggagcttggggcctggtgttccatggagagggagaaaggaacaagcttggccaattcattcaactccttataaaaatgatgaggaggctgaaaaccaagaattttgattgggaacagaatacaagcagctgaagcagatgaattactaagcaacaaagatcctgtttttatacaaatatccttagtacaaaaacaaaagaaggaaaactgtaggggggagtaatgtgctaagtaagcagaattgcctccaaaagaagttgttctagttactctttcagagtgggaatcttagattctggtattgtggatatggttcacatataatgggattgtgtgttttattttggaggaattaaaggtcatagtttggtcctcagtataaaatcaactggtaatttgttcatttcatttggtaaaaatgtattgactgcctgctatgttctaggcaccatgctgtgtatttggaatacagctatacaaagcattgtcacataattgaaatgaaaattttatattatttaagtcacaagaacaagctatttaattatattacttttagtttctcttttaataaagaatagataatgctatcattctagatactaaataagtattttcttaacataatattactatccactttatcttgtagaagaaataactaaaatacatctgtcttcactcctgtatttgtttgcattttaaggattaaagacagaaatagaaatgtaaacaactttattttgaaaatatttcaacactgcaaatatctctgggtctgatattctagtaatctaattggctagtaattgatgttagtgtgatttattgttgaaggctaaatgtgtttttcagtttcaagaaaattgcttttaataattgcctagaacaagaggttgatttggcagcaagatgttgacgggaagttagagaagtcaataaaggaagtttttagctgagagagagtgattattcactcccatagcctctgcattgttatccattagccacgataagaaccttagggaattctgagagtgtgtccaggaaaggatctgtcaaactagaatagtatctcctccttgagaaaggaaataaccaaggattccgcagctgagaggctgccagggctagtgaaatagagtaaggaaatcttggctgtctcttattctctggttgtagtttaacgcaagacacttatttactcactgatggtgtgtgtgtgtgtgggaggggagattagcatgaggggtgggaatggggagatttgatgaagagaaaactaacatttttttggtgactcaggaactgtgccaggtacttccatgcttattagctcaattacacaaaaatcttgggaccaggtattatttttcaagtcttcccacatgaagtaactgaagtttggagatgttaagtgattcacccaaagttgtacagctaatatgtggttaggctgggtcctgaaaccgaggcagtttattttcaaagcctttgctttgtgcatcttactgcgccacattgcactgcacatctgcttcctgaaagcactttgtaggtgtgtaaaacttttcgttaaatgctttaagctgtttgggttaaaaatatatgttcatgttataagaaaaccaagacactcctaattataatcaaatagtacttgttacatatcaatatgtgtgtgtgtgtgtgtgtgtgtgtgtgtggtatatatatatatatcgcattgtgcagatgtttaaaagtagttacatagactagttcttgcttttcagggtcccataatctaaaccagatgacttcagctttggataaatatatagaaggaaatttaaagagaattcaaaacaatagatgatgcagtgacactgtgaataaatgttatttatacagtttgtaagatttcatgctcattgttcgtatgtcccaggtggagttcagaaaatattcagttcatttccacaaagggaaatagtgcctagagatggttttcttttaaaaagtccttttcataatgcagtgcccttccttccattgcccttcattccattgcttcccatgcttgtcaagagactaaaatgttacttatagtaatagtcactatctcaatgtaaatagcacccttatttgatgagaattattatttcagttctaaaaatggggaaacaaagtcagcaggaggcaaagtagcttgttaaagtattctgcaactttcaaatggttgcttccactgcatttcacgtcttggcacttctaattgagggttactctaaccaccctatttaaaattgtaactgtcccccacccccttaattactaaccctggtctactttttgttttctttttctgtaactcttatcttcttactatataatttatactatataatttacttcattatgtctattgtttattgtctgtcttttccaaattctactgcctcttaccctctccagaatgaaaactagtatctttgtttttgtttactgatgtaacccaaacacctacaaacagtgcccagtatatactaggcccgcaaatatatattggctgactgactgtatggtttagtatcatgtcatagtattgagactgtaactttggtcttctcattttcttctttgtattgtgcgtcctagacttagtttggcctctccttttgtccttgtatactctaatactggataagaattttggagtctttttcaactctgagtcagtgaatgccacataacttagtgactatatttaaatggttaatttacaattttttccctgcaaaggatactgtagtcactgtgagtattttagtattactgtaggactcaagagggaattaaaactacaaaaatgacgcgtcttgtatgacacagaaagaaatgtttcttcacagagggaggagaaaaatatcttcaagagagaactaatagaatcaaatcaatgaaccatgtctcatctttttggataagtaactgttagtaatccagacacttcatgagctttcattatgtaaagtctttagcagaagctaaaggaggggcaccaaccacagtaattttaacttaagaacaaaatggagcatgaaaataaattattaaatcatttactcccactatttttgggttagggccaataatggggagagaaagaggtagactagttttgtgtttgtggctattttaatagagtagcacaagtaatcaaaaaacagtaggctgttttgaatttactggctgtcccttatgagttcacagttagattggactgtcctcaatgtactttcttttttttctttctttcccacatctctttatttctctgattttgtttaaacttcataaagagctctctgatctttcctttccaaacaatgaaggtttatcctttgtaaactacctctgtactccacaggctgatgatatgtgatatccctatatcattaaagtaaagcctaagcac

SEQ ID NO: 158740 - DNA, 14425 bp, Homo sapiens
  Payload ID: 11059
  Gene Symbol: NBPF19
  Gene Name: neuroblastoma breakpoint family, member 19
  ENST ID: ENST00000621744
  CDS Start-End: 1271-12802
aaacttcgggcggcggctgaggcggcggccgaggagcggcggactcggggcgcggggagtcgaggcatttgcgcctgtgcttcggaccgtagcgccagggcctgagcctttgaagcaggaggaggggaggagagagtggggctcctctatcgggaccccctccccatgtggatctgcccaggcggcggcggcggcggcggcggcggcggaggaggcggcgaccgagaagatgcccgccctgcgccgctctgctgtgggcgctgctggcgctctggctgtgctgcgcgacccccgcgcatgcattgcagtgtcgagatggctatgaaccctgtgtaaatgaaggaatgtgtgttacctaccacaatggcacaggatactgcaaatgtccagaaggcttcttgggggaatattgtcaacatcgagacccctgtgagaagaaccgctgccagaatggtgggacttgtgtggcccaggccatgctggggaaagccacgtgccgatgtgcctcagggtttacaggagaggactgccagtactcgacatctcatccatgctttgtgtctcgaccttgcctgaatggcggcacatgccatatgctcagccgggatacctatgagtgcacctgtcaagtcgggtttacaggtaaggagtgccaatggaccgatgcctgcctgtctcatccctgtgcaaatggaagtacctgtaccactgtggccaaccagttctcctgcaaatgcctcacaggcttcacagggcagaagtgtgagactgatgtcaatgagtgtgacattccaggacactgccagcatggtggcacctgcctcaacctgcctggttcctaccagtgccagtgccttcagggcttcacaggccagtactgtgacagcctgtatgtgccctgtgcaccctcgccttgtgtcaatggaggcacctgtcggcagactggtgacttcacttttgagtgcaactgccttccagacggttacctggcacgctggccacattctgcctcactcttatcagagtctgagctactggcagtgctttcagctctgagttgaggcacctcgaaccttgtttttgtggtgaaggatcctaaagtgctgtggggagtgatcacatttttcacaacagtaagttaagaatttcagttactgacatccctcagtcctgattaaaccgatttgatttcaccagtttttaacccatcatatgtttgggtttcttctccccagtccctgactccacctcttctgccacaaacgtcagcatggtggtatcagccggcccttggtccagtgagaaggcagagatgaacattctagaaatcaacgagacattgcgcccccagctggcagagaagaaacagcagttcagaaacctcaaagagaaatgttttctaactcaactggccggcttcctggccaaccgacagaagaaatacaagtatgaagagtgtaaagacctcataaaatttatgctgaggaatgagcgacagttcaaggaggagaagcttgcagagcagctgaagcaagctgaggagctcaggcaatataaagtcctgtttcactctcaggaacgagagctgacccagttaagggagaagttacgggaagggagagatgcctcccgctcattgaatgagcatctccaggccctcctcactccggatgagccggacaagtcccaggggcaggacctccaagaacagctggctgaggggtgtagactggcacagcaccttgtccaaaagctcagcccagaaaatgacaacgatgacgatgaagatgttcaagttgaggtggctgagaaagtgcagaaatcgtctgcccccagggagatgcagaaggctgaagaaaaggaagtccctgaggactcactggaggaatgtgccatcacttattcaaatagccatggcccttatgactccaaccagccacataggaaaaccaaaatcacatttgaggaagacaaagtcgactcaactctcattggctcatcctctcatgttgaatgggaggatgctgtacacattattccagaaaatgaaagtgatgatgaggaagaggaagaaaaagggccagtgtctcccaggaatctgcaggagtctgaagaggaggaagtcccccaggagtcctgggatgaaggttattcgactctctcaattcctcctgaaatgttggcctcgtaccagtcttacagcagcacatttcactcattagaggaacagcaagtctgcatggctgttgacataggcagacatcgctgggatcaagtgaaaaaggaggaccaagaggcaacaggtcccaggctcagcagggagctgctggatgagaaagggcctgaagtcttgcaggactcactggatagatgttattcaactccttcaggttgtcttgaactgactgactcatgccagccctacagaagtgccttttacgtattggagcaacagcgtgttggcttggctattgacatggatgaaattgaaaagtaccaagaagtggaagaagaccaagacccatcatgccccaggctcagcagggagctgctggatgagaaagagcctgaagtcttgcaggactcactggatagatgttattcgattccttcaggttatcttgaactgcctgacttaggccagccctacagcagtgctgtttactcattggaggaacagtaccttggcttggctcttgacgtggacagaattaaaaaggaccaagaagaggaagaagaccaagacccaccatgccccaggctcagcagggagctggtggaggtagtagagcctgaagtcttgcaggactcactggatagatgttattcaactccttccagttgtcttgaacagcctgactcctgccagccctatggaagttccttttatgcattggaggaaaaacatgttggcttttctcttgacgtgggagaaattgaaaagaaggggaaggggaagaaaagaaggggaagaagatcaaagaaggaaagaagaaggggaagaaaagaaggggaagaagatcaaaacccaccatgccccaggctcagcagggagctgctggatgagaaagggcctgaagtcttgcaggactcactggatagatgttattcaactccttcaggttgtcttgaactgactgactcatgccagccctacagaagtgccttttacatattggagcaacagtgtgttggcttggctgttgacatggatgaaattgaaaagtaccaagaagtggaagaagaccaagacccatcatgccccaggctcagcagggagctgctggatgagaaagagcctgaagtcttgcaggactcactggatagatgttattcgattccttcaggttatcttgaactgcctgacttaggccagccctacagcagtgctgtttactcattggaggaacagtaccttggcttggctcttgacgtggacagaattaaaaaggaccaagaagaggaagaagaccaagacccaccatgccccaggctcagcagggagctggtggaggtagtagagcctgaagtcttgcaggactcactggatagatgttattcaactccttccagttgtcttgaacagcctgactcctgccagccctatggaagttccttttatgcattggaggaaaaacatgttggcttttctcttgacgtgggagaaattgaaaagaaggggaaggggaagaaaagaaggggaagaagatcaaagaaggaaagaagaaggggaagaaaagaaggggaagaagatcaaaacccaccatgccccaggctcagcagggagctgctggatgagaaagggcctgaagtcttgcaggactcactggatagatgttattcaactccttcaggttgtcttgaactgactgactcatgccagccctacagaagtgccttttacatattggagcaacagtgtgttggcttggctattgacatggatgaaattgaaaagtaccaagaagtggaagaagaccaagacccatcatgccccaggctcagcagggagctgctggatgagaaagagcctgaagtcttgcaggactcactggatagatgttattcgattccttcaggttatcttgaactgcctgacttaggccagccctacagcagtgctgtttactcattggaggaacagtaccttggcttggctcttgacgtggacagaattaaaaaggaccaagaagaggaagaagaccaagacccaccatgccccaggctcagcagggagctggtggaggtagtagagcctgaagtcttgcaggactcactggatagatgttattcaactccttccagttgtcttgaacagcctgactcctgccagccctatggaagttccttttatgcattggaggaaaaacatgttggcttttctcttgacgtgggagaaattgaaaagaaggggaaggggaagaaaagaaggggaagaagatcaaagaaggaaagaagaaggggaagaaaagaaggggaagaagatcaaaacccaccatgccccaggctcagcagggagctgctggatgagaaagggcctgaagtcttgcaggactcactggatagatgttattcaactccttcaggttgtcttgaactgactgactcatgccagccctacagaagtgccttttacatattggagcaacagtgtgttggcttggctgttgacatggatgaaattgaaaagtaccaagaagtggaagaagaccaagacccatcatgccccaggctcagcagggagctgctggatgagaaagagcctgaagtcttgcaggactcactggatagatgttattcgattccttcaggttatcttgaactgcctgacttaggccagccctacagcagtgctgtttactcattggaggaacagtaccttggcttggctcttgacgtggacagaattaaaaaggaccaagaagaggaagaagaccaagacccaccatgccccaggctcagcagggagctggtggaggtagtagagcctgaagtcttgcaggactcactggatagatgttattcaactccttccagttgtcttgaacagcctgactcctgccagccctatggaagttccttttatgcattggaggaaaaacatgttggcttttctcttgacgtgggagaaattgaaaagaaggggaaggggaagaaaagaaggggaagaagatcaaagaaggaaagaagaaggggaagaaaagaaggggaagaagatcaaaacccaccatgccccaggctcagcagggagctgctggatgagaaagggcctgaagtcttgcaggactcactggatagatgttattcaactccttcaggttgtcttgaactgactgactcatgccagccctacagaagtgccttttacatattggagcaacagtgtgttggcttggctgttgacatggatgaaattgaaaagtaccaagaagtggaagaagaccaagacccatcatgccccaggctcagcagggagctgctggatgagaaagagcctgaagtcttgcaggactcactggatagatgttattcgattccttcaggttatcttgaactgcctgacttaggccagccctacagcagtgctgtttactcattggaggaacagtaccttggcttggctcttgacgtggacagaattaaaaaggaccaagaagaggaagaagaccaagacccaccatgccccaggctcagcagggagctggtggaggtagtagagcctgaagtcttgcaggactcactggatagatgttattcaactccttccagttgtcttgaacagcctgactcctgccagccctatggaagttccttttatgcattggaggaaaaacatgttggcttttctcttgacgtgggagaaattgaaaagaaggggaaggggaagaaaagaaggggaagaagatcaaagaaggaaagaagaaggggaagaaaagaaggggaagaagatcaaaacccaccatgccccaggctcagcagggagctgctggatgagaaagggcctgaagtcttgcaggactcactggatagatgttattcaactccttcaggttgtcttgaactgactgactcatgccagccctacagaagtgccttttacatattggagcaacagtgtgttggcttggctgttgacatggatgaaattgaaaagtaccaagaagtggaagaagaccaagacccatcatgccccaggctcagcagggagctgctggatgagaaagagcctgaagtcttgcaggactcactggatagatgttattcgattccttcaggttatcttgaactgcctgacttaggccagccctacagcagtgctgtttactcattggaggaacagtaccttggcttggctcttgacgtggacagaattaaaaaggaccaagaagaggaagaagaccaagacccaccatgccccaggctcagcagggagctgctggaggtagtagagcctgaagtcttgcaggactcactggatagatgttattcaactccttccagttgtcttgaacagcctgactcctgccagccctatggaagttccttttatgcattggaggaaaaacatgttggcttttctcttgacgtgggagaaattgaaaagaaggggaaggggaagaaaagaaggggaagaagatcaaagaaggaaagaagaaggggaagaaaagaaggggaagaagatcaaaacccaccatgccccaggctcagcagggagctgctggatgagaaagggcctgaagtcttgcaggactcactggatagatgttattcaactccttcaggttgtcttgaactgactgactcatgccagccctacagaagtgccttttacatattggagcaacagtgtgttggcttggctgttgacatggatgaaattgaaaagtaccaagaagtggaagaagaccaagacccatcatgccccaggctcagcagggagctgctggatgagaaagagcctgaagtcttgcaggactcactggatagatgttattcgactccttcaggttatcttgaactgcctgacttaggccagccctacagcagtgctgtttactcattggaggaacagtaccttggcttggctcttgacgtggacagaattaaaaaggaccaagaagaggaagaagaccaaggcccaccatgccccaggctcagcagggagctgctggaggtagtagagcctgaagtcttgcaggactcactggatagatgttattcaactccttccagttgtcttgaacagcctgactcctgccagccctatggaagttccttttatgcattggaggaaaaacatgttggcttttctcttgacgtgggagaaattgaaaagaaggggaaggggaagaaaagaaggggaagaagatcaaagaaggaaagaagaaggggaagaaaagaaggggaagaagatcaaaacccaccatgccccaggctcagcagggagctgctggatgagaaagggcctgaagtcttgcaggactcactggatagatgttattcaactccttcaggttgtcttgaactgactgactcatgccagccctacagaagtgccttttacatattggagcaacagtgtgttggcttggctgttgacatggatgaaattgaaaagtaccaagaagtggaagaagaccaagacccatcatgccccaggctcagcagggagctgctggatgagaaagagcctgaagtcttgcaggactcactggatagatgttattcgactccttcaggttatcttgaactgcctgacttaggccagccctacagcagtgctgtttactcattggaggaacagtaccttggcttggctcttgacgtggacagaattaaaaaggaccaagaagaggaagaagaccaaggcccaccatgccccaggctcagcagggagctgctggaggtagtagagcctgaagtcttgcaggactcactggatagatgttattcaactccttccagttgtcttgaacagcctgactcctgccagccctatggaagttccttttatgcattggaggaaaaacatgttggcttttctcttgacgtgggagaaattgaaaagaaggggaaggggaagaaaagaaggggaagaagatcaaagaaggaaagaagaaggggaagaaaagaaggggaagaagatcaaaacccaccatgccccaggctcagcagggagctgctggatgagaaagggcctgaagtcttgcaggactcactggatagatgttattcaactccttcaggttgtcttgaactgactgactcatgccagccctacagaagtgccttttacatattggagcaacagtgtgttggcttggctgttgacatggatgaaattgaaaagtaccaagaagtggaagaagaccaagacccatcatgccccaggctcagcagggagctgctggatgagaaagagcctgaagtcttgcaggactcactggatagatgttattcgactccttcaggttatcttgaactgcctgacttaggccagccctacagcagtgctgtttactcattggaggaacagtaccttggcttggctcttgacgtggacagaattaaaaaggaccaagaagaggaagaagaccaaggcccaccatgccccaggctcagcagggagctgctggaggtagtagagcctgaagtcttgcaggactcactggatagatgttattcaactccttccagttgtcttgaacagcctgactcctgccagccctatggaagttccttttatgcattggaggaaaaacatgttggcttttctcttgacgtgggagaaattgaaaagaaggggaaggggaagaaaagaaggggaagaagatcaaagaaggaaagaagaaggggaagaaaagaaggggaagaagatcaaaacccaccatgccccaggctcagcagggagctgctggatgagaaagggcctgaagtcttgcaggactcactggatagatgttattcaactccttcaggttgtcttgaactgactgactcatgccagccctacagaagtgccttttacatattggagcaacagtgtgttggcttggctgttgacatggatgaaattgaaaagtaccaagaagtggaagaagaccaagacccatcatgccccaggctcagcagggagctgctggatgagaaagagcctgaagtcttgcaggactcactggatagatgttattcgactccttcaggttatcttgaactgcctgacttaggccagccctacagcagtgctgtttactcattggaggaacagtaccttggcttggctcttgacgtggacagaattaaaaaggaccaagaagaggaagaagaccaaggcccaccatgccccaggctcagcagggagctgctggaggtagtagagcctgaagtcttgcaggactcactggatagatgttattcaactccttccagttgtcttgaacagcctgactcctgccagccctatggaagttccttttatgcattggaggaaaaacatgttggcttttctcttgacgtgggagaaattgaaaagaaggggaaggggaagaaaagaaggggaagaagatcaaagaaggaaagaagaaggggaagaaaagaaggggaagaagatcaaaacccaccatgccccaggctcagcagggagctgctggatgagaaagggcctgaagtcttgcaggactcactggatagatgttattcaactccttcaggttgtcttgaactgactgactcatgccagccctacagaagtgccttttacatattggagcaacagtgtgttggcttggctgttgacatggatgaaattgaaaagtaccaagaagtggaagaagaccaagacccatcatgccccaggctcagcagggagctgctggatgagaaagagcctgaagtcttgcaggactcactggatagatgttattcgactccttcaggttatcttgaactgcctgacttaggccagccctacagcagtgctgtttactcattggaggaacagtaccttggcttggctcttgacgtggacagaattaaaaaggaccaagaagaggaagaagaccaaggcccaccatgccccaggctcagcagggagctgctggaggtagtagagcctgaagtcttgcaggactcactggatagatgttattcaactccttccagttgtcttgaacagcctgactcctgccagccctatggaagttccttttatgcattggaggaaaaacatgttggcttttctcttgacgtgggagaaattgaaaagaaggggaaggggaagaaaagaaggggaagaagatcaaagaaggaaagaagaaggggaagaaaagaaggggaagaagatcaaaacccaccatgccccaggctcagcagggagctgctggatgagaaagggcctgaagtcttgcaggactcactggatagatgttattcaactccttcaggttgtcttgaactgactgactcatgccagccctacagaagtgccttttacatattggagcaacagtgtgttggcttggctgttgacatggatgaaattgaaaagtaccaagaagtggaagaagaccaagacccatcatgccccaggctcagcagggagctgctggctgagaaagagcctgaagtcttgcaggacccactggatagatgttattcgactccttcaggttatcttgaactgcctgacttaggccagccctacagcagtgctgtttactcattggaggaacagtaccttggcttggctcttgacgtggacagaattaaaaaggaccaagaagaggaagaagaccaaggcccaccatgccccaggctcagcagggagctgctggaggtagtagagcctgaagtcttgcaggactcactggatagatgttattcaactccttccagttgtcttgaacagcctgactcctgccagccctatggaagttccttttatgcattggaggaaaaacatgttggcttttctcttgacgtgggagaaattgaaaagaaggggaaggggaagaaaagaaggggaagaagatcaaagaaggaaagaagaaggggaagaaaagaaggggaagaagatcaaaacccaccatgccccaggctcagcagggagctgctggatgagaaagggcctgaagtcttgcaggactcactggatagatgttattcaactccttcaggttgtcttgaactgactgactcatgccagccctacagaagtgccttttacatattggagcaacagtgtgttggcttggctgttgacatggatgaaattgaaaagtaccaagaagtggaagaagaccaagacccatcatgccccaggctcagcagggagctgctggctgagaaagagcctgaagtcttgcaggacccactggatagatgttattcgactccttcaggttatcttgaactgcctgacttaggccagccctacagcagtgctgtttactcattggaggaacagtaccttggcttggctcttgacgtggacagaattaaaaaggaccaagaagaggaagaagaccaaggcccaccatgccccaggctcagcagggagctgctggaggtagtagagcctgaagtcttgcaggactcactggatagatgttattcaactccttccagttgtcttgaacagcctgactcctgccagccctatggaagttccttttatgcattggaggaaaaacatgttggcttttctcttgacgtgggagaaattgaaaagaaggggaaggggaagaaaagaaggggaagaagatcaaagaaggaaagaagaaggggaagaaaagaaggggaagaagatcaaaacccaccatgccccaggctcagcagggagctgctggatgagaaagggcctgaagtcttgcaggactcactggatagatgttattcaactccttcaggttgtcttgaactgactgactcatgccagccctacagaagtgccttttacatattggagcaacagtgtgttggcttggctgttgacatggatgaaattgaaaagtaccaagaagtggaagaagaccaagacccatcatgccccaggctcagcagggagctgctggctgagaaagagcctgaagtcttgcaggacccactggatagatgttattcgactccttcaggttatcttgaactgcctgacttaggccagccctacagcagtgctgtttactcattggaggaacagtaccttggcttggctcttgacgtggacagaattaaaaaggaccaagaagaggaagaagaccaaggcccaccatgccccaggctcagcagggagctgctggaggtagtagagcctgaagtcttgcaggactcactggatagatgttattcaactccttccagttgtcttgaacagcctgactcctgccagccctatggaagttccttttatgcattggaggaaaaacatgttggcttttctcttgacgtgggagaaattgaaaagaaggggaaggggaagaaaagaaggggaagaagatcaaagaaggaaagaagaaggggaagaaaagaaggggaagaagatcaaaacccaccatgccccaggctcaacagcgtgctgatggaagtggaagagcctgaagtcttacaggactcactggatggatgttattcgactccgtcaatgtactttgaactacctgactcattccagcactacagaagtgtgttttactcatttgaggaagagcatatcagcttcgccctttacttggacaataggttttttactttgacggtgacaagtctccatctggtgttccagatgttagtcatattcccacaataggcagcccttactaagccgagagatgtcattcctgcaggcaggacctataggcacgtgaagatttgaatgaaactacagttccatttggaagcccagacataggatgggtcagtgggcatggctcttttcctattctcaaaccatgccagtggcaacctgtgctcagtctgaagacaatggacccacgttaggtgtgacacgttcacataactgtgcagcacatgccgggagtgatcagtcggacattttaatttgaaccacgtatctttgggtagctacaaaattcctcagggatttcattttgcaggcatgtctctgagcttctatacctgctcaaggtcagtgtcatctttgtgtttagctcatccaaaggtgttaccctggtttcaatgaacctaacctcattctttgtgtcttcagtgttggcttgttttagctgatccatctgtaacacaggagggatccttggctgaggattgtatttcagaaccaccaactgctctttacaattgttaacccgctaggctcctttggttagagaagccacagtccttcagcctccaattggtgtcagtacttaggaagaccacagctagatggacaaacagcattgggaggccttagccctgctcctctcaattccatcctgtagagaacaggagtcaggagccgctggcaggagacagcatgtcacccaggactctgccggtgcagaatatgaacaatgccatgttcttgcagaaaacgcttagcctgagtttcataggaggtaatcaccagacaactgcagaatgtagaacactgagcaggacaactgacctgtctccttcacatagtccatatcaccacaaatcacacaacaaaaaggagaagatatattttgggttcaaaaaaagtaaaaagataatgtagctgcatttctttagttattttgaaccccaaatatttcctcatctttttgttgttgtcatggatggtggtgacatggacttgtttatagaggacaggtcagctctctggctcaatgatctacattctgaagttgtctgaaaatgtcttcatgattaaattcagcctaaacgttttgccgggaacactgcagagacaatgctgtgagtttccaacctcagcccatctgcgggcagagaaggtctagtttgtccatcaccattatgatatcaggactggttacttggttaaggaggggtctaggagatctgtcccttttagagacaccttacttataatgaagtacttgggaaagcggttttcaagagtataaatatcctgtattctaatgatcatcctctaaacattttatcatttattaatcctccctgcctgtgtctattattatattcatatctctacgctgcaaaatttgggtctcaatttttactgtgcctttgtttttactagtgtctgctgttgcaaaaagaagaaaacattctctgcctgagttttaatttttgtccaaagttaattttaatctatacaattaaaaccttttgcctatcactctggacttttggattgttttttacattcagtgttataatatttgattatgctgattggttttggtgggtactgatgtgaattaataaaaacatttcatttcca

SEQ ID NO: 158741 - DNA, 3715 bp, Homo sapiens
  Payload ID: 11059
  Gene Symbol: NBPF19
  Gene Name: neuroblastoma breakpoint family, member 19
  ENST ID: ENST00000612881
  CDS Start-End: 1-900
atggtggtatcagccggcccttggtccagtgagaaggcagagatgaacattctagaaatcaacgagacattgcgcccccagctggcagagaagaaacagcagttcagaaacctcaaagagaaatgttttctaactcaactggccggcttcctggccaaccgacagaagaaatacaagtatgaagagtgtaaagacctcataaaatttatgctgaggaatgagcgacagttcaaggaggagaagcttgcagagcagctgaagcaagctgaggagctcaggcaatataaagtcctgtttcactctcaggaacgagagctgacccagttaagggagaagttacgggaagggagagatgcctcccgctcattgaatgagcatctccaggccctcctcactccggatgagccggacaagtcccaggggcaggacctccaagaacagctggctgaggggtgtagactggcacagcaccttgtccaaaagctcagcccagaaaatgacaacgatgacgatgaagatgttcaagttgaggtggctgagaaagtgcagaaatcgtctgcccccagggagatgcagaaggctgaagaaaaggaagtccctgaggactcactggaggaatgtgccatcacttattcaaatagccatggcccttatgactccaaccagccacataggaaaaccaaaatcacatttgaggaagacaaagtcgactcaactctcattggctcatcctctcatgttgaatgggaggatgctgtacacattattccagaaaatgaaagtgatgatgaggaagaggaagaaaaagggccagtgtctcccaggacatcgctgggatcaagtgaaaaaggaggaccaagaggcaacaggtcccaggctcagcagggagctgctggatgagaaagggcctgaagtcttgcaggactcactggatagatgttattcaactccttcaggttgtcttgaactgactgactcatgccagccctacagaagtgccttttacgtattggagcaacagcgtgttggcttggctattgacatggatgaaattgaaaagtaccaagaagtggaagaagaccaagacccatcatgccccaggctcagcagggagctgctggatgagaaagagcctgaagtcttgcaggactcactggatagatgttattcgactccttcaggttatcttgaactgcctgacttaggccagccctacagcagtgctgtttactcattggaggaacagtaccttggcttggctcttgacgtggacagaattaaaaaggaccaagaagaggaagaagaccaaggcccaccatgccccaggctcagcagggagctgctggaggtagtagagcctgaagtcttgcaggactcactggatagatgttattcaactccttccagttgtcttgaacagcctgactcctgccagccctatggaagttccttttatgcattggaggaaaaacatgttggcttttctcttgacgtgggagaaattgaaaagaaggggaaggggaagaaaagaaggggaagaagatcaaagaaggaaagaagaaggggaagaaaagaaggggaagaagatcaaaacccaccatgccccaggctcagcagggagctgctggatgagaaagggcctgaagtcttgcaggactcactggatagatgttattcaactccttcaggttgtcttgaactgactgactcatgccagccctacagaagtgccttttacatattggagcaacagtgtgttggcttggctgttgacatggatgaaattgaaaagtaccaagaagtggaagaagaccaagacccatcatgccccaggctcagcagggagctgctggatgagaaagggcctgaagtcttgcaggactcactggatagatgttattcaactccttcaggttgtcttgaactgactgactcatgccagccctacagaagtgccttttacatattggagcaacagtgtgttggcttggctgttgacatggatgaaattgaaaagtaccaagaagtggaagaagaccaagacccatcatgccccaggctcagcagggagctgctggatgagaaagagcctgaagtcttgcaggactcactggatagatgttattcgactccttcaggttatcttgaactgcctgacttaggccagccctacagcagtgctgtttactcattggaggaacagtaccttggcttggctcttgacgtggacagaattaaaaaggaccaagaagaggaagaagaccaaggcccaccatgccccaggctcagcagggagctgctggaggtagtagagcctgaagtcttgcaggactcactggatagatgttattcaactccttccagttgtcttgaacagcctgactcctgccagccctatggaagttccttttatgcattggaggaaaaacatgttggcttttctcttgacgtgggagaaattgaaaagaaggggaaggggaagaaaagaaggggaagaagatcaaagaaggaaagaagaaggggaagaaaagaaggggaagaagatcaaaacccaccatgccccaggctcaacagcgtgctgatggaagtggaagagcctgaagtcttacaggactcactggatggatgttattcgactccgtcaatgtactttgaactacctgactcattccagcactacagaagtgtgttttactcatttgaggaagagcatatcagcttcgccctttacttggacaataggttttttactttgacggtgacaagtctccatctggtgttccagatgttagtcatattcccacaataggcagcccttactaagccgagagatgtcattcctgcaggcaggacctataggcacgtgaagatttgaatgaaactacagttccatttggaagcccagacataggatgggtcagtgggcatggctcttttcctattctcaaaccatgccagtggcaacctgtgctcagtctgaagacaatggacccacgttaggtgtgacacgttcacataactgtgcagcacatgccgggagtgatcagtcggacattttaatttgaaccacgtatctttgggtagctacaaaattcctcagggatttcattttgcaggcatgtctctgagcttctatacctgctcaaggtcagtgtcatctttgtgtttagctcatccaaaggtgttaccctggtttcaatgaacctaacctcattctttgtgtcttcagtgttggcttgttttagctgatccatctgtaacacaggagggatccttggctgaggattgtatttcagaaccaccaactgctctttacaattgttaacccgctaggctcctttggttagagaagccacagtccttcagcctccaattggtgtcagtacttaggaagaccacagctagatggacaaacagcattgggaggccttagccctgctcctctcaattccatcctgtagagaacaggagtcaggagccgctggcaggagacagcatgtcacccaggactctgccggtgcagaatatgaacaatgccatgttcttgcagaaaacgcttagcctgagtttcataggaggtaatcaccagacaactgcagaatgtagaacactgagcaggacaactgacctgtctccttcacatagtccatatcaccacaaatcacacaacaaaaaggagaagatatattttgggttcaaaaaaagtaaaaagata

SEQ ID NO: 158742 - DNA, 2051 bp, Homo sapiens
  Payload ID: 11059
  Gene Symbol: NBPF19
  Gene Name: neuroblastoma breakpoint family, member 19
  ENST ID: ENST00000611931
  CDS Start-End: 174-1073
aaagtgctgtggggagtgatcacatttttcacaacagtaagttaagaatttcagttactgacatccctcagtcctgattaaaccgatttgatttcaccagtttttaacccatcatatgtttgggtttcttctccccagtccctgactccacctcttctgccacaaacgtcagcatggtggtatcagccggcccttggtccagtgagaaggcagagatgaacattctagaaatcaacgagacattgcgcccccagctggcagagaagaaacagcagttcagaaacctcaaagagaaatgttttctaactcaactggccggcttcctggccaaccgacagaagaaatacaagtatgaagagtgtaaagacctcataaaatttatgctgaggaatgagcgacagttcaaggaggagaagcttgcagagcagctgaagcaagctgaggagctcaggcaatataaagtcctgtttcactctcaggaacgagagctgacccagttaagggagaagttacgggaagggagagatgcctcccgctcattgaatgagcatctccaggccctcctcactccggatgagccggacaagtcccaggggcaggacctccaagaacagctggctgaggggtgtagactggcacagcaccttgtccaaaagctcagcccagaaaatgacaacgatgacgatgaagatgttcaagttgaggtggctgagaaagtgcagaaatcgtctgcccccagggagatgcagaaggctgaagaaaaggaagtccctgaggactcactggaggaatgtgccatcacttattcaaatagccatggcccttatgactccaaccagccacataggaaaaccaaaatcacatttgaggaagacaaagtcgactcaactctcattggctcatcctctcatgttgaatgggaggatgctgtacacattattccagaaaatgaaagtgatgatgaggaagaggaagaaaaagggccagtgtctcccaggacatcgctgggatcaagtgaaaaaggaggaccaagaggcaacaggtcccaggctcagcagggagctgctggatgagaaagggcctgaagtcttgcaggactcactggatagatgttattcaactccttcaggttgtcttgaactgactgactcatgccagccctacagaagtgccttttacatattggagcaacagtgtgttggcttggctgttgacatggatgaaattgaaaagtaccaagaagtggaagaagaccaagacccatcatgccccaggctcagcagggagctgctggatgagaaagagcctgaagtcttgcaggactcactggatagatgttattcgactccttcaggttatcttgaactgcctgacttaggccagccctacagcagtgctgtttactcattggaggaacagtaccttggcttggctcttgacgtggacagaattaaaaaggaccaagaagaggaagaagaccaaggcccaccatgccccaggctcagcagggagctgctggaggtagtagagcctgaagtcttgcaggactcactggatagatgttattcaactccttccagttgtcttgaacagcctgactcctgccagccctatggaagttccttttatgcattggaggaaaaacatgttggcttttctcttgacgtgggagaaattgaaaagaaggggaaggggaagaaaagaaggggaagaagatcaaagaaggaaagaagaaggggaagaaaagaaggggaagaagatcaaaacccaccatgccccaggctcaacagcgtgctgatggaagtggaagagcctgaagtcttacaggactcactggatggatgttattcgactccgtcaatgtactttgaactacctgactcattccagcactacagaagtgtgttttactcatttgaggaagagcatatcagcttcgccctttacttggacaataggttttttactttgacggtgacaagtctccatctggtgttccagatgttagtcatattcccacaataggcagcccttactaagccgagagatgt

SEQ ID NO: 158743 - DNA, 2344 bp, Homo sapiens
  Payload ID: 11059
  Gene Symbol: NBPF19
  Gene Name: neuroblastoma breakpoint family, member 19
  ENST ID: ENST00000426482
  CDS Start-End: 1-705
gaccaagaagaggaagaagaccaagacccaccatgccccagggagctggtggaggtagtagagcctgaagtcttgcaggactcactggatagatgttattcaactccttccagttgtcttgaacagcctgactcctgccagccctatggaagttccttttatgcattggaggaaaaacatgttggcttttctcttgacgtgggaggtgaaaggggaagaaaagaaggggaagaagatcaaaacccaccatgccccaggctcagcagggagctgctggatgagaaagggcctgaagtcttgcaggactcactggatagatgttattcaactccttcaggttgtcttgaactgactgactcatgccagccctacagaagtgccttttacatattggagcaacagtgtgttggcttggctgttgacatggatgaaattgaaaagtaccaagaagtggaagaagaccaagacccatcatgccccaggctcagcagggagctgctggatgagaaagagcctgaagtcttgcaggactcactggatagatgttattcgattccttcaggttatcttgaactgcctgacttaggccagccctacagcagtgctgtttactcattggaggaacagtaccttggcttggctcttgacgtggacagaattaaaaaggaccaagaagaggaagaagaccaagacccaccatgccccaggctcagcagggagctggtggaggtagtagagcctgaagtcttgcaggactcactggatagatgttattcaactccttccagttgtcttgaacagcctgactcctgccagccctatggaagttccttttatgcattggaggaaaaacatgttggcttttctcttgacgtgggagaaattgaaaagaaggggaaggggaagaaaagaaggggaagaagatcaaagaaggaaagaagaaggggaagaaaagaaggggaagaagatcaaaacccaccatgccccaggctcagcagggagctgctggatgagaaagggcctgaagtcttgcaggactcactggatagatgttattcaactccttcaggttgtcttgaactgactgactcatgccagccctacagaagtgccttttacatattggagcaacagtgtgttggcttggctgttgacatggatgaaattgaaaagtaccaagaagtggaagaagaccaagacccatcatgccccaggctcagcagggagctgctggatgagaaagagcctgaagtcttgcaggactcactggatagatgttattcgattccttcaggttatcttgaactgcctgacttaggccagccctacagcagtgctgtttactcattggaggaacagtaccttggcttggctcttgacgtggacagaattaaaaaggaccaagaagaggaagaagaccaaggcccaccatgccccaggctcagcagggagctgctggaggtagtagagcctgaagtcttgcaggactcactggatagatgttattcaactccttccagttgtcttgaacagcctgactcctgccagccctatggaagttccttttatgcattggaggaaaaacatgttggcttttctcttgacgtgggagaaattgaaaagaaggggaaggggaagaaaagaaggggaagaagatcaaagaaggaaagaagaaggggaagaaaagaaggggaagaagatcaaaacccaccatgccccaggctcagcagggagctgctggatgagaaagggcctgaagtcttgcaggactcactggatagatgttattcaactccttcaggttgtcttgaactgactgactcatgccagccctacagaagtgccttttacatattggagcaacagtgtgttggcttggctgttgacatggatgaaattgaaaagtaccaagaagtggaagaagaccaagacccatcatgccccaggctcagcagggagctgctggatgagaaagagcctgaagtcttgcaggactcactggatagatgttattcgactccttcaggttatcttgaactgcctgacttaggccagccctacagcagtgctgtttactcattggaggaacagtaccttggcttggctcttgacgtggacagaattaaaaaggaccaagaagaggaagaagaccaaggcccaccatgccccaggctcagcagggagctgctggaggtagtagagcctgaagtcttgcaggactcactggatagatgttattcaactccttccagttgtcttgaacagcctgactcctgccagccctatggaagttccttttatgcattggaggaaaaacatgttggcttttctcttgacgtgggag

SEQ ID NO: 158744 - DNA, 18760 bp, Homo sapiens
  Payload ID: 11060
  Gene Symbol: NBPF20
  Gene Name: neuroblastoma breakpoint family, member 20
  ENST ID: ENST00000369373
  CDS Start-End: 194-17134
cagacggttacctggcacgctggccacaatctacctcactcttatcagagtctgagctactggcagtgctttcagctctgagttgaggcaccttgaaccttgtttttgtggtgaaggatcctaaagtgctgtggggagtgatcacatttttcacaacatccctgactccacctcttctgccacaaacgtcagcatggtggtatcagccggcccttggtccagcgagaaggcagagatgaacattctagaaatcaacgagaaattgcgcccccagttggcagagaacaaacagcagttcggaaacctcaaagagagatgttttgtaactcaactggccggcttcctggccaaccagcagaagaaatacaaatatgaagagtgcaaagacctcataaaatctatgctgaggaatgagcgacagttcaaggaggagaagcttgcagagcagctcaagcaagctgaggagctcaggcaatataaagtcctggttcacgctcaggaacgagagctgacccagttaagggagaagttgcgggaagggagagatgcctcccgctcattgaatgagcatctccaggccctccttactccggatgagccggacaagtcccaggggcaggacctccaagaacagctggctgaggggtgtagactggcacagcaccttgtccaaaagctcagcccagaaaatgacaacgatgacgatgaagatgttcaagttgagttggctgagaaagtgcagaaatcgtctgcccccagggagatgcagaaggctgaagaaaaggaagtccctgaggactcacaggaggaatgtgccatcacttattcaaatagccatggcccttatgactccaaccagccacataggaaaaccaaaatcacatttgaggaagacaaagtcgactcaactctgattggctcatcctctcatgttgaatgggaggatgctgtacacattattccaggtaaaaatgaaagtgatgatgaggaagaggaagaaaaagggccagtgtctcccaggaatctgcaggagtctgaagaggaggaagtcccccaggagtcctgggatgaaggttattcgactctctcaattcctcctgaaatgttggcctcgtaccagtcttacagcagcacatttcactcattagaggaacagcaagtctgcatggctgttgacataggcagacatcggtgggatcaagtgaaaaaggaggaccaagaggcaacaggtcccaggctcagcagggagctgctggatgagaaagggcctgaagtcttgcaggactcactggatagatgttattcaactccttcaggttgtcttgaactgactgactcatgccagccctacagaagtgccttttacgtattggagcaacagcgtattggcttggctgttgacatggatgaaattgaaaagtaccaagaagtggaagaagaccaagacccatcatgccccaggctcagcagggagctgctggatgagaaagagcctgaagtcttgcaggactcactggatagatgttattcgactccttcaggttatcttgaactgcctgacttaggccagccctacagcagtgctgtttactcattggaggaacagtaccttggcttggctcttgacgtggacagaactaaaaaggaccaagaagaggaagaagaccaaggcccaccatgccccaggctcagcagggagctgctggaggtagtagagcctgaagtcttgcaggactcactggatagatgttattcaactccttccagttgtcttgaacagcctgactcctgccagccctatggaagttccttttatgcattggaggaaaaacatgttggcttttctcttgacgtgggagaaattgaaaagaaggggaaggggaagaaaagaaggggaagaagatcaaagaaggaaagaagaaggggaagaaaagaaggggaagaagatcaaaacccaccatgccccaggctcagcagggagctgctggatgagaaagggcctgaagtcttgcaggactcactggatagatgttattcaactccttcaggttgtcttgaactgactgactcatgccagccctacagaagtgccttttacgtattggagcaacagcgtgttggcttggctgttgacatggatgaaattgaaaagtaccaagaagtggaagaagaccaagacccatcatgccccaggctcagcagggagctgctggatgagaaagagcctgaagtcttgcaggactcactggatagatgttattcgactccttcaggttatcttgaactgcctgacttaggccagccctacagcagtgctgtttactcattggaggaacagtaccttggcttggctcttgacgtggacagaactaaaaaggaccaagaagaggaagaagaccaaggcccaccatgccccaggctcagcagggagctgctggaggtagtagagcctgaagtcttgcaggactcactggatagatgttattcaactccttccagttgtcttgaacagcctgactcctgccagccctatggaagttccttttatgcattggaggaaaaacatgttggcttttctcttgacgtgggagaaattgaaaagaaggggaaggggaagaaaagaaggggaagaagatcaaagaaggaaagaagaaggggaagaaaagaaggggaagaagatcaaaacccaccatgccccaggctcagcagggagctgctggatgagaaagggcctgaagtcttgcaggactcactggatagaagttattcaactccttcaggttgtcttgaactgactgactcatgccagccctacagaagtgccttttacgtattggagcaacagcgtgttggcttggctgttgacatggatgaaattgaaaagtaccaagaagtggaagaagaccaagacccatcatgccccaggctcagcagggagctgctggatgagaaagagcctgaagtcttgcaggactcactggatagatgttattcgactccttcaggttatcttgaactgcctgacttaggccagccctacagcagtgctgtttactcattggaggaacagtaccttggcttggctcttgacgtggacagaactaaaaaggaccaagaagaggaagaagaccaaggcccaccatgccccaggctcagcagggagctgctggaggtagtagagcctgaagtcttgcaggactcactggatagatgttattcaactccttccagttgtcttgaacagcctgactcctgccagccctatggaagttccttttatgcattggaggaaaaacatgttggcttttctctcgacgtgggagaaattgaaaagaaggggaaggggaagaaaagaaggggaagaagatcaaagaaggaaagaagaaggggaagaaaagaaggggaagaagatcaaaacccaccatgccccaggctcagcagggagctgctggatgagaaagggcctgaagtcttgcaggactcactggatagatgttattcaactccttcaggttgtcttgaactgactgactcatgccagccctacagaagtgccttttacgtattggagcaacagcgtgttggcttggctgttgacatggatgaaattgaaaagtaccaagaagtggaagaagaccaagacccatcatgccccaggctcagcagggagctgctggatgagaaagagcctgaagtcttgcaggactcactggatagatgttattcgactccttcaggttatcttgaactgcctgacttaggccagccctacagcagtgctgtttactcattggaggaacagtaccttggcttggctcttgacgtggacagaactaaaaaggaccaagaagaggaagaagaccaaggcccaccatgccccaggctcagcagggagctgctggaggtagtagagcctgaagtcttgcaggactcactggatagatgttattcaactccttccagttgtcttgaacagcctgactcctgccagccctatggaagttccttttatgcattggaggaaaaacatgttggcttttctcttgacgtgggagaaattgaaaagaaggggaaggggaagaaaagaaggggaagaagatcaaagaaggaaagaagaaggggaagaaaagaaggggaagaagatcaaaacccaccatgccccaggctcagcagggagctgctggatgagaaagggcctgaagtcttgcaggactcactggatagaagttattcaactccttcaggttgtcttgaactgactgactcatgccagccctacagaagtgccttttacgtattggagcaacagcgtgttggcttggctgttgacatggatgaaattgaaaagtaccaagaagtggaagaagaccaagacccatcatgccccaggctcagcagggagctgctggatgagaaagagcctgaagtcttgcaggactcactggatagatgttattcgactccttcaggttatcttgaactgcctgacttaggccagccctacagcagtgctgtttactcattggaggaacagtaccttggcttggctcttgacgtggacagaactaaaaaggaccaagaagaggaagaagaccaaggcccaccatgccccaggctcagcagggagctgctggaggtagtagagcctgaagtcttgcaggactcactggatagatgttattcaactccttccagttgtcttgaacagcctgactcctgccagccctatggaagttccttttatgcattggaggaaaaacatgttggcttttctctcgacgtgggagaaattgaaaagaaggggaaggggaagaaaagaaggggaagaagatcaaagaaggaaagaagaaggggaagaaaagaaggggaagaagatcaaaacccaccatgccccaggctcagcagggagctgctggatgagaaagggcctgaagtcttgcaggactcactggatagaagttattcaactccttcaggttgtcttgaactgactgactcatgccagccctacagaagtgccttttacgtattggagcaacagcgtgttggcttggctgttgacatggatgaaattgaaaagtaccaagaagtggaagaagaccaagacccatcatgccccaggctcagcagggagctgctggatgagaaagagcctgaagtcttgcaggactcactggatagatgttattcgactccttcaggttatcttgaactgcctgacttaggccagccctacagcagtgctgtttactcattggaggaacagtaccttggcttggctcttgacgtggacagaactaaaaaggaccaagaagaggaagaagaccaaggcccaccatgccccaggctcagcagggagctgctggaggtagtagagcctgaagtcttgcaggactcactggatagatgttattcaactccttccagttgtcttgaacagcctgactcctgccagccctatggaagttccttttatgcattggaggaaaaacatgttggcttttctctcgacgtgggagaaattgaaaagaaggggaaggggaagaaaagaaggggaagaagatcaaagaaggaaagaagaaggggaagaaaagaaggggaagaagatcaaaccccaccatgccccaggctcagcagggagctgctggatgagaaagggcctgaagtcttgcaggactcactggatagaagttattcaactccttcaggttgtcttgaactgactgactcatgccagccctacagaagtgccttttacgtattggagcaacagcgtgttggcttggctgttgacatggatgaaattgaaaagtaccaagaagtggaagaagaccaagacccatcatgccccaggctcagcagggagctgctggatgagaaagagcctgaagtcttgcaggactcactggatagatgttattcgactccttcaggttatcttgaactgcctgacttaggccagccctacagcagtgctgtttactcattggaggaacagtaccttggcttggctcttgacgtggacagaactaaaaaggaccaagaagaggaagaagaccaaggcccaccatgccccaggctcagcagggagctgctggaggtagtagagcctgaagtcttgcaggactcactggatagatgttattcaactccttccagttgtcttgaacagcctgactcctgccagccctatggaagttccttttatgcattggaggaaaaacatgttggcttttctctcgacgtgggagaaattgaaaagaaggggaaggggaagaaaagaaggggaagaagatcaaagaaggaaagaagaaggggaagaaaagaaggggaagaagatcaaaacccaccatgccccaggctcagcagggagctgctggatgagaaagggcctgaagtcttgcaggactcactggatagaagttattcaactccttcaggttgtcttgaactgactgactcatgccagccctacagaagtgccttttacgtattggagcaacagcgtgttggcttggctgttgacatggatgaaattgaaaagtaccaagaagtggaagaagaccaagacccatcatgccccaggctcagcagggagctgctggatgagaaagagcctgaagtcttgcaggactcactggatagatgttattcgactccttcaggttatcttgaactgcctgacttaggccagccctacagcagtgctgtttactcattggaggaacagtaccttggcttggctcttgacgtggacagaactaaaaaggaccaagaagaggaagaagaccaaggcccaccatgccccaggctcagcagggagctgctggaggtagtagagcctgaagtcttgcaggactcactggatagatgttattcaactccttccagttgtcttgaacagcctgactcctgccagccctatggaagttccttttatgcattggaggaaaaacatgttggcttttctctcgacgtgggagaaattgaaaagaaggggaaggggaagaaaagaaggggaagaagatcaaagaaggaaagaagaaggggaagaaaagaaggggaagaagatcaaaacccaccatgccccaggctcagcagggagctgctggatgagaaagggcctgaagtcttgcaggactcactggatagatgttattcaactccttcaggttgtcttgaactgactgactcatgccagccctacagaagtgccttttacgtattggagcaacagcgtgttggcttggctgttgacatggatgaaattgaaaagtaccaagaagtggaagaagaccaagacccatcatgccccaggctcagcagggagctgctggatgagaaagagcctgaagtcttgcaggactcactggatagatgttattcgactccttcaggttatcttgaactgcctgacttaggccagccctacagcagtgctgtttactcattggaggaacagtaccttggcttggctcttgacgtggacagaactaaaaaggaccaagaagaggaagaagaccaaggcccaccatgccccaggctcagcagggagctgctggaggtagtagagcctgaagtcttgcaggactcactggatagatgttattcaactccttccagttgtcttgaacagcctgactcctgccagccctatggaagttccttttatgcattggaggaaaaacatgttggcttttctctcgacgtgggagaaattgaaaagaaggggaaggggaagaaaagaaggggaagaagatcaaagaaggaaagaagaaggggaagaaaagaaggggaagaagatcaaaacccaccatgccccaggctcagcagggagctgctggatgagaaagggcctgaagtcttgcaggactcactggatagatgttattcaactccttcaggttgtcttgaactgactgactcatgccagccctacagaagtgccttttacgtattggagcaacagcgtgttggcttggctgttgacatggatgaaattgaaaagtaccaagaagtggaagaagaccaagacccatcatgccccaggctcagcagggagctgctggatgagaaagagcctgaagtcttgcaggactcactggatagatgttattcgactccttcaggttatcttgaactgcctgacttaggccagccctacagcagtgctgtttactcattggaggaacagtaccttggcttggctcttgacgtggacagaactaaaaaggaccaagaagaggaagaagaccaaggcccaccatgccccaggctcagcagggagctgctggaggtagtagagcctgaagtcttgcaggactcactggatagatgttattcaactccttccagttgtcttgaacagcctgactcctgccagccctatggaagttccttttatgcattggaggaaaaacatgttggcttttctctcgacgtgggagaaattgaaaagaaggggaaggggaagaaaagaaggggaagaagatcaaagaaggaaagaagaaggggaagaaaagaaggggaagaagatcaaaacccaccatgccccaggctcagcagggagctgctggatgagaaagggcctgaagtcttgcaggactcactggatagatgttattcaactccttcaggttgtcttgaactgactgactcatgccagccctacagaagtgccttttacgtattggagcaacagcgtgttggcttggctgttgacatggatgaaattgaaaagtaccaagaagtggaagaagaccaagacccatcatgccccaggctcagcagggagctgctggatgagaaagagcctgaagtcttgcaggactcactggatagatgttattcgactccttcaggttatcttgaactgcctgacttaggccagccctacagcagtgctgtttactcattggaggaacagtaccttggcttggctcttgacgtggacagaactaaaaaggaccaagaagaggaagaagaccaaggcccaccatgccccaggctcagcagggagctgctggaggtagtagagcctgaagtcttgcaggactcactggatagatgttattcaactccttccagttgtcttgaacagcctgactcctgccagccctatggaagttccttttatgcattggaggaaaaacatgttggcttttctctcgacgtgggagaaattgaaaagaaggggaaggggaagaaaagaaggggaagaagatcaaagaaggaaagaagaaggggaagaaaagaaggggaagaagatcaaaacccaccatgccccaggctcagcagggagctgctggatgagaaagggcctgaagtcttgcaggactcactggatagaagttattcaactccttcaggttgtcttgaactgactgactcatgccagccctacagaagtgccttttacgtattggagcaacagcgtgttggcttggctgttgacatggatgaaattgaaaagtaccaagaagtggaagaagaccaagacccatcatgccccaggctcagcagggagctgctggatgagaaagagcctgaagtcttgcaggactcactggatagatgttattcgactccttcaggttatcttgaactgcctgacttaggccagccctacagcagtgctgtttactcattggaggaacagtaccttggcttggctcttgacgtggacagaactaaaaaggaccaagaagaggaagaagaccaaggcccaccatgccccaggctcagcagggagctgctggaggtagtagagcctgaagtcttgcaggactcactggatagatgttattcaactccttccagttgtcttgaacagcctgactcctgccagccctatggaagttccttttatgcattggaggaaaaacatgttggcttttctcttgacgtgggagaaattgaaaagaaggggaaggggaagaaaagaaggggaagaagatcaaagaaggaaagaagaaggggaagaaaagaaggggaagaagatcaaaacccaccatgccccaggctcagcagggagctgctggatgagaaagggcctgaagtcttgcaggactcactggatagaagttattcaactccttcaggttgtcttgaactgactgactcatgccagccctacagaagtgccttttacgtattggagcaacagcgtgttggcttggctgttgacatggatgaaattgaaaagtaccaagaagtggaagaagaccaagacccatcatgccccaggctcagcagggagctgctggatgagaaagagcctgaagtcttgcaggactcactggatagatgttattcgactccttcaggttatcttgaactgcctgacttaggccagccctacagcagtgctgtttactcattggaggaacagtaccttggcttggctcttgacgtggacagaactaaaaaggaccaagaagaggaagaagaccaaggcccaccatgccccaggctcagcagggagctgctggaggtagtagagcctgaagtcttgcaggactcactggatagatgttattcaactccttccagttgtcttgaacagcctgactcctgccagccctatggaagttccttttatgcattggaggaaaaacatgttggcttttctctcgacgtgggagaaattgaaaagaaggggaaggggaagaaaagaaggggaagaagatcaaagaaggaaagaagaaggggaagaaaagaaggggaagaagatcaaaacccaccatgccccaggctcagcagggagctgctggatgagaaagggcctgaagtcttgcaggactcactggatagaagttattcaactccttcaggttgtcttgaactgactgactcatgccagccctacagaagtgccttttacgtattggagcaacagcgtgttggcttggctgttgacatggatgaaattgaaaagtaccaagaagtggaagaagaccaagacccatcatgccccaggctcagcagggagctgctggatgagaaagagcctgaagtcttgcaggactcactggatagatgttattcgactccttcaggttatcttgaactgcctgacttaggccagccctacagcagtgctgtttactcattggaggaacagtaccttggcttggctcttgacgtggacagaactaaaaaggaccaagaagaggaagaagaccaaggcccaccatgccccaggctcagcagggagctgctggaggtagtagagcctgaagtcttgcaggactcactggatagatgttattcaactccttccagttgtcttgaacagcctgactcctgccagccctatggaagttccttttatgcattggaggaaaaacatgttggcttttctcttgacgtgggagaaattgaaaagaaggggaaggggaagaaaagaaggggaagaagatcaaagaaggaaagaagaaggggaagaaaagaaggggaagaagatcaaaacccaccatgccccaggctcagcagggagctgctggatgagaaagggcctgaagtcttgcaggactcactggatagaagttattcaactccttcaggttgtcttgaactgactgactcatgccagccctacagaagtgccttttacgtattggagcaacagcgtgttggcttggctgttgacatggatgaaattgaaaagtaccaagaagtggaagaagaccaagacccatcatgccccaggctcagcagggagctgctggatgagaaagagcctgaagtcttgcaggactcactggatagatgttattcgactccttcaggttatcttgaactgcctgacttaggccagccctacagcagtgctgtttactcattggaggaacagtaccttggcttggctcttgacgtggacagaactaaaaaggaccaagaagaggaagaagaccaaggcccaccatgccccaggctcagcagggagctgctggaggtagtagagcctgaagtcttgcaggactcactggatagatgttattcaactccttccagttgtcttgaacagcctgactcctgccagccctatggaagttccttttatgcattggaggaaaaacatgttggcttttctcttgacgtgggagaaattgaaaagaaggggaaggggaagaaaagaaggggaagaagatcaaagaaggaaagaagaaggggaagaaaagaaggggaagaagatcaaaacccaccatgccccaggctcagcagggagctgctggatgagaaagggcctgaagtcttgcaggactcactggatagatgttattcaactccttcaggttgtcttgaactgactgactcatgccagccctacagaagtgccttttacgtattggagcaacagcgtgttggcttggctgttgacatggatgaaattgaaaagtaccaagaagtggaagaagaccaagacccatcatgccccaggctcagcagggagctgctggatgagaaagagcctgaagtcttgcaggactcactggatagatgttattcgactccttcaggttatcttgaactgcctgacttaggccagccctacagcagtgctgtttactcattggaggaacagtaccttggcttggctcttgacgtggacagaactaaaaaggaccaagaagaggaagaagaccaaggcccaccatgccccaggctcagcagggagctgctggaggtagtagagcctgaagtcttgcaggactcactggatagatgttattcaactccttccagttgtcttgaacagcctgactcctgccagccctatggaagttccttttatgcattggaggaaaaacatgttggcttttctcttgacgtgggagaaattgaaaagaaggggaaggggaagaaaagaaggggaagaagatcaaagaaggaaagaagaaggggaagaaaagaaggggaagaagatcaaaacccaccatgccccaggctcagcagggagctgctggatgagaaagggcctgaagtcttgcaggactcactggatagatgttattcaactccttcaggttgtcttgaactgactgactcatgccagccctacagaagtgccttttacgtattggagcaacagcgtgttggcttggctgttgacatggatgaaattgaaaagtaccaagaagtggaagaagaccaagacccatcatgccccaggctcagcagggagctgctggatgagaaagagcctgaagtcttgcaggactcactggatagatgttattcgactccttcaggttatcttgaactgcctgacttaggccagccctacagcagtgctgtttactcattggaggaacagtaccttggcttggctcttgacgtggacagaactaaaaaggaccaagaagaggaagaagaccaaggcccaccatgccccaggctcagcagggagctgctggaggtagtagagcctgaagtcttgcaggactcactggatagatgttattcaactccttccagttgtcttgaacagcctgactcctgccagccctatggaagttccttttatgcattggaggaaaaacatgttggcttttctcttgacgtgggagaaattgaaaagaaggggaaggggaagaaaagaaggggaagaagatcaaagaaggaaagaagaaggggaagaaaagaaggggaagaagatcaaaccccaccatgccccaggctcagcagggagctgctggatgagaaagggcctgaagtcttgcaggactcactggatagatgttattcaactccttcaggttgtcttgaactgactgactcatgccagccctacagaagtgccttttacgtattggagcaacagcgtgttggcttggctgttgacatggatgaaattgaaaagtaccaagaagtggaagaagaccaagacccatcatgccccaggctcagcagggagctgctggatgagaaagagcctgaagtcttgcaggactcactggatagatgttattcgactccttcaggttatcttgaactgcctgacttaggccagccctacagcagtgctgtttactcattggaggaacagtaccttggcttggctcttgacgtggacagaactaaaaaggaccaagaagaggaagaagaccaaggcccaccatgccccaggctcagcagggagctgctggaggtagtagagcctgaagtcttgcaggactcactggatagatgttattcaactccttccagttgtcttgaacagcctgactcctgccagccctatggaagttccttttatgcattggaggaaaaacatgttggcttttctcttgacgtgggagaaattgaaaagaaggggaaggggaagaaaagaaggggaagaagatcaaagaaggaaagaagaaggggaagaaaagaaggggaagaagatcaaaacccaccatgccccaggctcagcagggagctgctggatgagaaagagcctgaagtcttgcaggactcactggatagatgttattcgactccttcaggttatcttgaactgcctgacttaggccagccctacagcagtgctgtttactcattggaggaacagtaccttggcttggctcttgacgtggacagaactaaaaaggaccaagaagaggaagaagaccaaggcccaccatgccccaggctcagcagggagctgctggaggtagtagagcctgaagtcttgcaggactcactggatagatgttattcaactccttccagttgtcttgaacagcctgactcctgccagccctatggaagttccttttatgcattggaggaaaaacatgttggcttttctcttgacgtgggagaaattgaaaagaaggggaaggggaagaaaagaaggggaagaagatcaaagaaggaaagaagaaggggaagaaaagaaggggaagaagatcaaaacccaccatgccccaggctcagcagggagctgctggatgagaaagagcctgaagtcttgcaggactcactggatagatgttattcgactccttcaggttatcttgaactgcctgacttaggccagccctacagcagtgctgtttactcattggaggaacagtaccttggcttggctcttgacgtggacagaactaaaaaggaccaagaagaggaagaagaccaaggcccaccatgccccaggctcagcagggagctgctggaggtagtagagcctgaagtcttgcaggactcactggatagatgttattcaactccttccagttgtcttgaacagcctgactcctgccagccctatggaagttccttttatgcattggaggaaaaacatgttggcttttctcttgacgtgggagaaattgaaaagaaggggaaggggaagaaaagaaggggaagaagatcaaagaaggaaagaagaaggggaagaaaagaaggggaagaagatcaaaacccaccatgccccaggctcagcagggagctgctggatgagaaagggcctgaagtcttgcaggactcactggatagaagttattcaactccttcaggttgtcttgaactgactgactcatgccagccctacagaagtgccttttacgtattggagcaacagcgtgttggcttggctgttgacatggatgaaattgaaaagtaccaagaagtggaagaagaccaagacccatcatgccccaggctcagcagggagctgctggatgagaaagagcctgaagtcttgcaggactcactggatagatgttattcgactccttcaggttatcttgaactgcctgacttaggccagccctacagcagtgctgtttactcattggaggaacagtaccttggcttggctcttgacgtggacagaactaaaaaggaccaagaagaggaagaagaccaaggcccaccatgccccaggctcagcagggagctgctggaggtagtagagcctgaagtcttgcaggactcactggatagatgttattcaactccttccagttgtcttgaacagcctgactcctgccagccctatggaagttccttttatgcattggaggaaaaacatgttggcttttctctcgacgtgggagaaattgaaaagaaggggaaggggaagaaaagaaggggaagaagatcaaagaaggaaagaagaaggggaagaaaagaaggggaagaagatcaaaacccaccatgccccaggctcagcagggagctgctggatgagaaagggcctgaagtcttgcaggactcactggatagatgttattcaactccttcaggttgtcttgaactgactgactcatgccagccctacagaagtgccttttacgtattggagcaacagcgtgttggcttggctgttgacatggatgaaattgaaaagtaccaagaagtggaagaagaccaagacccatcatgccccaggctcagcagggagctgctggatgagaaagagcctgaagtcttgcaggactcactggatagatgttattcgactccttcaggttatcttgaactgcctgacttaggccagccctacagcagtgctgtttactcattggaggaacagtaccttggcttggctcttgacgtggacagaactaaaaaggaccaagaagaggaagaagaccaaggcccaccatgccccaggctcagcagggagctgctggaggtagtagagcctgaagtcttgcaggactcactggatagatgttattcaactccttccagttgtcttgaacagcctgactcctgccagccctatggaagttccttttatgcattggaggaaaaacatgttggcttttctcttgacgtgggagaaattgaaaagaaggggaaggggaagaaaagaaggggaagaagatcaaagaagaaaagaagaaggggaagaaaagaaggggaagaagatcaaaacccaccatgccccaggctcaacggcgtgctgatggaagtggaagagcctgaagtcttacaggactcactggatggatgttattctactccgtcaatgtactttgaactacctgactcattccagcactacagaagtgtgttttactcatttgaggaacagcacatcagcttcgccctttacgtggacaataggttttttactttgacggtgacaagtctccacctggtgttccagatgggagtcatattcccacaataaacagcccttactaagccgagagatgtcattcctgcaggcaggacctataggcacgtgaagatttgaatgaaagtacagttccatttggaagcccagacataggatgggtcagtgggcatggctgtattcctattctcaaaccatgccagtggcaacctgtgctcagtctgaagacaatggacccacgttaggtgtgacacgttcacataactgtgcagcacatgccgggagtgatcagtcagacattttaatttgaaccacgtatctctgggtagctacaaaattcctcagggatttcattttgcaggcatgtctctgagcttctatacctgctcaaggtcattgtcatctttgtgtttagctcatccaaaggtgttaccctggtttcaatgaacctaacctcattctttgtgtcttcagtgttggcttgttttagctgatccatctgtaacacaggagggatccttggttgaggattgtatttcagaaccaccaactgctcttgacaattgttaacccgctaggctcctttggttagagaagccacagtccttcagcctccaattggtgtcagtacttaggaagaccacagctagatggacaaacagcattgggaggccttagccctgctcttctcaattccatcctgtagagaacaggagtcaggagccgctggcaggagacagcatgtcacccaggactctgccggtgcagaatatgaacaatgccatgttcttgcagaaaacgcttagcctgagtttcataggaggtaatcaccagacaactgcagaatgtagaacactgagcaggacaactgacctgtctccttcacatagtccatatcaccacaaatcacacaacaaaaaggagaagagatattttgggttcaaaaaacgtaaaaagataatgtagctgcatttctttagttattttgaaccccaaatatttcctcatctttttgttgttgtcatggatggtggtgacatggacttgtttatagaggacaggtcagctgtctggctcaatgatctacattctgaagttgtctgaaaatgtcttcatgattaaattcagcctaaacgttttgccgggaacactgcagagacaatgctgtgagtttccaacctcagcccatctgcgggcagagaaggtctagtttgtccatcaccattatgatatcaggactggttacttggttaaggaggggtctaggagatctgtcccttttagagacaccttacttataatgaagaagtacttgggaaagcggttttcaagagtataaatatcctgtattctaatgatcatcctctaaacattttatcatttattaatcctccctgcctgtgtctattattatattcatatctctacactgcaaattttgggtctcaatttttactgtgcctttgtttttactagtgtctgctgttgcaaaaagaagaagacattctctgcctgagttttaatttttgtccaaagttaattttaatctatacaattaaaaccttttgcctatcactctggacttctggattgttttttacattcagtgttataatatttgattatgctgattggttttggtgggtactgatgcgaattaataaaaacatttcatttcca

SEQ ID NO: 158745 - DNA, 3670 bp, Homo sapiens
  Payload ID: 11060
  Gene Symbol: NBPF20
  Gene Name: neuroblastoma breakpoint family, member 20
  ENST ID: ENST00000594479
  CDS Start-End: 18-2783
aagacctcataaaatctatgctgaggaatgagcgacagttcaaggaggagaagcttgcagagcagctcaagcaagctgaggagctcaggcaatataaagtcctggttcacgctcaggaacgagagctgacccagttaagggagaagttgcgggaagggagagatgcctcccgctcattgaatgagcatctccaggccctccttactccggatgagccggacaagtcccaggggcaggacctccaagaacagctggctgaggggtgtagactggcacagcaccttgtccaaaagctcagcccagaaaatgacaacgatgacgatgaagatgttcaagttgagttggctgagaaagtgcagaaatcgtctgcccccagggagatgcagaaggctgaagaaaaggaagtccctgaggactcacaggaggaatgtgccatcacttattcaaatagccatggcccttatgactccaaccagccacataggaaaaccaaaatcacatttgaggaagacaaagtcgactcaactctgattggctcatcctctcatgttgaatgggaggatgctgtacacattattccagaaaatgaaagtgatgatgaggaagaggaagaaaaagggccagtgtctcccaggaatctgcaggagtctgaagaggaggaagtcccccaggagtcctgggatgaaggttattcgactctctcaattcctcctgaaatgttggcctcgtaccagtcttacagcagcacatttcactcattagaggaacagcaagtctgcatggctgttgacataggcagacatcggtgggatcaagtgaaaaaggaggaccaagaggcaacaggtcccaggctcagcagggagctgctggatgagaaagggcctgaagtcttgcaggactcactggatagatgttattcaactccttcaggttgtcttgaactgactgactcatgccagccctacagaagtgccttttacgtattggagcaacagcgtgttggcttggctgttgacatggatgaaattgaaaagtaccaagaagtggaagaagaccaagacccatcatgccccaggctcagcagggagctgctggatgagaaagagcctgaagtcttgcaggactcactggatagatgttattcgactccttcaggttatcttgaactgcctgacttaggccagccctacagcagtgctgtttactcattggaggaacagtaccttggcttggctcttgacgtggacagaactaaaaaggaccaagaagaggaagaagaccaaggcccaccatgccccaggctcagcagggagctgctggaggtagtagagcctgaagtcttgcaggactcactggatagatgttattcaactccttccagttgtcttgaacagcctgactcctgccagccctatggaagttccttttatgcattggaggaaaaacatgttggcttttctcttgacgtgggagaaattgaaaagaaggggaaggggaagaaaagaaggggaagaagatcaaagaaggaaagaagaaggggaagaaaagaaggggaagaagatcaaaacccaccatgccccaggctcagcagggagctgctggatgagaaagggcctgaagtcttgcaggactcactggatagatgttattcaactccttcaggttgtcttgaactgactgactcatgccagccctacagaagtgccttttacgtattggagcaacagcgtgttggcttggctgttgacatggatgaaattgaaaagtaccaagaagtggaagaagaccaagacccatcatgccccaggctcagcagggagctgctggatgagaaagggcctgaagtcttgcaggactcactggatagatgttattcaactccttcaggttgtcttgaactgactgactcatgccagccctacagaagtgccttttacgtattggagcaacagcgtgttggcttggctgttgacatggatgaaattgaaaagtaccaagaagtggaagaagaccaagacccatcatgccccaggctcagcagggagctgctggatgagaaagagcctgaagtcttgcaggactcactggatagatgttattcgactccttcaggttatcttgaactgcctgacttaggccagccctacagcagtgctgtttactcattggaggaacagtaccttggcttggctcttgacgtggacagaactaaaaaggaccaagaagaggaagaagaccaaggcccaccatgccccaggctcagcagggagctgctggaggtagtagagcctgaagtcttgcaggactcactggatagatgttattcaactccttccagttgtcttgaacagcctgactcctgccagccctatggaagttccttttatgcattggaggaaaaacatgttggcttttctcttgacgtgggagaaattgaaaagaaggggaaggggaagaaaagaaggggaagaagatcaaagaaggaaagaagaaggggaagaaaagaaggggaagaagatcaaaacccaccatgccccaggctcaacggcgtgctgatggaagtggaagagcctgaagtcttacaggactcactggatggatgttattctactccgtcaatgtactttgaactacctgactcattccagcactacagaagtgtgttttactcatttgaggaacagcacatcagcttcgccctttacgtggacaataggttttttactttgacggtgacaagtctccacctggtgttccagatgggagtcatattcccacaataaacagcccttactaagccgagagatgtcattcctgcaggcaggacctataggcacgtgaagatttgaatgaaagtacagttccatttggaagcccagacataggatgggtcagtgggcatggctgtattcctattctcaaaccatgccagtggcaacctgtgctcagtctgaagacaatggacccacgttaggtgtgacacgttcacataactgtgcagcacatgccgggagtgatcagtcagacattttaatttgaaccacgtatctctgggtagctacaaaattcctcagggatttcattttgcaggcatgtctctgagcttctatacctgctcaaggtcattgtcatctttgtgtttagctcatccaaaggtgttaccctggtttcaatgaacctaacctcattctttgtgtcttcagtgttggcttgttttagctgatccatctgtaacacaggagggatccttggttgaggattgtatttcagaaccaccaactgctcttgacaattgttaacccgctaggctcctttggttagagaagccacagtccttcagcctccaattggtgtcagtacttaggaagaccacagctagatggacaaacagcattgggaggccttagccctgctcttctcaattccatcctgtagagaacaggagtcaggagccgctggcaggagacagcatgtcacccaggactctgccggtgcagaatatgaacaatgccatgttcttgcagaaaacgcttagcctgagtttcataggaggtaatcaccagacaactgcagaatgtagaacactgagcaggacaactgacctgtctccttcacatagtccatatcaccacaaatcacacaacaaaaaggagaagagatattttgggtt

SEQ ID NO: 158746 - DNA, 2051 bp, Homo sapiens
  Payload ID: 11060
  Gene Symbol: NBPF20
  Gene Name: neuroblastoma breakpoint family, member 20
  ENST ID: ENST00000620821
  CDS Start-End: 174-1073
aaagtgctgtggggagtgatcacatttttcacaacagtaaggtaagaatttcagttactgacatccctcagtcctgattaaacctatttgatttcaccagtttttaacccatcatatgtttgggtttcttctccccagtccctgactccacctcttctgccacaaacgtcagcatggtggtatcagccggcccttggtccagcgagaaggcagagatgaacattctagaaatcaacgagaaattgcgcccccagttggcagagaacaaacagcagttcggaaacctcaaagagagatgttttgtaactcaactggccggcttcctggccaaccagcagaagaaatacaaatatgaagagtgcaaagacctcataaaatctatgctgaggaatgagcgacagttcaaggaggagaagcttgcagagcagctcaagcaagctgaggagctcaggcaatataaagtcctggttcacgctcaggaacgagagctgacccagttaagggagaagttgcgggaagggagagatgcctcccgctcattgaatgagcatctccaggccctccttactccggatgagccggacaagtcccaggggcaggacctccaagaacagctggctgaggggtgtagactggcacagcaccttgtccaaaagctcagcccagaaaatgacaacgatgacgatgaagatgttcaagttgagttggctgagaaagtgcagaaatcgtctgcccccagggagatgcagaaggctgaagaaaaggaagtccctgaggactcacaggaggaatgtgccatcacttattcaaatagccatggcccttatgactccaaccagccacataggaaaaccaaaatcacatttgaggaagacaaagtcgactcaactctgattggctcatcctctcatgttgaatgggaggatgctgtacacattattccagaaaatgaaagtgatgatgaggaagaggaagaaaaagggccagtgtctcccaggacatcggtgggatcaagtgaaaaaggaggaccaagaggcaacaggtcccaggctcagcagggagctgctggatgagaaagggcctgaagtcttgcaggactcactggatagatgttattcaactccttcaggttgtcttgaactgactgactcatgccagccctacagaagtgccttttacgtattggagcaacagcgtgttggcttggctgttgacatggatgaaattgaaaagtaccaagaagtggaagaagaccaagacccatcatgccccaggctcagcagggagctgctggatgagaaagagcctgaagtcttgcaggactcactggatagatgttattcgactccttcaggttatcttgaactgcctgacttaggccagccctacagcagtgctgtttactcattggaggaacagtaccttggcttggctcttgacgtggacagaactaaaaaggaccaagaagaggaagaagaccaaggcccaccatgccccaggctcagcagggagctgctggaggtagtagagcctgaagtcttgcaggactcactggatagatgttattcaactccttccagttgtcttgaacagcctgactcctgccagccctatggaagttccttttatgcattggaggaaaaacatgttggcttttctcttgacgtgggagaaattgaaaagaaggggaaggggaagaaaagaaggggaagaagatcaaagaagaaaagaagaaggggaagaaaagaaggggaagaagatcaaaacccaccatgccccaggctcaacggcgtgctgatggaagtggaagagcctgaagtcttacaggactcactggatggatgttattctactccgtcaatgtactttgaactacctgactcattccagcactacagaagtgtgttttactcatttgaggaacagcacatcagcttcgccctttacgtggacaataggttttttactttgacggtgacaagtctccacctggtgttccagatgggagtcatattcccacaataaacagcccttactaagccgagagatgt

SEQ ID NO: 158747 - DNA, 18450 bp, Homo sapiens
  Payload ID: 11060
  Gene Symbol: NBPF20
  Gene Name: neuroblastoma breakpoint family, member 20
  ENST ID: ENST00000392971
  CDS Start-End: 1201-16824
atgcttagatgtattgggaaagacacgggtctgtggcattgtcacaagggtacacgaatactgagagtgaatgctgaaggaatgatccccattggtgtccctgactccacctcttctgccacaaacgtcagcatggtggtatcagccggcccttggtccagcgagaaggcagagatgaacattctagaaatcaacgagaaattgcgcccccagttggcagagaacaaacagcagttcggaaacctcaaagagagatgttttgtaactcaactggccggcttcctggccaaccagcagaagaaatacaaatatgaagagtgcaaagacctcataaaatctatgctgaggaatgagcgacagttcaaggaggagaagcttgcagagcagctcaagcaagctgaggagctcaggcaatataaagtcctggttcacgctcaggaacgagagctgacccagttaagggagaagttgcgggaagggagagatgcctcccgctcattgaatgagcatctccaggccctccttactccggatgagccggacaagtcccaggggcaggacctccaagaacagctggctgaggggtgtagactggcacagcaccttgtccaaaagctcagcccagaaaatgacaacgatgacgatgaagatgttcaagttgagttggctgagaaagtgcagaaatcgtctgcccccagggagatgcagaaggctgaagaaaaggaagtccctgaggactcacaggaggaatgtgccatcacttattcaaatagccatggcccttatgactccaaccagccacataggaaaaccaaaatcacatttgaggaagacaaagtcgactcaactctgattggctcatcctctcatgttgaatgggaggatgctgtacacattattccagaaaatgaaagtgatgatgaggaagaggaagaaaaagggccagtgtctcccaggaatctgcaggagtctgaagaggaggaagtcccccaggagtcctgggatgaaggttattcgactctctcaattcctcctgaaatgttggcctcgtaccagtcttacagcagcacatttcactcattagaggaacagcaagtctgcatggctgttgacataggcagacatcggtgggatcaagtgaaaaaggaggaccaagaggcaacaggtcccaggtgagtctgagaaattgtggagaagtacatgtttaggctcagcagggagctgctggatgagaaagggcctgaagtcttgcaggactcactggatagatgttattcaactccttcaggttgtcttgaactgactgactcatgccagccctacagaagtgccttttacgtattggagcaacagcgtattggcttggctgttgacatggatgaaattgaaaagtaccaagaagtggaagaagaccaagacccatcatgccccaggctcagcagggagctgctggatgagaaagagcctgaagtcttgcaggactcactggatagatgttattcgactccttcaggttatcttgaactgcctgacttaggccagccctacagcagtgctgtttactcattggaggaacagtaccttggcttggctcttgacgtggacagaactaaaaaggaccaagaagaggaagaagaccaaggcccaccatgccccaggctcagcagggagctgctggaggtagtagagcctgaagtcttgcaggactcactggatagatgttattcaactccttccagttgtcttgaacagcctgactcctgccagccctatggaagttccttttatgcattggaggaaaaacatgttggcttttctcttgacgtgggagaaattgaaaagaaggggaaggggaagaaaagaaggggaagaagatcaaagaaggaaagaagaaggggaagaaaagaaggggaagaagatcaaaacccaccatgccccaggctcagcagggagctgctggatgagaaagggcctgaagtcttgcaggactcactggatagatgttattcaactccttcaggttgtcttgaactgactgactcatgccagccctacagaagtgccttttacgtattggagcaacagcgtgttggcttggctgttgacatggatgaaattgaaaagtaccaagaagtggaagaagaccaagacccatcatgccccaggctcagcagggagctgctggatgagaaagagcctgaagtcttgcaggactcactggatagatgttattcgactccttcaggttatcttgaactgcctgacttaggccagccctacagcagtgctgtttactcattggaggaacagtaccttggcttggctcttgacgtggacagaactaaaaaggaccaagaagaggaagaagaccaaggcccaccatgccccaggctcagcagggagctgctggaggtagtagagcctgaagtcttgcaggactcactggatagatgttattcaactccttccagttgtcttgaacagcctgactcctgccagccctatggaagttccttttatgcattggaggaaaaacatgttggcttttctcttgacgtgggagaaattgaaaagaaggggaaggggaagaaaagaaggggaagaagatcaaagaaggaaagaagaaggggaagaaaagaaggggaagaagatcaaaacccaccatgccccaggctcagcagggagctgctggatgagaaagggcctgaagtcttgcaggactcactggatagaagttattcaactccttcaggttgtcttgaactgactgactcatgccagccctacagaagtgccttttacgtattggagcaacagcgtgttggcttggctgttgacatggatgaaattgaaaagtaccaagaagtggaagaagaccaagacccatcatgccccaggctcagcagggagctgctggatgagaaagagcctgaagtcttgcaggactcactggatagatgttattcgactccttcaggttatcttgaactgcctgacttaggccagccctacagcagtgctgtttactcattggaggaacagtaccttggcttggctcttgacgtggacagaactaaaaaggaccaagaagaggaagaagaccaaggcccaccatgccccaggctcagcagggagctgctggaggtagtagagcctgaagtcttgcaggactcactggatagatgttattcaactccttccagttgtcttgaacagcctgactcctgccagccctatggaagttccttttatgcattggaggaaaaacatgttggcttttctctcgacgtgggagaaattgaaaagaaggggaaggggaagaaaagaaggggaagaagatcaaagaaggaaagaagaaggggaagaaaagaaggggaagaagatcaaaacccaccatgccccaggctcagcagggagctgctggatgagaaagggcctgaagtcttgcaggactcactggatagatgttattcaactccttcaggttgtcttgaactgactgactcatgccagccctacagaagtgccttttacgtattggagcaacagcgtgttggcttggctgttgacatggatgaaattgaaaagtaccaagaagtggaagaagaccaagacccatcatgccccaggctcagcagggagctgctggatgagaaagagcctgaagtcttgcaggactcactggatagatgttattcgactccttcaggttatcttgaactgcctgacttaggccagccctacagcagtgctgtttactcattggaggaacagtaccttggcttggctcttgacgtggacagaactaaaaaggaccaagaagaggaagaagaccaaggcccaccatgccccaggctcagcagggagctgctggaggtagtagagcctgaagtcttgcaggactcactggatagatgttattcaactccttccagttgtcttgaacagcctgactcctgccagccctatggaagttccttttatgcattggaggaaaaacatgttggcttttctcttgacgtgggagaaattgaaaagaaggggaaggggaagaaaagaaggggaagaagatcaaagaaggaaagaagaaggggaagaaaagaaggggaagaagatcaaaacccaccatgccccaggctcagcagggagctgctggatgagaaagggcctgaagtcttgcaggactcactggatagaagttattcaactccttcaggttgtcttgaactgactgactcatgccagccctacagaagtgccttttacgtattggagcaacagcgtgttggcttggctgttgacatggatgaaattgaaaagtaccaagaagtggaagaagaccaagacccatcatgccccaggctcagcagggagctgctggatgagaaagagcctgaagtcttgcaggactcactggatagatgttattcgactccttcaggttatcttgaactgcctgacttaggccagccctacagcagtgctgtttactcattggaggaacagtaccttggcttggctcttgacgtggacagaactaaaaaggaccaagaagaggaagaagaccaaggcccaccatgccccaggctcagcagggagctgctggaggtagtagagcctgaagtcttgcaggactcactggatagatgttattcaactccttccagttgtcttgaacagcctgactcctgccagccctatggaagttccttttatgcattggaggaaaaacatgttggcttttctctcgacgtgggagaaattgaaaagaaggggaaggggaagaaaagaaggggaagaagatcaaagaaggaaagaagaaggggaagaaaagaaggggaagaagatcaaaacccaccatgccccaggctcagcagggagctgctggatgagaaagggcctgaagtcttgcaggactcactggatagaagttattcaactccttcaggttgtcttgaactgactgactcatgccagccctacagaagtgccttttacgtattggagcaacagcgtgttggcttggctgttgacatggatgaaattgaaaagtaccaagaagtggaagaagaccaagacccatcatgccccaggctcagcagggagctgctggatgagaaagagcctgaagtcttgcaggactcactggatagatgttattcgactccttcaggttatcttgaactgcctgacttaggccagccctacagcagtgctgtttactcattggaggaacagtaccttggcttggctcttgacgtggacagaactaaaaaggaccaagaagaggaagaagaccaaggcccaccatgccccaggctcagcagggagctgctggaggtagtagagcctgaagtcttgcaggactcactggatagatgttattcaactccttccagttgtcttgaacagcctgactcctgccagccctatggaagttccttttatgcattggaggaaaaacatgttggcttttctctcgacgtgggagaaattgaaaagaaggggaaggggaagaaaagaaggggaagaagatcaaagaaggaaagaagaaggggaagaaaagaaggggaagaagatcaaaccccaccatgccccaggctcagcagggagctgctggatgagaaagggcctgaagtcttgcaggactcactggatagaagttattcaactccttcaggttgtcttgaactgactgactcatgccagccctacagaagtgccttttacgtattggagcaacagcgtgttggcttggctgttgacatggatgaaattgaaaagtaccaagaagtggaagaagaccaagacccatcatgccccaggctcagcagggagctgctggatgagaaagagcctgaagtcttgcaggactcactggatagatgttattcgactccttcaggttatcttgaactgcctgacttaggccagccctacagcagtgctgtttactcattggaggaacagtaccttggcttggctcttgacgtggacagaactaaaaaggaccaagaagaggaagaagaccaaggcccaccatgccccaggctcagcagggagctgctggaggtagtagagcctgaagtcttgcaggactcactggatagatgttattcaactccttccagttgtcttgaacagcctgactcctgccagccctatggaagttccttttatgcattggaggaaaaacatgttggcttttctctcgacgtgggagaaattgaaaagaaggggaaggggaagaaaagaaggggaagaagatcaaagaaggaaagaagaaggggaagaaaagaaggggaagaagatcaaaacccaccatgccccaggctcagcagggagctgctggatgagaaagggcctgaagtcttgcaggactcactggatagaagttattcaactccttcaggttgtcttgaactgactgactcatgccagccctacagaagtgccttttacgtattggagcaacagcgtgttggcttggctgttgacatggatgaaattgaaaagtaccaagaagtggaagaagaccaagacccatcatgccccaggctcagcagggagctgctggatgagaaagagcctgaagtcttgcaggactcactggatagatgttattcgactccttcaggttatcttgaactgcctgacttaggccagccctacagcagtgctgtttactcattggaggaacagtaccttggcttggctcttgacgtggacagaactaaaaaggaccaagaagaggaagaagaccaaggcccaccatgccccaggctcagcagggagctgctggaggtagtagagcctgaagtcttgcaggactcactggatagatgttattcaactccttccagttgtcttgaacagcctgactcctgccagccctatggaagttccttttatgcattggaggaaaaacatgttggcttttctctcgacgtgggagaaattgaaaagaaggggaaggggaagaaaagaaggggaagaagatcaaagaaggaaagaagaaggggaagaaaagaaggggaagaagatcaaaacccaccatgccccaggctcagcagggagctgctggatgagaaagggcctgaagtcttgcaggactcactggatagatgttattcaactccttcaggttgtcttgaactgactgactcatgccagccctacagaagtgccttttacgtattggagcaacagcgtgttggcttggctgttgacatggatgaaattgaaaagtaccaagaagtggaagaagaccaagacccatcatgccccaggctcagcagggagctgctggatgagaaagagcctgaagtcttgcaggactcactggatagatgttattcgactccttcaggttatcttgaactgcctgacttaggccagccctacagcagtgctgtttactcattggaggaacagtaccttggcttggctcttgacgtggacagaactaaaaaggaccaagaagaggaagaagaccaaggcccaccatgccccaggctcagcagggagctgctggaggtagtagagcctgaagtcttgcaggactcactggatagatgttattcaactccttccagttgtcttgaacagcctgactcctgccagccctatggaagttccttttatgcattggaggaaaaacatgttggcttttctctcgacgtgggagaaattgaaaagaaggggaaggggaagaaaagaaggggaagaagatcaaagaaggaaagaagaaggggaagaaaagaaggggaagaagatcaaaacccaccatgccccaggctcagcagggagctgctggatgagaaagggcctgaagtcttgcaggactcactggatagatgttattcaactccttcaggttgtcttgaactgactgactcatgccagccctacagaagtgccttttacgtattggagcaacagcgtgttggcttggctgttgacatggatgaaattgaaaagtaccaagaagtggaagaagaccaagacccatcatgccccaggctcagcagggagctgctggatgagaaagagcctgaagtcttgcaggactcactggatagatgttattcgactccttcaggttatcttgaactgcctgacttaggccagccctacagcagtgctgtttactcattggaggaacagtaccttggcttggctcttgacgtggacagaactaaaaaggaccaagaagaggaagaagaccaaggcccaccatgccccaggctcagcagggagctgctggaggtagtagagcctgaagtcttgcaggactcactggatagatgttattcaactccttccagttgtcttgaacagcctgactcctgccagccctatggaagttccttttatgcattggaggaaaaacatgttggcttttctctcgacgtgggagaaattgaaaagaaggggaaggggaagaaaagaaggggaagaagatcaaagaaggaaagaagaaggggaagaaaagaaggggaagaagatcaaaacccaccatgccccaggctcagcagggagctgctggatgagaaagggcctgaagtcttgcaggactcactggatagatgttattcaactccttcaggttgtcttgaactgactgactcatgccagccctacagaagtgccttttacgtattggagcaacagcgtgttggcttggctgttgacatggatgaaattgaaaagtaccaagaagtggaagaagaccaagacccatcatgccccaggctcagcagggagctgctggatgagaaagagcctgaagtcttgcaggactcactggatagatgttattcgactccttcaggttatcttgaactgcctgacttaggccagccctacagcagtgctgtttactcattggaggaacagtaccttggcttggctcttgacgtggacagaactaaaaaggaccaagaagaggaagaagaccaaggcccaccatgccccaggctcagcagggagctgctggaggtagtagagcctgaagtcttgcaggactcactggatagatgttattcaactccttccagttgtcttgaacagcctgactcctgccagccctatggaagttccttttatgcattggaggaaaaacatgttggcttttctctcgacgtgggagaaattgaaaagaaggggaaggggaagaaaagaaggggaagaagatcaaagaaggaaagaagaaggggaagaaaagaaggggaagaagatcaaaacccaccatgccccaggctcagcagggagctgctggatgagaaagggcctgaagtcttgcaggactcactggatagaagttattcaactccttcaggttgtcttgaactgactgactcatgccagccctacagaagtgccttttacgtattggagcaacagcgtgttggcttggctgttgacatggatgaaattgaaaagtaccaagaagtggaagaagaccaagacccatcatgccccaggctcagcagggagctgctggatgagaaagagcctgaagtcttgcaggactcactggatagatgttattcgactccttcaggttatcttgaactgcctgacttaggccagccctacagcagtgctgtttactcattggaggaacagtaccttggcttggctcttgacgtggacagaactaaaaaggaccaagaagaggaagaagaccaaggcccaccatgccccaggctcagcagggagctgctggaggtagtagagcctgaagtcttgcaggactcactggatagatgttattcaactccttccagttgtcttgaacagcctgactcctgccagccctatggaagttccttttatgcattggaggaaaaacatgttggcttttctcttgacgtgggagaaattgaaaagaaggggaaggggaagaaaagaaggggaagaagatcaaagaaggaaagaagaaggggaagaaaagaaggggaagaagatcaaaacccaccatgccccaggctcagcagggagctgctggatgagaaagggcctgaagtcttgcaggactcactggatagaagttattcaactccttcaggttgtcttgaactgactgactcatgccagccctacagaagtgccttttacgtattggagcaacagcgtgttggcttggctgttgacatggatgaaattgaaaagtaccaagaagtggaagaagaccaagacccatcatgccccaggctcagcagggagctgctggatgagaaagagcctgaagtcttgcaggactcactggatagatgttattcgactccttcaggttatcttgaactgcctgacttaggccagccctacagcagtgctgtttactcattggaggaacagtaccttggcttggctcttgacgtggacagaactaaaaaggaccaagaagaggaagaagaccaaggcccaccatgccccaggctcagcagggagctgctggaggtagtagagcctgaagtcttgcaggactcactggatagatgttattcaactccttccagttgtcttgaacagcctgactcctgccagccctatggaagttccttttatgcattggaggaaaaacatgttggcttttctctcgacgtgggagaaattgaaaagaaggggaaggggaagaaaagaaggggaagaagatcaaagaaggaaagaagaaggggaagaaaagaaggggaagaagatcaaaacccaccatgccccaggctcagcagggagctgctggatgagaaagggcctgaagtcttgcaggactcactggatagaagttattcaactccttcaggttgtcttgaactgactgactcatgccagccctacagaagtgccttttacgtattggagcaacagcgtgttggcttggctgttgacatggatgaaattgaaaagtaccaagaagtggaagaagaccaagacccatcatgccccaggctcagcagggagctgctggatgagaaagagcctgaagtcttgcaggactcactggatagatgttattcgactccttcaggttatcttgaactgcctgacttaggccagccctacagcagtgctgtttactcattggaggaacagtaccttggcttggctcttgacgtggacagaactaaaaaggaccaagaagaggaagaagaccaaggcccaccatgccccaggctcagcagggagctgctggaggtagtagagcctgaagtcttgcaggactcactggatagatgttattcaactccttccagttgtcttgaacagcctgactcctgccagccctatggaagttccttttatgcattggaggaaaaacatgttggcttttctcttgacgtgggagaaattgaaaagaaggggaaggggaagaaaagaaggggaagaagatcaaagaaggaaagaagaaggggaagaaaagaaggggaagaagatcaaaacccaccatgccccaggctcagcagggagctgctggatgagaaagggcctgaagtcttgcaggactcactggatagaagttattcaactccttcaggttgtcttgaactgactgactcatgccagccctacagaagtgccttttacgtattggagcaacagcgtgttggcttggctgttgacatggatgaaattgaaaagtaccaagaagtggaagaagaccaagacccatcatgccccaggctcagcagggagctgctggatgagaaagagcctgaagtcttgcaggactcactggatagatgttattcgactccttcaggttatcttgaactgcctgacttaggccagccctacagcagtgctgtttactcattggaggaacagtaccttggcttggctcttgacgtggacagaactaaaaaggaccaagaagaggaagaagaccaaggcccaccatgccccaggctcagcagggagctgctggaggtagtagagcctgaagtcttgcaggactcactggatagatgttattcaactccttccagttgtcttgaacagcctgactcctgccagccctatggaagttccttttatgcattggaggaaaaacatgttggcttttctcttgacgtgggagaaattgaaaagaaggggaaggggaagaaaagaaggggaagaagatcaaagaaggaaagaagaaggggaagaaaagaaggggaagaagatcaaaacccaccatgccccaggctcagcagggagctgctggatgagaaagggcctgaagtcttgcaggactcactggatagatgttattcaactccttcaggttgtcttgaactgactgactcatgccagccctacagaagtgccttttacgtattggagcaacagcgtgttggcttggctgttgacatggatgaaattgaaaagtaccaagaagtggaagaagaccaagacccatcatgccccaggctcagcagggagctgctggatgagaaagagcctgaagtcttgcaggactcactggatagatgttattcgactccttcaggttatcttgaactgcctgacttaggccagccctacagcagtgctgtttactcattggaggaacagtaccttggcttggctcttgacgtggacagaactaaaaaggaccaagaagaggaagaagaccaaggcccaccatgccccaggctcagcagggagctgctggaggtagtagagcctgaagtcttgcaggactcactggatagatgttattcaactccttccagttgtcttgaacagcctgactcctgccagccctatggaagttccttttatgcattggaggaaaaacatgttggcttttctcttgacgtgggagaaattgaaaagaaggggaaggggaagaaaagaaggggaagaagatcaaagaaggaaagaagaaggggaagaaaagaaggggaagaagatcaaaacccaccatgccccaggctcagcagggagctgctggatgagaaagggcctgaagtcttgcaggactcactggatagatgttattcaactccttcaggttgtcttgaactgactgactcatgccagccctacagaagtgccttttacgtattggagcaacagcgtgttggcttggctgttgacatggatgaaattgaaaagtaccaagaagtggaagaagaccaagacccatcatgccccaggctcagcagggagctgctggatgagaaagagcctgaagtcttgcaggactcactggatagatgttattcgactccttcaggttatcttgaactgcctgacttaggccagccctacagcagtgctgtttactcattggaggaacagtaccttggcttggctcttgacgtggacagaactaaaaaggaccaagaagaggaagaagaccaaggcccaccatgccccaggctcagcagggagctgctggaggtagtagagcctgaagtcttgcaggactcactggatagatgttattcaactccttccagttgtcttgaacagcctgactcctgccagccctatggaagttccttttatgcattggaggaaaaacatgttggcttttctcttgacgtgggagaaattgaaaagaaggggaaggggaagaaaagaaggggaagaagatcaaagaaggaaagaagaaggggaagaaaagaaggggaagaagatcaaaccccaccatgccccaggctcagcagggagctgctggatgagaaagggcctgaagtcttgcaggactcactggatagatgttattcaactccttcaggttgtcttgaactgactgactcatgccagccctacagaagtgccttttacgtattggagcaacagcgtgttggcttggctgttgacatggatgaaattgaaaagtaccaagaagtggaagaagaccaagacccatcatgccccaggctcagcagggagctgctggatgagaaagagcctgaagtcttgcaggactcactggatagatgttattcgactccttcaggttatcttgaactgcctgacttaggccagccctacagcagtgctgtttactcattggaggaacagtaccttggcttggctcttgacgtggacagaactaaaaaggaccaagaagaggaagaagaccaaggcccaccatgccccaggctcagcagggagctgctggaggtagtagagcctgaagtcttgcaggactcactggatagatgttattcaactccttccagttgtcttgaacagcctgactcctgccagccctatggaagttccttttatgcattggaggaaaaacatgttggcttttctcttgacgtgggagaaattgaaaagaaggggaaggggaagaaaagaaggggaagaagatcaaagaaggaaagaagaaggggaagaaaagaaggggaagaagatcaaaacccaccatgccccaggctcagcagggagctgctggatgagaaagagcctgaagtcttgcaggactcactggatagatgttattcgactccttcaggttatcttgaactgcctgacttaggccagccctacagcagtgctgtttactcattggaggaacagtaccttggcttggctcttgacgtggacagaactaaaaaggaccaagaagaggaagaagaccaaggcccaccatgccccaggctcagcagggagctgctggaggtagtagagcctgaagtcttgcaggactcactggatagatgttattcaactccttccagttgtcttgaacagcctgactcctgccagccctatggaagttccttttatgcattggaggaaaaacatgttggcttttctcttgacgtgggagaaattgaaaagaaggggaaggggaagaaaagaaggggaagaagatcaaagaaggaaagaagaaggggaagaaaagaaggggaagaagatcaaaacccaccatgccccaggctcagcagggagctgctggatgagaaagagcctgaagtcttgcaggactcactggatagatgttattcgactccttcaggttatcttgaactgcctgacttaggccagccctacagcagtgctgtttactcattggaggaacagtaccttggcttggctcttgacgtggacagaactaaaaaggaccaagaagaggaagaagaccaaggcccaccatgccccaggctcagcagggagctgctggaggtagtagagcctgaagtcttgcaggactcactggatagatgttattcaactccttccagttgtcttgaactgactgactcatgccagccctacagaagtgccttttacgtattggagcaacagcgtgttggcttggctgttgacatggatgaaattgaaaagtaccaagaagtggaagaagaccaagacccatcatgccccaggctcagcagggagctgctggatgagaaagagcctgaagtcttgcaggactcactggatagatgttattcgactccttcaggttatcttgaactgcctgacttaggccagccctacagcagtgctgtttactcattggaggaacagtaccttggcttggctcttgacgtggacagaactaaaaaggaccaagaagaggaagaagaccaaggcccaccatgccccaggctcagcagggagctgctggaggtagtagagcctgaagtcttgcaggactcactggatagatgttattcaactccttccagttgtcttgaacagcctgactcctgccagccctatggaagttccttttatgcattggaggaaaaacatgttggcttttctctcgacgtgggagaaattgaaaagaaggggaaggggaagaaaagaaggggaagaagatcaaagaaggaaagaagaaggggaagaaaagaaggggaagaagatcaaaacccaccatgccccaggctcagcagggagctgctggatgagaaagggcctgaagtcttgcaggactcactggatagatgttattcaactccttcaggttgtcttgaactgactgactcatgccagccctacagaagtgccttttacgtattggagcaacagcgtgttggcttggctgttgacatggatgaaattgaaaagtaccaagaagtggaagaagaccaagacccatcatgccccaggctcagcagggagctgctggatgagaaagagcctgaagtcttgcaggactcactggatagatgttattcgactccttcaggttatcttgaactgcctgacttaggccagccctacagcagtgctgtttactcattggaggaacagtaccttggcttggctcttgacgtggacagaactaaaaaggaccaagaagaggaagaagaccaaggcccaccatgccccaggctcagcagggagctgctggaggtagtagagcctgaagtcttgcaggactcactggatagatgttattcaactccttccagttgtcttgaacagcctgactcctgccagccctatggaagttccttttatgcattggaggaaaaacatgttggcttttctcttgacgtgggagaaattgaaaagaaggggaaggggaagaaaagaaggggaagaagatcaaagaagaaaagaagaaggggaagaaaagaaggggaagaagatcaaaacccaccatgccccaggctcaacggcgtgctgatggaagtggaagagcctgaagtcttacaggactcactggatggatgttattctactccgtcaatgtactttgaactacctgactcattccagcactacagaagtgtgttttactcatttgaggaacagcacatcagcttcgccctttacgtggacaataggttttttactttgacggtgacaagtctccacctggtgttccagatgggagtcatattcccacaataaacagcccttactaagccgagagatgtcattcctgcaggcaggacctataggcacgtgaagatttgaatgaaagtacagttccatttggaagcccagacataggatgggtcagtgggcatggctgtattcctattctcaaaccatgccagtggcaacctgtgctcagtctgaagacaatggacccacgttaggtgtgacacgttcacataactgtgcagcacatgccgggagtgatcagtcagacattttaatttgaaccacgtatctctgggtagctacaaaattcctcagggatttcattttgcaggcatgtctctgagcttctatacctgctcaaggtcattgtcatctttgtgtttagctcatccaaaggtgttaccctggtttcaatgaacctaacctcattctttgtgtcttcagtgttggcttgttttagctgatccatctgtaacacaggagggatccttggttgaggattgtatttcagaaccaccaactgctcttgacaattgttaacccgctaggctcctttggttagagaagccacagtccttcagcctccaattggtgtcagtacttaggaagaccacagctagatggacaaacagcattgggaggccttagccctgctcttctcaattccatcctgtagagaacaggagtcaggagccgctggcaggagacagcatgtcacccaggactctgccggtgcagaatatgaacaatgccatgttcttgcagaaaacgcttagcctgagtttcataggaggtaatcaccagacaactgcagaatgtagaacactgagcaggacaactgacctgtctccttcacatagtccatatcaccacaaatcacacaacaaaaaggagaagagatattttgggttcaaaaaacgtaaaaagataatgtagctgcatttctttagttattttgaaccccaaatatttcctcatctttttgttgttgtcatggatggtggtgacatggacttgtttatagaggacaggtcagctgtctggctcaatgatctacattctgaagttgtctgaaaatgtcttcatgattaaattcagcctaaacgttttgccgggaacactgcagagacaatgctgtgagtttccaacctcagcccatctgcgggcagagaaggtctagtttgtccatcaccattatgatatcaggactggttacttggttaaggaggggtctaggagatctgtcccttttagagacaccttacttataatgaagaagtacttgggaaagcggttttcaagagtataaatatcctgtattctaatgatcatcctctaaacattttatcatttattaatcctccctgcctgtgtctattattatattcatatctctacactgcaaattttgggtctcaatttttactgtgcctttgtttttactagtgtctgctgttgcaaaaagaagaagacattctctgcctgagttttaatttttgtccaaagttaattttaatctatacaattaaaaccttttgcctatcactctggacttctggattgttttttacattcagtgttataatatttgattatgctgattggttttggtgggtactgatgcgaattaataaaaacatttcatttcca

SEQ ID NO: 158748 - DNA, 3689 bp, Homo sapiens
  Payload ID: 11060
  Gene Symbol: NBPF20
  Gene Name: neuroblastoma breakpoint family, member 20
  ENST ID: ENST00000622803
  CDS Start-End: 18-2783
aagacctcataaaatctatgctgaggaatgagcgacagttcaaggaggagaagcttgcagagcagctcaagcaagctgaggagctcaggcaatataaagtcctggttcacgctcaggaacgagagctgacccagttaagggagaagttgcgggaagggagagatgcctcccgctcattgaatgagcatctccaggccctccttactccggatgagccggacaagtcccaggggcaggacctccaagaacagctggctgaggggtgtagactggcacagcaccttgtccaaaagctcagcccagaaaatgacaacgatgacgatgaagatgttcaagttgagttggctgagaaagtgcagaaatcgtctgcccccagggagatgcagaaggctgaagaaaaggaagtccctgaggactcacaggaggaatgtgccatcacttattcaaatagccatggcccttatgactccaaccagccacataggaaaaccaaaatcacatttgaggaagacaaagtcgactcaactctgattggctcatcctctcatgttgaatgggaggatgctgtacacattattccagaaaatgaaagtgatgatgaggaagaggaagaaaaagggccagtgtctcccaggaatctgcaggagtctgaagaggaggaagtcccccaggagtcctgggatgaaggttattcgactctctcaattcctcctgaaatgttggcctcgtaccagtcttacagcagcacatttcactcattagaggaacagcaagtctgcatggctgttgacataggcagacatcggtgggatcaagtgaaaaaggaggaccaagaggcaacaggtcccaggctcagcagggagctgctggatgagaaagggcctgaagtcttgcaggactcactggatagatgttattcaactccttcaggttgtcttgaactgactgactcatgccagccctacagaagtgccttttacgtattggagcaacagcgtgttggcttggctgttgacatggatgaaattgaaaagtaccaagaagtggaagaagaccaagacccatcatgccccaggctcagcagggagctgctggatgagaaagagcctgaagtcttgcaggactcactggatagatgttattcgactccttcaggttatcttgaactgcctgacttaggccagccctacagcagtgctgtttactcattggaggaacagtaccttggcttggctcttgacgtggacagaactaaaaaggaccaagaagaggaagaagaccaaggcccaccatgccccaggctcagcagggagctgctggaggtagtagagcctgaagtcttgcaggactcactggatagatgttattcaactccttccagttgtcttgaacagcctgactcctgccagccctatggaagttccttttatgcattggaggaaaaacatgttggcttttctctcgacgtgggagaaattgaaaagaaggggaaggggaagaaaagaaggggaagaagatcaaagaaggaaagaagaaggggaagaaaagaaggggaagaagatcaaaacccaccatgccccaggctcagcagggagctgctggatgagaaagggcctgaagtcttgcaggactcactggatagatgttattcaactccttcaggttgtcttgaactgactgactcatgccagccctacagaagtgccttttacgtattggagcaacagcgtgttggcttggctgttgacatggatgaaattgaaaagtaccaagaagtggaagaagaccaagacccatcatgccccaggctcagcagggagctgctggatgagaaagggcctgaagtcttgcaggactcactggatagatgttattcaactccttcaggttgtcttgaactgactgactcatgccagccctacagaagtgccttttacgtattggagcaacagcgtgttggcttggctgttgacatggatgaaattgaaaagtaccaagaagtggaagaagaccaagacccatcatgccccaggctcagcagggagctgctggatgagaaagagcctgaagtcttgcaggactcactggatagatgttattcgactccttcaggttatcttgaactgcctgacttaggccagccctacagcagtgctgtttactcattggaggaacagtaccttggcttggctcttgacgtggacagaactaaaaaggaccaagaagaggaagaagaccaaggcccaccatgccccaggctcagcagggagctgctggaggtagtagagcctgaagtcttgcaggactcactggatagatgttattcaactccttccagttgtcttgaacagcctgactcctgccagccctatggaagttccttttatgcattggaggaaaaacatgttggcttttctctcgacgtgggagaaattgaaaagaaggggaaggggaagaaaagaaggggaagaagatcaaagaaggaaagaagaaggggaagaaaagaaggggaagaagatcaaaacccaccatgccccaggctcaacggcgtgctgatggaagtggaagagcctgaagtcttacaggactcactggatggatgttattctactccgtcaatgtactttgaactacctgactcattccagcactacagaagtgtgttttactcatttgaggaacagcacatcagcttcgccctttacgtggacaataggttttttactttgacggtgacaagtctccacctggtgttccagatgggagtcatattcccacaataaacagcccttactaagccgagagatgtcattcctgcaggcaggacctataggcacgtgaagatttgaatgaaagtacagttccatttggaagcccagacataggatgggtcagtgggcatggctgtattcctattctcaaaccatgccagtggcaacctgtgctcagtctgaagacaatggacccacgttaggtgtgacacgttcacataactgtgcagcacatgccgggagtgatcagtcagacattttaatttgaaccacgtatctctgggtagctacaaaattcctcagggatttcattttgcaggcatgtctctgagcttctatacctgctcaaggtcattgtcatctttgtgtttagctcatccaaaggtgttaccctggtttcaatgaacctaacctcattctttgtgtcttcagtgttggcttgttttagctgatccatctgtaacacaggagggatccttggttgaggattgtatttcagaaccaccaactgctcttgacaattgttaacccgctaggctcctttggttagagaagccacagtccttcagcctccaattggtgtcagtacttaggaagaccacagctagatggacaaacagcattgggaggccttagccctgctcttctcaattccatcctgtagagaacaggagtcaggagccgctggcaggagacagcatgtcacccaggactctgccggtgcagaatatgaacaatgccatgttcttgcagaaaacgcttagcctgagtttcataggaggtaatcaccagacaactgcagaatgtagaacactgagcaggacaactgacctgtctccttcacatagtccatatcaccacaaatcacacaacaaaaaggagaagagatattttgggttcaaaaaacgtaaaaagata

SEQ ID NO: 158749 - DNA, 3671 bp, Homo sapiens
  Payload ID: 11061
  Gene Symbol: NBPF26
  Gene Name: neuroblastoma breakpoint family, member 26
  ENST ID: ENST00000609741
  CDS Start-End: 18-2783
aagatctcataaaatctatgctgaggaatgagcgacagttcaaggaggagaagcttgcagagcagctcaagcaagctgaggagctcaggcaatataaagtcctggttcacgctcaggaacgagagctgacccagttaagggagaagttgcgggaagggagagatgcctcccgctcattgaatgagcatctccaggccctcctcactccggatgagccggacaagtcccaggggcaggacctccaagaacagctggctgaggggtgtagactggcacagcaccttgtccaaaagctcagcccagaaaatgacaacgatgacgatgaagatgttcaagttgaggtggctgagaaagtgcagaaatcgtctgcccccagggagatgcagaaggctgaagaaaaggaagtccctgaggactcactggaggaatgtgccatcacttgttcaaatagccatggcccttatgactgcaaccagccacataggaaaaccaaaatcacatttgaggaagacaaagtcgactcaactctcattggctcatcctctcatgttgaatgggaggatgctgtacacattattccagaaaatgaaagtgatgatgaggaagaggaagaaaaaggaccagtgtctcccaggaatctgcaggagtctgaagaggaggaagtcccccaggagtcctgggatgaaggttattcgactctctcaattcctcctgaaatgttagcctcgtacaagtcttacagcagcacatttcactcattagaggaacagcaagtctgcatggctgttgacataggcagacatcggtgggatcaagtgaaaaaggaggaccacgaggcaacaggtcccaggctcagcagagagctgctggatgagaaagggcctgaagtcttgcaggactcactggatagatgttattcaactccttcaggttgtcttgaactgactgactcatgccagccctacagaagtgccttttacgtattggagcaacagcgtgttggcttggctgttgacatggatgaaattgaaaagtaccaagaagtggaagaagaccaagacccatcatgccccaggctcagcagggagctgctggatgagaaagagcctgaagtcttgcaggactcactgggtagatgttattcgactccttcaggttatcttgaactgcctgacttaggccagccctacagcagtgctgtttactcattggaggaacagtaccttggcttggctcttgacgtggacagaattaaaaaggaccaagaagaggaagaagaccaaggcccaccatgccccaggctcagcagggagctgctggaggtagtagagcctgaagtcttgcaggactcactggatagatgttattcaactccttccagttgtcttgaacagcctgactcctgccagccctatggaagttccttttatgcattggaggaaaaacatgttggcttttctcttgacgtgggagaaattgaaaagaaggggaaggggaagaaaagaaggggaagaagatcaaagaaggaaagaagaaggggaagaaaagaaggggaagaagatcaaaacccaccatgccccaggctcagcagggagctgctggatgagaaagggcctgaagtcttgcaggactcactggatagatgttattcaactccttcaggttgtcttgaactgactgactcatgccagccctacagaagtgccttttacatattggagcaacagcgtgttggcttggctgttgacatggatgaaattgaaaagtaccaagaagtggaagaagaccaagacccatcatgccccaggctcagcagggagctgctggaggtagtagagcctgaagtcttgcaggactcactggatagatgttattcaactccttccagttgtcttgaacagcctgactcctgccagccctatggaagttccttttatgcattggaggaaaaacatgttggcttttctcttgacgtgggagaaattgaaaagtaccaagaagtggaagaagaccaagacccatcatgccccaggctcagcagggagctgctggatgagaaagagcctgaagtcttgcaggactcactgggtagatgttattcgactccttcaggttatcttgaactgcctgacttaggccagccctacagcagtgctgtttactcattggaggaacagtaccttggcttggctcttgacgtggacagaattaaaaaggaccaagaagaggaagaagaccaaggcccaccatgccccaggctcagcagggagctgctggaggtagtagagcctgaagtcttgcaggactcactggatagatgttattcaactccttccagttgtcttgaacagcctgactcctgccagccctatggaagttccttttatgcattggaggaaaaacatgttggcttttctcttgacgtgggagaaattgaaaagaaggggaaggggaagaaaagaaggggaagaagatcaaagaaggaaagaagaaggggaagaaaagaaggggaagaagatcaaaacccaccatgccccaggctcaacagcatgctgatggaagtggaagagcctgaagtcttgcaggactcactggatatatgttattcgactccgtcaatgtactttgaactacctgactcattccagcactacagaagtgtgttttactcatttgaggaagagcatatcagcttcgccctttacgtggacaataggttttttactttgacggtgacaagtctccacctggtgttccagatgggagtcatattcccacaataagcagcccttactaagccgagaggtgtcattcctgcaggcaggacctataggcacgtgaagatttgaatgaaagtacagttccatttggaagcccagacataggatggttcagtgggcatggctctattcctattctcaaaccatgccagtggcaacctgtgctcagtctgaagacaatggacccacgttaggtgtgacacgttcacataactgtgcagcacatgccgggagtgatcagtcagacattttaatttgaaccacgtatctctgggtagctacaaaattcctcagggatgtcattttgcaggcatgtctctgagcttctatacctgctcaaggtcattgtcatctttgtgtttagctcatccaaaggtgttaccctggtttcaatgaacctaacctcattctttgtgtcttcagtgttggcttgttttagctgatccatctgtaacacaggagggatccttggctgaggattgtatttcagaaccaccaactgctcttgacaattgttaacccgctaggctcctttggttagagaagccacagtccttcagcctccaattggtgtcagtacttaggaagaccacagctagatggacaaacagcattgggaggccttagccctgctcctctcaattccatcctgtagagaacaggagtcaggagccgctggcaggagacagcatgtcacccaggactctgccggtgcagaatatgagcaatgccatgttcttgcagaaaacgcttaacctgagtttcataggaggtaatcaccagacaactgcagaatgtagaacactgagcaggacaactgacctgtctccttcacatagtccatatcaccacaaatcacacaacaaaaaggagaagagatattttcggttg

SEQ ID NO: 158750 - DNA, 2656 bp, Homo sapiens
  Payload ID: 11061
  Gene Symbol: NBPF26
  Gene Name: neuroblastoma breakpoint family, member 26
  ENST ID: ENST00000615145
  CDS Start-End: 72-1679
aaagtgctgtggggagtgatcacatttttcacaacatccctgactccacctcttctgccacaaacgtcagcatggtggtatcagccggccattggtccagtgagaaggcagagatgaacattctagaaatcaacgagacattgcgcccccagctgccagagaacaaacagcagttgagaaacctcaaagagatgttttctaactcaactggccggcttcctggccaaccgacagaagaaatacagcaatataaagtcctggttcactctcaggaacgagagctgacgcagttaaaggagaagttacgggaagggagagatgcctcccgctcattgaatgagcatctccaggccctcctcactccggatgagccggacaagtcccaggggcaggacctccaagaacagctggctgaggggtgtagactggcacagcaccttgtccaaaagctcagcccagaaaatgacgaagatgaggatgaagatgttcaagttgaggaggatgagaaagtactggaatcatctgcccccagggaggtgcagaagactgaagagagcaaagtccctgaggactcactggaggaatgtgccatcacttgttcaaatagccacggcccttgtgactccaaccagcctcacaagaacatcaaaatcacatttgaggaagacgaagtcaactcaactctggttgtagacagagaatcctctcatgatgaatgtcaggatgctctaaacattctcccagtccctggccccacctcttctgccacaaacgtcagcatggtggtatcagccggccctttgtccggcgagaaggcagcgataaacattctagaaatcaatgagaaattgcgcccccagctggcagagaagaaacagcagttcagaaacctcaaagagaaatgttttctaactcaactggccggcttcctggccaaccagcagaacaaatacaaatatgaagagtgcaaagatctcataaaatctatgctgaggaatgagcgacagttcaaggaggagaagcttgcagagcagctcaagcaagctgaggagctcaggcaatataaagtcctggttcacgctcaggaacgagagctgacccagttaagggagaagttgcgggaagggagagatgcctcccgctcattgaatgagcatctccaggccctcctcactccggatgagccggacaagtcccaggggcaggacctccaagaacagctggctgaggggtgtagactggcacagcaccttgtccaaaagctcagcccagaaaatgacaacgatgacgatgaagatgttcaagttgaggtggctgagaaagtgcagaaatcgtctgcccccagggagatgcagaaggctgaagaaaaggaagtccctgaggactcactggaggaatgtgccatcacttgttcaaatagccatggcccttatgactgcaaccagccacataggaaaaccaaaatcacatttgaggaagacaaagtcgactcaactctcattggctcatcctctcatgttgaatgggaggatgctgtacacattattccagaaaatgaaagtgatgatgaggaagaggaagaaaaaggaccagtgtctcccaggacatcggtgggatcaagtgaaaaaggaggaccacgaggcaacaggtcccaggctcagcagggagctgctggatgagaaagggcctgaagtcttgcaggactcactggatagatgttattcaactccttcaggttgtcttgaactgactgactcatgccagccctacagaagtgccttttacatattggagcaacagcgtgttggcttggctgttgacatggatgaaattgaaaagtaccaagaagtggaagaagaccaagacccatcatgccccaggctcagcagggagctgctggatgagaaagagcctgaagtcttgcaggactcactgggtagatgttattcgactccttcaggttatcttgaactgcctgacttaggccagccctacagcagtgctgtttactcattggaggaacagtaccttggcttggctcttgacgtggacagaattaaaaaggaccaagaagaggaagaagaccaaggcccaccatgccccaggctcagcagggagctgctggaggtagtagagcctgaagtcttgcaggactcactggatagatgttattcaactccttccagttgtcttgaacagcctgactcctgccagccctatggaagttccttttatgcattggaggaaaaacatgttggcttttctcttgacgtgggagaaattgaaaagaaggggaaggggaagaaaagaaggggaagaagatcaaagaaggaaagaagaaggggaagaaaagaaggggaagaagatcaaaacccaccatgccccaggctcaacagcatgctgatggaagtggaagagcctgaagtcttgcaggactcactggatatatgttattcgactccgtcaatgtactttgaactacctgactcattccagcactacagaagtgtgttttactcatttgaggaagagcatatcagcttcgccctttacgtggacaataggttttttactttgacggtgacaagtctccacctggtgttccagatgggagtcatattcccacaataagcagcccttactaagccgagaggtg

SEQ ID NO: 158751 - DNA, 1831 bp, Homo sapiens
  Payload ID: 11061
  Gene Symbol: NBPF26
  Gene Name: neuroblastoma breakpoint family, member 26
  ENST ID: ENST00000611702
  CDS Start-End: 72-1805
aaagtgctgtggggagtgatcacatttttcacaacatccctgactccacctcttctgccacaaacgtcagcatggtggtatcagccggccattggtccagtgagaaggcagagatgaacattctagaaatcaacgagacattgcgcccccagctgccagagaacaaacagcagttgagaaacctcaaagagaaatgttttctaactcaactggccggcttcctggccaaccgacagaagaaatacaagtatgaagagtgtaaagacctcataaaatttatgctgaggaatgagcgacagttcaaggaggagaagcttgcagagcagctcaagcaagctgaggagctcaggcaatataaagtcctggttcactctcaggaacgagagctgacgcagttaaaggagaagttacgggaagggagagatgcctcccgctcattgaatgagcatctccaggccctcctcactccggatgagccggacaagtcccaggggcaggacctccaagaacagctggctgaggggtgtagactggcacagcaccttgtccaaaagctcagcccagaaaatgacgaagatgaggatgaagatgttcaagttgaggaggatgagaaagtactggaatcatctgcccccagggagatgcagaaggctgaagaaaaggaagtccctgaggactcactggaggaatgtgccatcacttgttcaaatagccatggcccttatgactgcaaccagccacataggaaaaccaaaatcacatttgaggaagacaaagtcgactcaactctcattggctcatcctctcatgttgaatgggaggatgctgtacacattattccagaaaatgaaagtgatgatgaggaagaggaagaaaaaggaccagtgtctcccaggaatctgcaggagtctgaagaggaggaagtcccccaggagtcctgggatgaaggttattcgactctctcaattcctcctgaaatgttagcctcgtacaagtcttacagcagcacatttcactcattagaggaacagcaagtctgcatggctgttgacataggcagacatcggtgggatcaagtgaaaaaggaggaccacgaggcaacaggtcccaggctcagcagggagctgctggatgagaaagagcctgaagtcttgcaggactcactgggtagatgttattcgactccttcaggttatcttgaactgcctgacttaggccagccctacagcagtgctgtttactcattggaggaacagtaccttggcttggctcttgacgtggacagaattaaaaaggaccaagaagaggaagaagaccaaggcccaccatgccccaggctcagcagggagctgctggaggtagtagagcctgaagtcttgcaggactcactggatagatgttattcaactccttccagttgtcttgaacagcctgactcctgccagccctatggaagttccttttatgcattggaggaaaaacatgttggcttttctcttgacgtgggagaaattgaaaagtaccaagaagtggaagaagaccaagacccatcatgccccaggctcaacagcatgctgatggaagtggaagagcctgaagtcttgcaggactcactggatatatgttattcgactccgtcaatgtactttgaactacctgactcattccagcactacagaagtgtgttttactcatttgaggaagagcatatcagcttcgccctttacgtggacaataggttttttactttgacggtgacaagtctccacctggtgttccagatgggagtcatattcccacaataagcagcccttactaagccgagaggtgt

SEQ ID NO: 158752 - DNA, 2051 bp, Homo sapiens
  Payload ID: 11061
  Gene Symbol: NBPF26
  Gene Name: neuroblastoma breakpoint family, member 26
  ENST ID: ENST00000615219
  CDS Start-End: 174-1073
aaagtgctgtggggagtgatcacatttttcacaacagtaaggtaagaatttcagttactgacatccctcagtcctgattaaaccgatttgatttcaccagtttttaacccatcatatgtttgggtttcttctccccagtccctgactccacctcttctgccacaaacgtcagcatggtggtatcagccggccctttgtccggcgagaaggcagcgataaacattctagaaatcaatgagaaattgcgcccccagctggcagagaagaaacagcagttcagaaacctcaaagagaaatgttttctaactcaactggccggcttcctggccaaccagcagaacaaatacaaatatgaagagtgcaaagatctcataaaatctatgctgaggaatgagcgacagttcaaggaggagaagcttgcagagcagctcaagcaagctgaggagctcaggcaatataaagtcctggttcacgctcaggaacgagagctgacccagttaagggagaagttgcgggaagggagagatgcctcccgctcattgaatgagcatctccaggccctcctcactccggatgagccggacaagtcccaggggcaggacctccaagaacagctggctgaggggtgtagactggcacagcaccttgtccaaaagctcagcccagaaaatgacaacgatgacgatgaagatgttcaagttgaggtggctgagaaagtgcagaaatcgtctgcccccagggagatgcagaaggctgaagaaaaggaagtccctgaggactcactggaggaatgtgccatcacttgttcaaatagccatggcccttatgactgcaaccagccacataggaaaaccaaaatcacatttgaggaagacaaagtcgactcaactctcattggctcatcctctcatgttgaatgggaggatgctgtacacattattccagaaaatgaaagtgatgatgaggaagaggaagaaaaaggaccagtgtctcccaggacatcggtgggatcaagtgaaaaaggaggaccacgaggcaacaggtcccaggctcagcagggagctgctggatgagaaagggcctgaagtcttgcaggactcactggatagatgttattcaactccttcaggttgtcttgaactgactgactcatgccagccctacagaagtgccttttacatattggagcaacagcgtgttggcttggctgttgacatggatgaaattgaaaagtaccaagaagtggaagaagaccaagacccatcatgccccaggctcagcagggagctgctggatgagaaagagcctgaagtcttgcaggactcactgggtagatgttattcgactccttcaggttatcttgaactgcctgacttaggccagccctacagcagtgctgtttactcattggaggaacagtaccttggcttggctcttgacgtggacagaattaaaaaggaccaagaagaggaagaagaccaaggcccaccatgccccaggctcagcagggagctgctggaggtagtagagcctgaagtcttgcaggactcactggatagatgttattcaactccttccagttgtcttgaacagcctgactcctgccagccctatggaagttccttttatgcattggaggaaaaacatgttggcttttctcttgacgtgggagaaattgaaaagaaggggaaggggaagaaaagaaggggaagaagatcaaagaaggaaagaagaaggggaagaaaagaaggggaagaagatcaaaacccaccatgccccaggctcaacagcatgctgatggaagtggaagagcctgaagtcttgcaggactcactggatatatgttattcgactccgtcaatgtactttgaactacctgactcattccagcactacagaagtgtgttttactcatttgaggaagagcatatcagcttcgccctttacgtggacaataggttttttactttgacggtgacaagtctccacctggtgttccagatgggagtcatattcccacaataagcagcccttactaagccgagaggtgt

SEQ ID NO: 158753 - DNA, 2931 bp, Homo sapiens
  Payload ID: 11061
  Gene Symbol: NBPF26
  Gene Name: neuroblastoma breakpoint family, member 26
  ENST ID: ENST00000617913
  CDS Start-End: 77-2905
aaagtgctgtggggagtgatcacatttttcacaacagtaagtccctgactccacctcttctgccacaaacgtcagcatggtggtatcagccggccattggtccagtgagaaggcagagatgaacattctagaaatcaacgagacattgcgcccccagctgccagagaacaaacagcagttgagaaacctcaaagagaaatgttttctaactcaactggccggcttcctggccaaccgacagaagaaatacaagtatgaagagtgtaaagacctcataaaatttatgctgaggaatgagcgacagttcaaggaggagaagcttgcagagcagctcaagcaagctgaggagctcaggcaatataaagtcctggttcactctcaggaacgagagctgacgcagttaaaggagaagttacgggaagggagagatgcctcccgctcattgaatgagcatctccaggccctcctcactccggatgagccggacaagtcccaggggcaggacctccaagaacagctggctgaggggtgtagactggcacagcaccttgtccaaaagctcagcccagaaaatgacgaagatgaggatgaagatgttcaagttgaggaggatgagaaagtactggaatcatctgcccccagggaggtgcagaagactgaagagagcaaagtccctgaggactcactggaggaatgtgccatcacttgttcaaatagccacggcccttgtgactccaaccagcctcacaagaacatcaaaatcacatttgaggaagacgaagtcaactcaactctggttgtagacagagaatcctctcatgatgaatgtcaggatgctctaaacattctcccagtccctggccccacctcttctgccacaaacgtcagcatggtggtatcagccggccctttgtccggcgagaaggcagcgataaacattctagaaatcaatgagaaattgcgcccccagctggcagagaagaaacagcagttcagaaacctcaaagagaaatgttttctaactcaactggccggcttcctggccaaccagcagaacaaatacaaatatgaagagtgcaaagatctcataaaatctatgctgaggaatgagcgacagttcaaggaggagaagcttgcagagcagctcaagcaagctgaggagctcaggcaatataaagtcctggttcacgctcaggaacgagagctgacccagttaagggagaagttgcgggaagggagagatgcctcccgctcattgaatgagcatctccaggccctcctcactccggatgagccggacaagtcccaggggcaggacctccaagaacagctggctgaggggtgtagactggcacagcaccttgtccaaaagctcagcccagaaaatgacaacgatgacgatgaagatgttcaagttgaggtggctgagaaagtgcagaaatcgtctgcccccagggagatgcagaaggctgaagaaaaggaagtccctgaggactcactggaggaatgtgccatcacttgttcaaatagccatggcccttatgactgcaaccagccacataggaaaaccaaaatcacatttgaggaagacaaagtcgactcaactctcattggctcatcctctcatgttgaatgggaggatgctgtacacattattccagaaaatgaaagtgatgatgaggaagaggaagaaaaaggaccagtgtctcccaggaatctgcaggagtctgaagaggaggaagtcccccaggagtcctgggatgaaggttattcgactctctcaattcctcctgaaatgttagcctcgtacaagtcttacagcagcacatttcactcattagaggaacagcaagtctgcatggctgttgacataggcagacatcggtgggatcaagtgaaaaaggaggaccacgaggcaacaggtcccaggctcagcagagagctgctggatgagaaagggcctgaagtcttgcaggactcactggatagatgttattcaactccttcaggttgtcttgaactgactgactcatgccagccctacagaagtgccttttacgtattggagcaacagcgtgttggcttggctgttgacatggatgaaattgaaaagtaccaagaagtggaagaagaccaagacccatcatgccccaggctcagcagggagctgctggatgagaaagagcctgaagtcttgcaggactcactgggtagatgttattcgactccttcaggttatcttgaactgcctgacttaggccagccctacagcagtgctgtttactcattggaggaacagtaccttggcttggctcttgacgtggacagaattaaaaaggaccaagaagaggaagaagaccaaggcccaccatgccccaggctcagcagggagctgctggaggtagtagagcctgaagtcttgcaggactcactggatagatgttattcaactccttccagttgtcttgaacagcctgactcctgccagccctatggaagttccttttatgcattggaggaaaaacatgttggcttttctcttgacgtgggagaaattgaaaagaaggggaaggggaagaaaagaaggggaagaagatcaaagaaggaaagaagaaggggaagaaaagaaggggaagaagatcaaaacccaccatgccccaggctcaacagcatgctgatggaagtggaagagcctgaagtcttgcaggactcactggatatatgttattcgactccgtcaatgtactttgaactacctgactcattccagcactacagaagtgtgttttactcatttgaggaagagcatatcagcttcgccctttacgtggacaataggttttttactttgacggtgacaagtctccacctggtgttccagatgggagtcatattcccacaataagcagcccttactaagccgagaggtgt

SEQ ID NO: 158754 - DNA, 3587 bp, Homo sapiens
  Payload ID: 11061
  Gene Symbol: NBPF26
  Gene Name: neuroblastoma breakpoint family, member 26
  ENST ID: ENST00000620612
  CDS Start-End: 1-3561
atggtggtatcagccggccattggtccagtgagaaggcagagatgaacattctagaaatcaacgagacattgcgcccccagctgccagagaacaaacagcagttgagaaacctcaaagagaaatgttttctaactcaactggccggcttcctggccaaccgacagaagaaatacaagtatgaagagtgtaaagacctcataaaatttatgctgaggaatgagcgacagttcaaggaggagaagcttgcagagcagctcaagcaagctgaggagctcaggcaatataaagtcctggttcactctcaggaacgagagctgacgcagttaaaggagaagttacgggaagggagagatgcctcccgctcattgaatgagcatctccaggccctcctcactccggatgagccggacaagtcccaggggcaggacctccaagaacagctggctgaggggtgtagactggcacagcaccttgtccaaaagctcagcccagaaaatgacgaagatgaggatgaagatgttcaagttgaggaggatgagaaagtactggaatcatctgcccccagggaggtgcagaagactgaagagagcaaagtccctgaggactcactggaggaatgtgccatcacttgttcaaatagccacggcccttgtgactccaaccagcctcacaagaacatcaaaatcacatttgaggaagacgaagtcaactcaactctggttgtagacagagaatcctctcatgatgaatgtcaggatgctctaaacattctcccagtccctggccccacctcttctgccacaaacgtcagcatggtggtatcagccggccctttgtccggcgagaaggcagcgataaacattctagaaatcaatgagaaattgcgcccccagctggcagagaagaaacagcagttcagaaacctcaaagagaaatgttttctaactcaactggccggcttcctggccaaccagcagaacaaatacaaatatgaagagtgcaaagatctcataaaatctatgctgaggaatgagcgacagttcaaggaggagaagcttgcagagcagctcaagcaagctgaggagctcaggcaatataaagtcctggttcacgctcaggaacgagagctgacccagttaagggagaagttgcgggaagggagagatgcctcccgctcattgaatgagcatctccaggccctcctcactccggatgagccggacaagtcccaggggcaggacctccaagaacagctggctgaggggtgtagactggcacagcaccttgtccaaaagctcagcccagaaaatgacaacgatgacgatgaagatgttcaagttgaggtggctgagaaagtgcagaaatcgtctgcccccagggagatgcagaaggctgaagaaaaggaagtccctgaggactcactggaggaatgtgccatcacttgttcaaatagccatggcccttatgactgcaaccagccacataggaaaaccaaaatcacatttgaggaagacaaagtcgactcaactctcattggctcatcctctcatgttgaatgggaggatgctgtacacattattccagaaaatgaaagtgatgatgaggaagaggaagaaaaaggaccagtgtctcccaggaatctgcaggagtctgaagaggaggaagtcccccaggagtcctgggatgaaggttattcgactctctcaattcctcctgaaatgttagcctcgtacaagtcttacagcagcacatttcactcattagaggaacagcaagtctgcatggctgttgacataggcagacatcggtgggatcaagtgaaaaaggaggaccacgaggcaacaggtcccaggctcagcagagagctgctggatgagaaagggcctgaagtcttgcaggactcactggatagatgttattcaactccttcaggttgtcttgaactgactgactcatgccagccctacagaagtgccttttacgtattggagcaacagcgtgttggcttggctgttgacatggatgaaattgaaaagtaccaagaagtggaagaagaccaagacccatcatgccccaggctcagcagggagctgctggatgagaaagagcctgaagtcttgcaggactcactgggtagatgttattcgactccttcaggttatcttgaactgcctgacttaggccagccctacagcagtgctgtttactcattggaggaacagtaccttggcttggctcttgacgtggacagaattaaaaaggaccaagaagaggaagaagaccaaggcccaccatgccccaggctcagcagggagctgctggaggtagtagagcctgaagtcttgcaggactcactggatagatgttattcaactccttccagttgtcttgaacagcctgactcctgccagccctatggaagttccttttatgcattggaggaaaaacatgttggcttttctcttgacgtgggagaaattgaaaagaaggggaaggggaagaaaagaaggggaagaagatcaaagaaggaaagaagaaggggaagaaaagaaggggaagaagatcaaaacccaccatgccccaggctcagcagggagctgctggatgagaaagggcctgaagtcttgcaggactcactggatagatgttattcaactccttcaggttgtcttgaactgactgactcatgccagccctacagaagtgccttttacatattggagcaacagcgtgttggcttggctgttgacatggatgaaattgaaaagtaccaagaagtggaagaagaccaagacccatcatgccccaggctcagcagggagctgctggatgagaaagagcctgaagtcttgcaggactcactgggtagatgttattcgactccttcaggttatcttgaactgcctgacttaggccagccctacagcagtgctgtttactcattggaggaacagtaccttggcttggctcttgacgtggacagaattaaaaaggaccaagaagaggaagaagaccaaggcccaccatgccccaggctcagcagggagctgctggaggtagtagagcctgaagtcttgcaggactcactggatagatgttattcaactccttccagttgtcttgaacagcctgactcctgccagccctatggaagttccttttatgcattggaggaaaaacatgttggcttttctcttgacgtgggagaaattgaaaagaaggggaaggggaagaaaagaaggggaagaagatcaaagaaggaaagaagaaggggaagaaaagaaggggaagaagatcaaaacccaccatgccccaggctcaacagcatgctgatggaagtggaagagcctgaagtcttgcaggactcactggatatatgttattcgactccgtcaatgtactttgaactacctgactcattccagcactacagaagtgtgttttactcatttgaggaagagcatatcagcttcgccctttacgtggacaataggttttttactttgacggtgacaagtctccacctggtgttccagatgggagtcatattcccacaataagcagcccttactaagccgagaggtgt

SEQ ID NO: 158755 - DNA, 2933 bp, Homo sapiens
  Payload ID: 11061
  Gene Symbol: NBPF26
  Gene Name: neuroblastoma breakpoint family, member 26
  ENST ID: ENST00000619748
  CDS Start-End: 1091-2899
aaagtgctgtggggagtgatcacatttttcacaacagtaaggtaagaatttcagttactgacatccctcagtcctgattaaaccgatttgatttcaccagtttttaacccatcatatgtttgggtttcttctccccagtccctgactccacctcttctgccacaaacgtcagcatggtggtatcagccggccattggtccagtgagaaggcagagatgaacattctagaaatcaacgagacattgcgcccccagctgccagagaacaaacagcagttgagaaacctcaaagagaaatgttttctaactcaactggccggcttcctggccaaccgacagaagaaatacagcaatataaagtcctggttcactctcaggaacgagagctgacgcagttaaaggagaagttacgggaagggagagatgcctcccgctcattgaatgagcatctccaggccctcctcactccggatgagccggacaagtcccaggggcaggacctccaagaacagctggctgaggggtgtagactggcacagcaccttgtccaaaagctcagcccagaaaatgacgaagatgaggatgaagatgttcaagttgaggaggatgagaaagtactggaatcatctgcccccagggaggtgcagaagactgaagagagcaaagtccctgaggactcactggaggaatgtgccatcacttgttcaaatagccacggcccttgtgactccaaccagcctcacaagaacatcaaaatcacatttgaggaagacgaagtcaactcaactctggttgtagacagagaatcctctcatgatgaatgtcaggatgctctaaacattctcccagtccctggccccacctcttctgccacaaacgtcagcatggtggtatcagccggccctttgtccggcgagaaggcagcgataaacattctagaaatcaatgagaaattgcgcccccagctggcagagaagaaacagcagttcagaaacctcaaagagaaatgttttctaactcaactggccggcttcctggccaaccagcagaacaaatacaaatatgaagagtgcaaagatctcataaaatctatgctgaggaatgagcgacagttcaaggaggagaagcttgcagagcagctcaagcaagctgaggagctcaggcaatataaagtcctggttcacgctcaggaacgagagctgacccagttaagggagaagttgcgggaagggagagatgcctcccgctcattgaatgagcatctccaggccctcctcactccggatgagccggacaagtcccaggggcaggacctccaagaacagctggctgaggggtgtagactggcacagcaccttgtccaaaagctcagcccagaaaatgacaacgatgacgatgaagatgttcaagttgaggtggctgagaaagtgcagaaatcgtctgcccccagggagatgcagaaggctgaagaaaaggaagtccctgaggactcactggaggaatgtgccatcacttgttcaaatagccatggcccttatgactgcaaccagccacataggaaaaccaaaatcacatttgaggaagacaaagtcgactcaactctcattggctcatcctctcatgttgaatgggaggatgctgtacacattattccagaaaatgaaagtgatgatgaggaagaggaagaaaaaggaccagtgtctcccaggaatctgcaggagtctgaagaggaggaagtcccccaggagtcctgggatgaaggttattcgactctctcaattcctcctgaaatgttagcctcgtacaagtcttacagcagcacatttcactcattagaggaacagcaagtctgcatggctgttgacataggcagacatcggtgggatcaagtgaaaaaggaggaccacgaggcaacaggtcccaggctcagcagagagctgctggatgagaaagggcctgaagtcttgcaggactcactggatagatgttattcaactccttcaggttgtcttgaactgactgactcatgccagccctacagaagtgccttttacgtattggagcaacagcgtgttggcttggctgttgacatggatgaaattgaaaagtaccaagaagtggaagaagaccaagacccatcatgccccaggctcagcagggagctgctggatgagaaagagcctgaagtcttgcaggactcactgggtagatgttattcgactccttcaggttatcttgaactgcctgacttaggccagccctacagcagtgctgtttactcattggaggaacagtaccttggcttggctcttgacgtggacagaattaaaaaggaccaagaagaggaagaagaccaaggcccaccatgccccaggctcagcagggagctgctggaggtagtagagcctgaagtcttgcaggactcactggatagatgttattcaactccttccagttgtcttgaacagcctgactcctgccagccctatggaagttccttttatgcattggaggaaaaacatgttggcttttctcttgacgtgggagaaattgaaaagaaggggaaggggaagaaaagaaggggaagaagatcaaagaaggaaagaagaaggggaagaaaagaaggggaagaagatcaaaacccaccatgccccaggctcaacagcatgctgatggaagtggaagagcctgaagtcttgcaggactcactggatatatgttattcgactccgtcaatgtactttgaactacctgactcattccagcactacagaagtgtgttttactcatttgaggaagagcatatcagcttcgccctttacgtggacaataggttttttactttgacggtgacaagtctccacctggtgttccagatgggagtcatattcccacaataagcagcccttactaagccgagaggtgtcattcctg

SEQ ID NO: 158756 - DNA, 2701 bp, Homo sapiens
  Payload ID: 11061
  Gene Symbol: NBPF26
  Gene Name: neuroblastoma breakpoint family, member 26
  ENST ID: ENST00000611287
  CDS Start-End: 72-2675
aaagtgctgtggggagtgatcacatttttcacaacatccctgactccacctcttctgccacaaacgtcagcatggtggtatcagccggccattggtccagtgagaaggcagagatgaacattctagaaatcaacgagacattgcgcccccagctgccagagaacaaacagcagttgagaaacctcaaagagaaatgttttctaactcaactggccggcttcctggccaaccgacagaagaaatacaagtatgaagagtgtaaagacctcataaaatttatgctgaggaatgagcgacagttcaaggaggagaagcttgcagagcagctcaagcaagctgaggagctcaggcaatataaagtcctggttcactctcaggaacgagagctgacgcagttaaaggagaagttacgggaagggagagatgcctcccgctcattgaatgagcatctccaggccctcctcactccggatgagccggacaagtcccaggggcaggacctccaagaacagctggctgaggggtgtagactggcacagcaccttgtccaaaagctcagcccagaaaatgacgaagatgaggatgaagatgttcaagttgaggaggatgagaaagtactggaatcatctgcccccagggaggtgcagaagactgaagagagcaaagtccctgaggactcactggaggaatgtgccatcacttgttcaaatagccacggcccttgtgactccaaccagcctcacaagaacatcaaaatcacatttgaggaagacgaagtcaactcaactctggttgtagacagagaatcctctcatgatgaatgtcaggatgctctaaacattctcccagtccctggccccacctcttctgccacaaacgtcagcatggtggtatcagccggccctttgtccggcgagaaggcagcgataaacattctagaaatcaatgagaaattgcgcccccagctggcagagaagaaacagcagttcagaaacctcaaagagaaatgttttctaactcaactggccggcttcctggccaaccagcagaacaaatacaaatatgaagagtgcaaagatctcataaaatctatgctgaggaatgagcgacagttcaaggaggagaagcttgcagagcagctcaagcaagctgaggagctcaggcaatataaagtcctggttcacgctcaggaacgagagctgacccagttaagggagaagttgcgggaagggagagatgcctcccgctcattgaatgagcatctccaggccctcctcactccggatgagccggacaagtcccaggggcaggacctccaagaacagctggctgaggggtgtagactggcacagcaccttgtccaaaagctcagcccagaaaatgacaacgatgacgatgaagatgttcaagttgaggtggctgagaaagtgcagaaatcgtctgcccccagggagatgcagaaggctgaagaaaaggaagtccctgaggactcactggaggaatgtgccatcacttgttcaaatagccatggcccttatgactgcaaccagccacataggaaaaccaaaatcacatttgaggaagacaaagtcgactcaactctcattggctcatcctctcatgttgaatgggaggatgctgtacacattattccagaaaatgaaagtgatgatgaggaagaggaagaaaaaggaccagtgtctcccaggaatctgcaggagtctgaagaggaggaagtcccccaggagtcctgggatgaaggttattcgactctctcaattcctcctgaaatgttagcctcgtacaagtcttacagcagcacatttcactcattagaggaacagcaagtctgcatggctgttgacataggcagacatcggtgggatcaagtgaaaaaggaggaccacgaggcaacaggtcccaggctcagcagggagctgctggatgagaaagagcctgaagtcttgcaggactcactgggtagatgttattcgactccttcaggttatcttgaactgcctgacttaggccagccctacagcagtgctgtttactcattggaggaacagtaccttggcttggctcttgacgtggacagaattaaaaaggaccaagaagaggaagaagaccaaggcccaccatgccccaggctcagcagggagctgctggaggtagtagagcctgaagtcttgcaggactcactggatagatgttattcaactccttccagttgtcttgaacagcctgactcctgccagccctatggaagttccttttatgcattggaggaaaaacatgttggcttttctcttgacgtgggagaaattgaaaagaaggggaaggggaagaaaagaaggggaagaagatcaaagaaggaaagaagaaggggaagaaaagaaggggaagaagatcaaaacccaccatgccccaggctcaacagcatgctgatggaagtggaagagcctgaagtcttgcaggactcactggatatatgttattcgactccgtcaatgtactttgaactacctgactcattccagcactacagaagtgtgttttactcatttgaggaagagcatatcagcttcgccctttacgtggacaataggttttttactttgacggtgacaagtctccacctggtgttccagatgggagtcatattcccacaataagcagcccttactaagccgagaggtgt

SEQ ID NO: 158757 - DNA, 4401 bp, Homo sapiens
  Payload ID: 11062
  Gene Symbol: NBPF3
  Gene Name: neuroblastoma breakpoint family, member 3
  ENST ID: ENST00000318220
  CDS Start-End: 352-513
acaggcgaggggttgggtggcggttgagacagcggcggtactgggatgggtaggtgaggatcccgagactgagtgagcttctgcgcgcggtgcttttgggaacgcgggactggcaacctgcggcgccaggagctgggccgaggcgcggcggcgcggctgcgggccgccgtctggatgggaagttacggcgaagtccacccagcgtttctcaggcaatctgaaggcaaatcctgtttagacccaggcgaaggttcctggtgacccaggctctcaccagccaattgtcccttgccgtcctcctgagggtatctggagcttcagtgctgtgtgctcttggcctccacactggggatgccactgactcccactgtccagggcttccagtggactctccgaggccctgatgtagaaacttccccattcggtgcaccaagagcagcctcacatggtgtgggccgacatcaagagctgcgagatccaacagggagccttgggaggagcccgaatcactgatggaatcggacagtgcatggagatggttcagcaggacgaggtgctgaaaactcacccctgtgtgacctcaagtaagccacgtaactctgtgaacctgcagttttatcatttttaaaataaagaaacatgacagattttcattatgacacagaatgtcaggtctcccagatgccagaaaatacatttacttaaagccgttgatacgtcttaaagcggtttccttacagtgtcattggaggacagcgtggagtgcagagagacatgctttgaaatgggattgatccagtcctccttccttcactaccacatgaatgctgggcagcccaggatcacactcactgcaccctcaactcagaccgttacctggcacactggcctcactcttgtcggagactgagctattggcagtgccttcagctctgagctcaggcacctcgaacattgtttttgtcgttaaggatcctaaagtgctgcggggactgatcacatttttctcaacatccctggccccacctcttctgccacaaacgtcagcatggtggtatctgccggcccttggtccggtgagaaggcagagatgaacattctagaaatcaacaagaaatcgcgcccccagctggcagagaacaaacagcagttcagaaacctcaaacagaaatgtcttgtaactcaagtggcctacttcctggccaaccggcaaaataattacgactatgaagactgcaaagacctcataaaatctatgctgagggatgagcggctgctcacagaagagaagcttgcagaggagctcgggcaagctgaggagctcaggcaatataaagtcctggttcactctcaggaacgagagctgacccagttaagggagaagttacaggaagggagagatgcctcccgctcattgaatcagcatctccaggccctcctcactccggatgagccggacaactcccagggacgggacctccgagaacagctggctgagggatgtaggctggcacagcacctcgtccaaaagctcagcccagaaaatgatgacgatgaggatgaagatgttaaagttgaggaggctgagaaagtacaggaattatatgcccccagggaggtgcagaaggctgaagaaaaggaagtccctgaggactcactggaggagtgtgccatcacttgttcaaatagccaccacccttgtgagtccaaccagccttacgggaacaccagaatcacatttgaggaagaccaagtcgactcaactctcattgactcatcctctcatgatgaatggttggatgctgtatgcattatcccagaaaatgaaagtgatcatgagcaagaggaagaaaaagggccagtgtctcccaggaatctgcaggagtctgaagaggaggaagccccccaggagtcctgggatgaaggtgattggactctctcaattcctcctgacatgtctgcctcataccagtctgacaggagcacctttcactcagtagaggaacagcaagtcggcttggctcttgacataggcagacattggtgtgatcaagtgaaaaaggaggaccaagaggccacaagtcccaggctcagcagggagctgctggatgagaaagagcctgaagtcttgcaggactcactggatagattttattcaactccttttgagtacctggaactgcctgacttatgccagccctacagaagtgacttttactcattgcaggaacaacaccttggcttggctcttgacttggacagaatgaaaaaggaccaagaagaggaagaagaccaaggcccaccatgccccaggctcagcagagagctgccggaggtagtagagcctgaggacttgcaggactcactggatagatggtattcgactcctttcagttatccagaactgcctgattcatgccagccctacggaagttgcttttactcattggaggaagaacacgttggcttttctcttgacgtggatgaaattgaaaagtaccaagaaggggaagaagatcaaaagccaccatgccccaggctcaacgaggtgctgatggaagcagaagagcctgaagtcttgcaggactcactggatagatgttattcgactacttcaacttactttcaactacatgcctcattccagcagtatagaagtgccttttactcatttgaggaacaggacgtcagcttggcccttgacgtggacaataggttttttactttgacagtgataaggcaccacctggccttccagatgggagtcatattcccacactaagcagcccttactaagctgagagatgtcattgctgcaggcaggacgtataggcacatgtaggtttgaatgaaactgtagttccctttggaagcccagtcataggatgggaaagtgggcatggctctattcctattctcagaccatgccagtggccacctgtgctcagtctgaagacgttggacccaagttaggtgtgacacgttcacacgactatgtagcacatgccgggagtgatctgccagacattctaatttgaaccagatatctctgggtagctacaaagttcctcaggggtttcattttgcaggcatgtctctgagcttctatacctgctcaaggtcagtgtcatctttgtgtttagctcatccaaaggtgttaccctggtttcattgaacctaaccccattctttgtatcttcagtgttggtttgttttagctgatccatctgtaacacaggagggatccttggctgaggattgtatttcagaaccactgactgctcttgacagttgttaacccactaggctcctttgagtagagaagccatagtccttcagcctccaattgatatcaatacttaggaagaccacagctagacggacaaacagcattgggaggccttagtcctgctcctttcaattccatcctgtaaagaacaggagtcaggagccgctggcaagagacagcatgtcacctgggactctgccagtgcagaatatgaacaatgccatgttcttgcagaaaatgcttagcctgagtttcataggaggtaatcaccagacaactgcagaatgtagaacactgagcaggacaactgacctgtctccttcacacagtccacgtcaccacgaatcacacaacaaaaaggaggagagatattttgggttcagaagaagtaaatgataatgtagctacatttctttagttattttgaaccccaaatatttcctcatctttttgttgttgtcattgattttggtgacatggacttgtttgtagaggacaggtcagctgtctggctcaatggtctacattctgaagttgtctgaaaatgtcttcatgattaaattcagcctaaacgtttcatcaagaacactacagagtcgatactgtgagtttccaacctcagcccatctgtgggcagagaaggtctagtttgtccatcagcattatcatgatatcaggactggttacttggttaaggaggggtctaggagatctgtcccttttagagacaccttacttatgatgaagtatttgggagagtggtttttcaaagtagaaatgtcctgtattccagtgatcatcctctaaacgttttatcatttattaatcatccctgcctgtgtctattattatattcatatctctacgctggaaatttgctgcctcaatgtttactgtgcctttgtttttgctagtgtgtgttgttgaaaaaaaaacattctctgcctgagttttaatttttgtccaaagttattttaatctatacaattaaaaacttttgcctatcactctggactgttggattgttttttacattcagcgttataatcttttgttatgctgattggttttggtgggtactgatgcgaattaataaaaacattttcatttcc

SEQ ID NO: 158758 - DNA, 3591 bp, Homo sapiens
  Payload ID: 11062
  Gene Symbol: NBPF3
  Gene Name: neuroblastoma breakpoint family, member 3
  Uniprot ID: Q9H094
  ENST ID: ENST00000318249
  CDS Start-End: 176-2077
gggaagttacggcgaagtccacccagcgtttctcaggcaatctgaaggcaaatcctgtttagacccaggcgaaggttcctggtgacccaggctctcaccagccaattgtcccttgccgtcctcctgagggtatctggagcttcagtgctgtgtgctcttggcctccacactggggatgccactgactcccactgtccagggcttccagtggactctccgaggccctgatgtagaaacttccccattcggtgcaccaagagcagcctcacatggtgtgggccgacatcaagagctgcgagatccaacagtccctggccccacctcttctgccacaaacgtcagcatggtggtatctgccggcccttggtccggtgagaaggcagagatgaacattctagaaatcaacaagaaatcgcgcccccagctggcagagaacaaacagcagttcagaaacctcaaacagaaatgtcttgtaactcaagtggcctacttcctggccaaccggcaaaataattacgactatgaagactgcaaagacctcataaaatctatgctgagggatgagcggctgctcacagaagagaagcttgcagaggagctcgggcaagctgaggagctcaggcaatataaagtcctggttcactctcaggaacgagagctgacccagttaagggagaagttacaggaagggagagatgcctcccgctcattgaatcagcatctccaggccctcctcactccggatgagccggacaactcccagggacgggacctccgagaacagctggctgagggatgtaggctggcacagcacctcgtccaaaagctcagcccagaaaatgatgacgatgaggatgaagatgttaaagttgaggaggctgagaaagtacaggaattatatgcccccagggaggtgcagaaggctgaagaaaaggaagtccctgaggactcactggaggagtgtgccatcacttgttcaaatagccaccacccttgtgagtccaaccagccttacgggaacaccagaatcacatttgaggaagaccaagtcgactcaactctcattgactcatcctctcatgatgaatggttggatgctgtatgcattatcccagaaaatgaaagtgatcatgagcaagaggaagaaaaagggccagtgtctcccaggaatctgcaggagtctgaagaggaggaagccccccaggagtcctgggatgaaggtgattggactctctcaattcctcctgacatgtctgcctcataccagtctgacaggagcacctttcactcagtagaggaacagcaagtcggcttggctcttgacataggcagacattggtgtgatcaagtgaaaaaggaggaccaagaggccacaagtcccaggctcagcagggagctgctggatgagaaagagcctgaagtcttgcaggactcactggatagattttattcaactccttttgagtacctggaactgcctgacttatgccagccctacagaagtgacttttactcattgcaggaacaacaccttggcttggctcttgacttggacagaatgaaaaaggaccaagaagaggaagaagaccaaggcccaccatgccccaggctcagcagagagctgccggaggtagtagagcctgaggacttgcaggactcactggatagatggtattcgactcctttcagttatccagaactgcctgattcatgccagccctacggaagttgcttttactcattggaggaagaacacgttggcttttctcttgacgtggatgaaattgaaaagtaccaagaaggggaagaagatcaaaagccaccatgccccaggctcaacgaggtgctgatggaagcagaagagcctgaagtcttgcaggactcactggatagatgttattcgactacttcaacttactttcaactacatgcctcattccagcagtatagaagtgccttttactcatttgaggaacaggacgtcagcttggcccttgacgtggacaataggttttttactttgacagtgataaggcaccacctggccttccagatgggagtcatattcccacactaagcagcccttactaagctgagagatgtcattgctgcaggcaggacgtataggcacatgtaggtttgaatgaaactgtagttccctttggaagcccagtcataggatgggaaagtgggcatggctctattcctattctcagaccatgccagtggccacctgtgctcagtctgaagacgttggacccaagttaggtgtgacacgttcacacgactatgtagcacatgccgggagtgatctgccagacattctaatttgaaccagatatctctgggtagctacaaagttcctcaggggtttcattttgcaggcatgtctctgagcttctatacctgctcaaggtcagtgtcatctttgtgtttagctcatccaaaggtgttaccctggtttcattgaacctaaccccattctttgtatcttcagtgttggtttgttttagctgatccatctgtaacacaggagggatccttggctgaggattgtatttcagaaccactgactgctcttgacagttgttaacccactaggctcctttgagtagagaagccatagtccttcagcctccaattgatatcaatacttaggaagaccacagctagacggacaaacagcattgggaggccttagtcctgctcctttcaattccatcctgtaaagaacaggagtcaggagccgctggcaagagacagcatgtcacctgggactctgccagtgcagaatatgaacaatgccatgttcttgcagaaaatgcttagcctgagtttcataggaggtaatcaccagacaactgcagaatgtagaacactgagcaggacaactgacctgtctccttcacacagtccacgtcaccacgaatcacacaacaaaaaggaggagagatattttgggttcagaagaagtaaatgataatgtagctacatttctttagttattttgaaccccaaatatttcctcatctttttgttgttgtcattgattttggtgacatggacttgtttgtagaggacaggtcagctgtctggctcaatggtctacattctgaagttgtctgaaaatgtcttcatgattaaattcagcctaaacgtttcatcaagaacactacagagtcgatactgtgagtttccaacctcagcccatctgtgggcagagaaggtctagtttgtccatcagcattatcatgatatcaggactggttacttggttaaggaggggtctaggagatctgtcccttttagagacaccttacttatgatgaagtatttgggagagtggtttttcaaagtagaaatgtcctgtattccagtgatcatcctctaaacgttttatcatttattaatcatccctgcctgtgtctattattatattcatatctctacgctggaaatttgctgcctcaatgtttactgtgcctttgtttttgctagtgtgtgttgttgaaaaaaaaacattctctgcctgagttttaatttttgtccaaagttattttaatctatacaattaaaaacttttgcctatca

SEQ ID NO: 158759 - DNA, 3704 bp, Homo sapiens
  Payload ID: 11062
  Gene Symbol: NBPF3
  Gene Name: neuroblastoma breakpoint family, member 3
  Uniprot ID: Q9H094
  ENST ID: ENST00000342104
  CDS Start-End: 325-2190
gacagcggcggtactgggatgggtaggtgaggatcccgagactgagtgagcttctgcgcgcggtgcttttgggaacgcgggactggcaacctgcggcgccaggagctgggccgaggcgcggcggcgcggctgcgggccgccgtctggatgggaagttacggcgaagtccacccagcgtttctcaggcaatctgaaggcaaatcctgtttagacccaggcgaaggttcctggtgacccaggctctcaccagccaattgtcccttgccgtcctcctgagggtatctggagcttcagtgctgtgtgctcttggcctccacactggggatgccactgactcccactgtccagggcttccagtggactctccgaggccctgatgtagaaacttccccattcggtgcaccaagagcagcctcacatggtgtgggccgacatcaagagctgcgagatccaacagtccctggccccacctcttctgccacaaacgtcagcatggtggtatctgccggcccttggtccggtgagaaggcagagatgaacattctagaaatcaacaagaaatcgcgcccccagctggcagagaacaaacagcagttcagaaacctcaaacagaaatgtcttgtaactcaagtggcctacttcctggccaaccggcaaaataattacgactatgaagactgcaaagacctcataaaatctatgctgagggatgagcggctgctcacagaagagaagcttgcagaggagctcgggcaagctgaggagctcaggcaatataaagtcctggttcactctcaggaacgagagctgacccagttaagggagaagttacaggaagggagagatgcctcccgctcattgaatcagcatctccaggccctcctcactccggatgagccggacaactcccagggacgggacctccgagaacagctggctgagggatgtaggctggcacagcacctcgtccaaaagctcagcccagaaaatgatgacgatgaggatgaagatgttaaagttgaggaggctgagaaagtacaggaattatatgcccccagggaggtgcagaaggctgaagaaaaggaagtccctgaggactcactggaggagtgtgccatcacttgttcaaatagccaccacccttgtgagtccaaccagccttacgggaacaccagaatcacatttgaggaagaccaagtcgactcaactctcattgactcatcctctcatgatgaatggttggatgctgtatgcattatcccagaaaatgaaagtgatcatgagcaagaggaagaaaaagggccagtgtctcccagatcatctggaaggttttgttgtctaatctctgttggttatatcttctgtcatccctgtcctgcctggctcatcaggaatctgcaggagtctgaagaggaggaagccccccaggagtcctgggatgaaggacattggtgtgatcaagtgaaaaaggaggaccaagaggccacaagtcccaggctcagcagggagctgctggatgagaaagagcctgaagtcttgcaggactcactggatagattttattcaactccttttgagtacctggaactgcctgacttatgccagccctacagaagtgacttttactcattgcaggaacaacaccttggcttggctcttgacttggacagaatgaaaaaggaccaagaagaggaagaagaccaaggcccaccatgccccaggctcagcagagagctgccggaggtagtagagcctgaggacttgcaggactcactggatagatggtattcgactcctttcagttatccagaactgcctgattcatgccagccctacggaagttgcttttactcattggaggaagaacacgttggcttttctcttgacgtggatgaaattgaaaagtaccaagaaggggaagaagatcaaaagccaccatgccccaggctcaacgaggtgctgatggaagcagaagagcctgaagtcttgcaggactcactggatagatgttattcgactacttcaacttactttcaactacatgcctcattccagcagtatagaagtgccttttactcatttgaggaacaggacgtcagcttggcccttgacgtggacaataggttttttactttgacagtgataaggcaccacctggccttccagatgggagtcatattcccacactaagcagcccttactaagctgagagatgtcattgctgcaggcaggacgtataggcacatgtaggtttgaatgaaactgtagttccctttggaagcccagtcataggatgggaaagtgggcatggctctattcctattctcagaccatgccagtggccacctgtgctcagtctgaagacgttggacccaagttaggtgtgacacgttcacacgactatgtagcacatgccgggagtgatctgccagacattctaatttgaaccagatatctctgggtagctacaaagttcctcaggggtttcattttgcaggcatgtctctgagcttctatacctgctcaaggtcagtgtcatctttgtgtttagctcatccaaaggtgttaccctggtttcattgaacctaaccccattctttgtatcttcagtgttggtttgttttagctgatccatctgtaacacaggagggatccttggctgaggattgtatttcagaaccactgactgctcttgacagttgttaacccactaggctcctttgagtagagaagccatagtccttcagcctccaattgatatcaatacttaggaagaccacagctagacggacaaacagcattgggaggccttagtcctgctcctttcaattccatcctgtaaagaacaggagtcaggagccgctggcaagagacagcatgtcacctgggactctgccagtgcagaatatgaacaatgccatgttcttgcagaaaatgcttagcctgagtttcataggaggtaatcaccagacaactgcagaatgtagaacactgagcaggacaactgacctgtctccttcacacagtccacgtcaccacgaatcacacaacaaaaaggaggagagatattttgggttcagaagaagtaaatgataatgtagctacatttctttagttattttgaaccccaaatatttcctcatctttttgttgttgtcattgattttggtgacatggacttgtttgtagaggacaggtcagctgtctggctcaatggtctacattctgaagttgtctgaaaatgtcttcatgattaaattcagcctaaacgtttcatcaagaacactacagagtcgatactgtgagtttccaacctcagcccatctgtgggcagagaaggtctagtttgtccatcagcattatcatgatatcaggactggttacttggttaaggaggggtctaggagatctgtcccttttagagacaccttacttatgatgaagtatttgggagagtggtttttcaaagtagaaatgtcctgtattccagtgatcatcctctaaacgttttatcatttattaatcatccctgcctgtgtctattattatattcatatctctacgctggaaatttgctgcctcaatgtttactgtgcctttgtttttgctagtgtgtgttgttgaaaaaaaaacattctctgcctgagttttaatttttgtccaaagttattttaatctatacaattaaaaacttttgcctatca

SEQ ID NO: 158760 - DNA, 2727 bp, Homo sapiens
  Payload ID: 11062
  Gene Symbol: NBPF3
  Gene Name: neuroblastoma breakpoint family, member 3
  ENST ID: ENST00000434838
  CDS Start-End: 144-305
acaggcaatctgaaggcaaatcctgtttagacccaggcgaaggttcctggtgacccaggctctcaccagccaattgtcccttgccgtcctcctgagggtatctggagcttcagtgctgtgtgctcttggcctccacactggggatgccactgactcccactgtccagggcttccagtggactctccgaggccctgatgtagaaacttccccattcggtgcaccaagagcagcctcacatggtgtgggccgacatcaagagctgcgagatccaacaggtggcaagggctctgaaacagccacataaagcccttgtagataaggatggtcaaataaaataatattatatctgtaaaaactcagatcttggtaagatttactagttgggaatccagtgttaatgccatgaagcagccgccagttgggatcaaatgtgagcctatggatcaagcaggcccagtgtcttggcaatcatggtgacagtgacattgaaggtgggggctccaccgatgctcttcgtttgaagatgcacggtcagttccccatcctgcagcagtgagtccaggaccacagtacatttctggccccgcagtgtcagcctattcacgaaaaagcttgaccagtctttgccaaccaggacaccaaccttagctggcgtgatgttcacgaaggtttttccctgggacggcggcccagatggaggaaaatataacctgttgggaaactggttctgcctggatggtgttgtacaaacaagcgataaacaatgaggaatgtgcttagatgtattgggaaagagatgggtctgtggcattgtcacaagggtacacgaacactgagagtgaattttagaggaatgatccccattggtggtgaccctcagaccgttacctggcacactggcctcactcttgtcggagactgagctattggcagtgccttcagctctgagctcaggcacctcgaacattgtttttgtcgttaaggatcctaaagtgctgcggggactgatcacatttttctcaacatccctggccccacctcttctgccacaaacgtcagcatggtggtatctgccggcccttggtccggtgagaaggcagagatgaacattctagaaatcaacaagaaatcgcgcccccagctggcagagaacaaacagcagttcagaaacctcaaacagaaatgtcttgtaactcaagtggcctacttcctggccaaccggcaaaataattacgactatgaagactgcaaagacctcataaaatctatgctgagggatgagcggctgctcacagaagagaagcttgcagaggagctcgggcaagctgaggagctcaggcaatataaagtcctggttcactctcaggaacgagagctgacccagttaagggagaagttacaggaagggagagatgcctcccgctcattgaatcagcatctccaggccctcctcactccggatgagccggacaactcccagggacgggacctccgagaacagctggctgagggatgtaggctggcacagcacctcgtccaaaagctcagcccagaaaatgatgacgatgaggatgaagatgttaaagttgaggaggctgagaaagtacaggaattatatgcccccagggaggtgcagaaggctgaagaaaaggaagtccctgaggactcactggaggagtgtgccatcacttgttcaaatagccaccacccttgtgagtccaaccagccttacgggaacaccagaatcacatttgaggaagaccaagtcgactcaactctcattgactcatcctctcatgatgaatggttggatgctgtatgcattatcccagaaaatgaaagtgatcatgagcaagaggaagaaaaagggccagtgtctcccaggaatctgcaggagtctgaagaggaggaagccccccaggagtcctgggatgaaggtgattggactctctcaattcctcctgacatgtctgcctcataccagtctgacaggagcacctttcactcagtagaggaacagcaagtcggcttggctcttgacataggcagacattggtgtgatcaagtgaaaaaggaggaccaagaggccacaagtcccaggctcagcagggagctgctggatgagaaagagcctgaagtcttgcaggactcactggatagattttattcaactccttttgagtacctggaactgcctgacttatgccagccctacagaagtgacttttactcattgcaggaacaacaccttggcttggctcttgacttggacagaatgaaaaaggaccaagaagaggaagaagaccaaggcccaccatgccccaggctcagcagagagctgccggaggtagtagagcctgaggacttgcaggactcactggatagatggtattcgactcctttcagttatccagaactgcctgattcatgccagccctacggaagttgcttttactcattggaggaagaacacgttggcttttctcttgacgtggatgaaattgaaaagtaccaagaaggggaagaagatcaaaagccaccatgccccaggctcaacgaggtgctgatggaagcagaagagcctgaagtcttgcaggactcactggatagatgttattcgactacttcaacttactttcaactacatgcctcattccagcagtatagaagtgccttttactcatttgaggaacaggacgtcagcttggcccttgacgtggacaata

SEQ ID NO: 158761 - DNA, 2133 bp, Homo sapiens
  Payload ID: 11062
  Gene Symbol: NBPF3
  Gene Name: neuroblastoma breakpoint family, member 3
  Uniprot ID: Q9H094
  ENST ID: ENST00000454000
  CDS Start-End: 361-2052
ggcgcaggcacaggcgaggggttgggtggcggttgagacagcggcggtactgggatgggtaggtgaggatcccgagactgagtgagcttctgcgcgcggtgcttttgggaacgcgggactggcaacctgcggcgccaggagctgggccgaggcgcggcggcgcggctgcgggccgccgtctggatgggaagttacggcgaagtccacccagcgtttctcaggcaatctgaaggcaaatcctgtttagacccaggcgaaggttcctggtgacccaggctctcaccagccaattgtcccttgccgtcctcctgagggtatctggagcttcagtgctgtgtgctcttggcctccacactggggatgccactgactcccactgtccagggcttccagtggactctccgaggccctgatgtagaaacttccccattcggtgcaccaagagcagcctcacatggtgtgggccgacatcaagagctgcgagatccaacagactatgaagactgcaaagacctcataaaatctatgctgagggatgagcggctgctcacagaagagaagcttgcagaggagctcgggcaagctgaggagctcaggcaatataaagtcctggttcactctcaggaacgagagctgacccagttaagggagaagttacaggaagggagagatgcctcccgctcattgaatcagcatctccaggccctcctcactccggatgagccggacaactcccagggacgggacctccgagaacagctggctgagggatgtaggctggcacagcacctcgtccaaaagctcagcccagaaaatgatgacgatgaggatgaagatgttaaagttgaggaggctgagaaagtacaggaattatatgcccccagggaggtgcagaaggctgaagaaaaggaagtccctgaggactcactggaggagtgtgccatcacttgttcaaatagccaccacccttgtgagtccaaccagccttacgggaacaccagaatcacatttgaggaagaccaagtcgactcaactctcattgactcatcctctcatgatgaatggttggatgctgtatgcattatcccagaaaatgaaagtgatcatgagcaagaggaagaaaaagggccagtgtctcccaggaatctgcaggagtctgaagaggaggaagccccccaggagtcctgggatgaaggtgattggactctctcaattcctcctgacatgtctgcctcataccagtctgacaggagcacctttcactcagtagaggaacagcaagtcggcttggctcttgacataggcagacattggtgtgatcaagtgaaaaaggaggaccaagaggccacaagtcccaggctcagcagggagctgctggatgagaaagagcctgaagtcttgcaggactcactggatagattttattcaactccttttgagtacctggaactgcctgacttatgccagccctacagaagtgacttttactcattgcaggaacaacaccttggcttggctcttgacttggacagaatgaaaaaggaccaagaagaggaagaagaccaaggcccaccatgccccaggctcagcagagagctgccggaggtagtagagcctgaggacttgcaggactcactggatagatggtattcgactcctttcagttatccagaactgcctgattcatgccagccctacggaagttgcttttactcattggaggaagaacacgttggcttttctcttgacgtggatgaaattgaaaagtaccaagaaggggaagaagatcaaaagccaccatgccccaggctcaacgaggtgctgatggaagcagaagagcctgaagtcttgcaggactcactggatagatgttattcgactacttcaacttactttcaactacatgcctcattccagcagtatagaagtgccttttactcatttgaggaacaggacgtcagcttggcccttgacgtggacaataggttttttactttgacagtgataaggcaccacctggccttccagatgggagtcatattcccacactaagcagcccttactaagctgagagatgtcattgctgcaggcaggacgtataggcacatgtaggtttgaatgaaactgtagttc

SEQ ID NO: 158762 - DNA, 933 bp, Homo sapiens
  Payload ID: 11062
  Gene Symbol: NBPF3
  Gene Name: neuroblastoma breakpoint family, member 3
  ENST ID: ENST00000486229
  CDS Start-End: 251-412
acgcgggactggcaacctgcggcgccaggagctgggccgaggcgcggcggcgcggctgcgggccgccgtctggatgggaagttacggcgaagtccacccagcgtttctcaggcaatctgaaggcaaatcctgtttagacccaggcgaaggttcctggtgacccaggctctcaccagccaattgtcccttgccgtcctcctgagggtatctggagcttcagtgctgtgtgctcttggcctccacactggggatgccactgactcccactgtccagggcttccagtggactctccgaggccctgatgtagaaacttccccattcggtgcaccaagagcagcctcacatggtgtgggccgacatcaagagctgcgagatccaacagggagccttgggaggagcccgaatcactgatggaatcggacagtgcatggagatggttcagcaggacgaggtgtcattggaggacagcgtggagtgcagagagacatgctttgaaatgggattgatccagtcctccttccttcactaccacatgaatgctgggcagcccaggatcacactcactgcaccctcaactcagaccgttacctggcacactggcctcactcttgtcggagactgagctattggcagtgccttcagctctgagctcaggcacctcgaacattgtttttgtcgttaaggatcctaaagtgctgcggggactgatcacatttttctcaacatccctggccccacctcttctgccacaaacgtcagcatggtggtatctgccggcccttggtccggtgagaaggcagagatgaacattctagaaatcaacaagaaatcgcgcccccagctggcagagaacaaacagcagttcagaaacctcaaacagaaatgtcttgtaactcaagtggcctacttcctggccaaccggcaaaataatt

SEQ ID NO: 158763 - DNA, 418 bp, Homo sapiens
  Payload ID: 11062
  Gene Symbol: NBPF3
  Gene Name: neuroblastoma breakpoint family, member 3
  ENST ID: ENST00000467103
  CDS Start-End: 96-236
ggtgacccaggctctcaccagccaattgtcccttgccgtcctcctgagggtatctggagcttcagtgctgtgtgctcttggcctccacactggggatgccactgactcccactgtccagggcttccagtggactctccgaggccctgatgtagaaacttccccattcggtgcaccaagagcagcctcacatggtgtgggccgacatcaagagctgcgagatccaacagaaatgtgattgataacagtaaagccacactcctcgcatgcctgaaatacccctcattgtcttcttcaggtggcaagggctctgaaacagccacataaagcccttgtagataaggatggtcaaataaaataatattatatctgtaaaaactcagatcttggtaagatttactagttgggaatccagtgtta

SEQ ID NO: 158764 - DNA, 1831 bp, Homo sapiens
  Payload ID: 11062
  Gene Symbol: NBPF3
  Gene Name: neuroblastoma breakpoint family, member 3
  Uniprot ID: Q9H094
  ENST ID: ENST00000619554
  CDS Start-End: 72-1805
aaagtgctgcggggactgatcacatttttctcaacatccctggccccacctcttctgccacaaacgtcagcatggtggtatctgccggcccttggtccggtgagaaggcagagatgaacattctagaaatcaacaagaaatcgcgcccccagctggcagagaacaaacagcagttcagaaacctcaaacagaaatgtcttgtaactcaagtggcctacttcctggccaaccggcaaaataattacgactatgaagactgcaaagacctcataaaatctatgctgagggatgagcggctgctcacagaagagaagcttgcagaggagctcgggcaagctgaggagctcaggcaatataaagtcctggttcactctcaggaacgagagctgacccagttaagggagaagttacaggaagggagagatgcctcccgctcattgaatcagcatctccaggccctcctcactccggatgagccggacaactcccagggacgggacctccgagaacagctggctgagggatgtaggctggcacagcacctcgtccaaaagctcagcccagaaaatgatgacgatgaggatgaagatgttaaagttgaggaggctgagaaagtacaggaattatatgcccccagggaggtgcagaaggctgaagaaaaggaagtccctgaggactcactggaggagtgtgccatcacttgttcaaatagccaccacccttgtgagtccaaccagccttacgggaacaccagaatcacatttgaggaagaccaagtcgactcaactctcattgactcatcctctcatgatgaatggttggatgctgtatgcattatcccagaaaatgaaagtgatcatgagcaagaggaagaaaaagggccagtgtctcccaggaatctgcaggagtctgaagaggaggaagccccccaggagtcctgggatgaaggtgattggactctctcaattcctcctgacatgtctgcctcataccagtctgacaggagcacctttcactcagtagaggaacagcaagtcggcttggctcttgacataggcagacattggtgtgatcaagtgaaaaaggaggaccaagaggccacaagtcccaggctcagcagggagctgctggatgagaaagagcctgaagtcttgcaggactcactggatagattttattcaactccttttgagtacctggaactgcctgacttatgccagccctacagaagtgacttttactcattgcaggaacaacaccttggcttggctcttgacttggacagaatgaaaaaggaccaagaagaggaagaagaccaaggcccaccatgccccaggctcagcagagagctgccggaggtagtagagcctgaggacttgcaggactcactggatagatggtattcgactcctttcagttatccagaactgcctgattcatgccagccctacggaagttgcttttactcattggaggaagaacacgttggcttttctcttgacgtggatgaaattgaaaagtaccaagaaggggaagaagatcaaaagccaccatgccccaggctcaacgaggtgctgatggaagcagaagagcctgaagtcttgcaggactcactggatagatgttattcgactacttcaacttactttcaactacatgcctcattccagcagtatagaagtgccttttactcatttgaggaacaggacgtcagcttggcccttgacgtggacaataggttttttactttgacagtgataaggcaccacctggccttccagatgggagtcatattcccacactaagcagcccttactaagctgagagatgt

SEQ ID NO: 158765 - DNA, 2485 bp, Homo sapiens
  Payload ID: 11063
  Gene Symbol: NBPF4
  Gene Name: neuroblastoma breakpoint family, member 4
  Uniprot ID: Q96M43
  ENST ID: ENST00000415641
  CDS Start-End: 205-2121
attgcaactgcagaccgttacctggtacgctggctgctacctccctcactcttgtcagagtcggagctacaggcagtgccttcagctctgagctcaggcatcccggtccctgtttttgcggttaaggactctaaagtgttgtgtcgtgttcatcaactttttctcaacttccctggctctacctcttctgccacaaacgtcagcatggtggtatctgccgaccctttgtccagcgagagggcagagatgaacatcctagaaatcaaccaggaattgcgctcgcagctggcagagagcaatcagcagttccgagacctcaaagagaaattccttataactcaagctactgcctactccctggccaaccagctgaagaaatacaagtgtgaagagtacaaagacatcatagactctgtgctgagggatgaactgcagtccatggagaagctggcagagaagctcaggcaagctgaggagctcaggcagtataaagccctggttcactctcaggcaaaagagctgacccagttacgggagaagttacgggaagggagagatgcctcccgctggctgaacaagcatctgaaaaccctcctcactcctgatgaccctgacaagtcccagggtcaggacctccgagagcagctggctgaggggcacaggctggcagagcaccttgttcacaagctgagcccagaaaatgatgaagatgaagatgaggatgaagacgacaaagacgaggaggttgagaaagtacaggaatcacctgcccccagagaggtgcagaagactgaagaaaaggaagtccctcaggactcactggaggaatgtgctgtcacttgttcaaatagtcacaacccttctaactccaaccagcctcacaggagcaccaaaatcacatttaaggaacacgaagtcgactctgctctggttgtagagagtgaacaccctcatgatgaagaggaggaagctctaaacattcccccagaaaatcaaaatgaccatgaggaggaggaggggaaagcgccagtgccccccagacaccatgacaagtccaactcttaccggcatcgtgaagtctctttcttggcattggatgaacagaaagtttgctccgctcaggatgttgccagggattactccaatcccaaatgggatgaaacctcacttggcttcctcgaaaagcaaagtgatcttgaagaggtgaaaggacaagaaacagttgctcccaggctcagcaggggaccgctgagagtggacaagcatgaaatcccccaggagtcactggatggatgttgcttgactccttccatccttcctgacctgactccctcctaccacccttattggagcactttgtactcttttgaagacaagcaagtcagcttggctcttgtagacaaaattaaaaaggatcaagaggagatagaagaccaaagcccaccatgccccaggctcagccaggagctgccagaggtgaaggagcaggaagtcccagaggactctgtgaatgaagtttacttgactccctcagttcaccatgacgtgtctgactgccaccagccttatagcagcaccttgtcctcattggaggatcagcttgcctgctctgctctggatgtagcctcccccaccgaggcggcctgtccccaagggacttggagtggagacttgagccaccaccagtcagaggtgcaagtttcacaggcacagctggaaccaagcaccctggtgcccagttgtctgcgactacagctggatcaagggttccactgtgggaacggcttggcccagcggggcctttcctccaccacctgcagcttctcagccaatgctgattctgggaaccaatggcccttccaagagctggttttagagccctctctggggatgaagaaccctccccagctggaagatgatgcacttgaaggctcagcaagcaacacacaagggcgtcaagtcactggccggattcgtgcctcccttgtcctgatactgaagaccatcagaagaagactcccgttcagcaagtggagactggcattcagattcgctggcccgcatgctgagagcgcagagataccaaatactgctggaaggacgcaaaggatggcaggatgaaagaatgtcacaaaaagcagcttttccacttgataaaaacaactaaaacagcaaagcaagtttaagtccaaacacaatactgcaggggtccttcactgaggattgaatttcagacacagaatactcttgatgacttcaagccactatgctcctttgatttgagaagccacattccatccccctccaattgtgatcaatacctagggagaccaatgcccagatggacaaatagcattgaccggcgttagccctgtttctcaattcccatcgtgtagagaacaggagtccgcagctgctggcaggagacagcatgtcagccgggactctgccagggcagagtatgagcaatgccatgttcttgctg

SEQ ID NO: 158766 - DNA, 2222 bp, Homo sapiens
  Payload ID: 11063
  Gene Symbol: NBPF4
  Gene Name: neuroblastoma breakpoint family, member 4
  ENST ID: ENST00000613157
  CDS Start-End: 219-2222
cttctaattctgttattgcaactgcagaccgttacctggtacgctggctgctacctccctcactcttgtcagagtcggagctacaggcagtgccttcagctctgagctcaggcatcccggtccctgtttttgcggttaaggactctaaagtgttgtgtcgtgttcatcaactttttctcaacttccctggctctacctcttctgccacaaacgtcagcatggtggtatctgccgaccctttgtccagcgagagggcagagatgaacatcctagaaatcaaccaggaattgcgctcgcagctggcagagagcaatcagcagttccgagacctcaaagagaaattccttataactcaagctactgcctactccctggccaaccagctgaagaaatacaagtgtgaagagtacaaagacatcatagactctgtgctgagggatgaactgcagtccatggagaagctggcagagaagctcaggcaagctgaggagctcaggcagtataaagccctggttcactctcaggcaaaagagctgacccagttacgggagaagttacgggaagggagagatgcctcccgctggctgaacaagcatctgaaaaccctcctcactcctgatgaccctgacaagtcccagggtcaggacctccgagagcagctggctgaggggcacaggctggcagagcaccttgttcacaagctgagcccagaaaatgatgaagatgaagatgaggatgaagacgacaaagacgaggaggttgagaaagtacaggaatcacctgcccccagagaggtgcagaagactgaagaaaaggaagtccctcaggactcactggaggaatgtgctgtcacttgttcaaatagtcacaacccttctaactccaaccagcctcacaggagcaccaaaatcacatttaaggaacacgaagtcgactctgctctggttgtagagagtgaacaccctcatgatgaagaggaggaagctctaaacattcccccagaaaatcaaaatgaccatgaggaggaggaggggaaagcgccagtgccccccaggaaccgacaatcacttgaaccaggtgaactgaccaacctcagggatttcctgatctcacctgtggtctcccatgtggctaatccaggacaccatgacaagtccaactcttaccggcatcgtgaagtctctttcttggcattggatgaacagaaagtttgctccgctcaggatgttgccagggattactccaatcccaaatgggatgaaacctcacttggcttcctcgaaaagcaaagtgatcttgaagaggtgaaaggacaagaaacagttgctcccaggctcagcaggggaccgctgagagtggacaagcatgaaatcccccaggagtcactggatggatgttgcttgactccttccatccttcctgacctgactccctcctaccacccttattggagcactttgtactcttttgaagacaagcaagtcagcttggctcttgtagacaaaattaaaaaggatcaagaggagatagaagaccaaagcccaccatgccccaggctcagccaggagctgccagaggtgaaggagcaggaagtcccagaggactctgtgaatgaagtttacttgactccctcagttcaccatgacgtgtctgactgccaccagccttatagcagcaccttgtcctcattggaggatcagcttgcctgctctgctctggatgtagcctcccccaccgaggcggcctgtccccaagggacttggagtggagacttgagccaccaccagtcagaggtgcaagtttcacaggcacagctggaaccaagcaccctggtgcccagttgtctgcgactacagctggatcaagggttccactgtgggaacggcttggcccagcggggcctttcctccaccacctgcagcttctcagccaatgctgattctgggaaccaatggcccttccaagagctggttttagagccctctctggggatgaagaaccctccccagctggaagatgatgcacttgaaggctcagcaagcaacacacaagggcgtcaagtcactggccggattcgtgcctcccttgtcctgatactgaagaccatcagaagaagactcccgttcagcaagtggagactggcattcagattcgctggcccgcatgctgagagcgcagagataccaaatactgctggaaggacgcaaaggatggcaggatga

SEQ ID NO: 158767 - DNA, 2281 bp, Homo sapiens
  Payload ID: 11064
  Gene Symbol: NBPF6
  Gene Name: neuroblastoma breakpoint family, member 6
  Uniprot ID: Q5VWK0
  ENST ID: ENST00000294652
  CDS Start-End: 1-1917
atggtggtatctgccgaccctttgtccagcgagagggcagagatgaacatcctagaaatcaaccaggaattgcgctcgcagctggcagagagcaatcagcagttccgagacctcaaagagaagttccttataactcaagctactgcctactccctggccaaccagctgaagaaatacaagtgtgaagagtacaaagacatcatagactctgtgctgagggatgaactgcagtccatggagaagctggcagagaagctcaggcaagctgaggagctcaggcagtataaagccctggttcactctcaggcaaaagagctgacccagttacgggagaagttacgggaagggagagatgcctcccgctggctgaacaagcatctgaaaaccctcctcactcctgatgaccctgacaagtcccagggtcaggacctccgagagcagctggctgaggggcacaggctggcagagcaccttgttcacaagctgagcccagaaaatgatgaagatgaagatgaggatgaagacgacaaagacgaggaggttgagaaagtacaggaatcacctgcccccagagaggtgcagaagactgaagaaaaggaagtccctcaggactcactggaggaatgtgctgtcacttgttcaaatagtcacaacccttctaactccaaccagcctcacaggagcaccaaaatcacatttaaggaacacgaagtcgactctgctctggttgtagagagtgaacaccctcatgatgaagaggaggaagctctaaacattcccccagaaaatcaaaatgaccatgaggaggaggaggggaaagcgccagtgccccccagacaccatgacaagtccaactcttaccggcatcgtgaagtctctttcttggcattggatgaacagaaagtttgctccgctcaggatgttgccagggattactccaatcccaaatgggatgaaacctcacttggcttcctcgaaaagcaaagtgatcttgaagaggtgaaaggacaagaaacagttgctcccaggctcagcaggggaccgctgagagtggacaagcatgaaatcccccaggagtcactggatggatgttgcttgactccttccatccttcctgacctgactccctcctaccacccttattggagcactttgtactcttttgaagacaagcaagtcagcttggctcttgtagacaaaattaaaaaggatcaagaggagatagaagaccaaagcccaccatgccccaggctcagccaggagctgccagaggtgaaggagcaggaagtcccagaggactctgtgaatgaagtttacttgactccctcagttcaccatgacgtgtctgactgccaccagccttatagcagcaccttgtcctcattggaggatcagcttgcctgctctgctctggatgtagcctcccccaccgaggcggcctgtccccaagggacttggagtggagacttgagccaccaccggtcagaggttcaaatttcacaggcacagctggaaccaagcaccctggtgcccagttgtctgcgactacagctggatcaagggttccactgtgggaacggcttggcccagcggggcctttcctccaccacctgcagcttctcagccaatgctgattctgggaaccaatggcccttccaagagctggttttagagccctctctggggatgaagaaccctccccagctggaagatgatgcacttgaaggctcagcaagcaacacacaagggcgtcaagtcactggccggattcgtgcctcccttgtcctgatactgaagaccatcagaagaagactcccgttcagcaagtggagactggcattcagattcgctggcccgcatgctgagagtgcagagataccaaatactgctgaaaggatgcaaaggatgataggatgaaagaatgtcacaaaaagcagcttttccacttgataaaaacaactaaaacagcaaagcaagtttaagtccaaacacaatactgcaggggtccttcactgaggattgaatttcagacacagaatactcttgatgacttcaagccactatgctcctttgatttgagaagccacattccatccccctccaattgtgatcaacacctagggagaccaatgcccagatggacaaatagcattgactggcgttagccctgtttctcaattcccatcatgtagagaacaggagtccgcagctgctggcaggagacagcatgtcagccgggactctgccagggcagagtatgagcaatgccatgttcttgctg

SEQ ID NO: 158768 - DNA, 2222 bp, Homo sapiens
  Payload ID: 11064
  Gene Symbol: NBPF6
  Gene Name: neuroblastoma breakpoint family, member 6
  Uniprot ID: Q5VWK0
  ENST ID: ENST00000370040
  CDS Start-End: 219-2222
cttctaattctgttattgcaactgcagaccgttacctggtacactggctgctacctccctcactcttgtcagagtcggagctacaggcagtgccttcagctctgagctcaggcatcccggtccctgtttttgcggttaaggactctaaagtgttgtgtcgtgttcatcaactttttctcaacctccctggctctacctcttctgccacaaacgtcagcatggtggtatctgccgaccctttgtccagcgagagggcagagatgaacatcctagaaatcaaccaggaattgcgctcgcagctggcagagagcaatcagcagttccgagacctcaaagagaaattccttataactcaagctactgcctactccctggccaaccagctgaagaaatacaagtgtgaagagtacaaagacatcatagactctgtgctgagggatgaactgcagtccatggagaagctggcagagaagctcaggcaagctgaggagctcaggcagtataaagccctggttcactctcaggcaaaagagctgacccagttacgggagaagttacgggaagggagagatgcctcccgctggctgaacaagcatctgaaaaccctcctcactcctgatgaccctgacaagtcccagggtcaggacctccgagagcagctggctgaggggcacaggctggcagagcaccttgttcacaagctgagcccagaaaatgatgaagatgaagatgaggatgaagacgacaaagacgaggaggttgagaaagtacaggaatcacctgcccccagagaggtgcagaagactgaagaaaaggaagtccctcaggactcactggaggaatgtgctgtcacttgttcaaatagtcacaacccttctaactccaaccagcctcacaggagcaccaaaatcacatttaaggaacacgaagtcgactctgctctggttgtagagagtgaacaccctcatgatgaagaggaggaagctctaaacattcccccagaaaatcaaaatgaccatgaggaggaggaggggaaagcgccagtgccccccaggaaccgacaatcacttgaaccaggtgaactgaccaacctcagggatttcctgatctcacctgtggtctcccatgtggctaatccaggacaccatgacaagtccaactcttaccggcatcgtgaagtctctttcttggcattggatgaacagaaagtttgctccgctcaggatgttgccagggattactccaatcccaaatgggatgaaacctcacttggcttcctcgaaaagcaaagtgatcttgaagaggtgaaaggacaagaaacagttgctcccaggctcagcaggggaccgctgagagtggacaagcatgaaatcccccaggagtcactggatggatgttgcttgactccttccatccttcctgacctgactccctcctaccacccttattggagcactttgtactcttttgaagacaagcaagtcagcttggctcttgtagacaaaattaaaaaggatcaagaggagatagaagaccaaagcccaccatgccccaggctcagccaggagctgccagaggtgaaggagcaggaagtcccagaggactctgtgaatgaagtttacttgactccctcagttcaccatgacgtgtctgactgccaccagccttatagcagcaccttgtcctcattggaggatcagcttgcctgctctgctctggatgtagcctcccccaccgaggcggcctgtccccaagggacttggagtggagacttgagccaccaccggtcagaggttcaaatttcacaggcacagctggaaccaagcaccctggtgcccagttgtctgcgactacagctggatcaagggttccactgtgggaacggcttggcccagcggggcctttcctccaccacctgcagcttctcagccaatgctgattctgggaaccaatggcccttccaagagctggttttagagccctctctggggatgaagaaccctccccagctggaagatgatgcacttgaaggctcagcaagcaacacacaagggcgtcaagtcactggccggattcgtgcctcccttgtcctgatactgaagaccatcagaagaagactcccgttcagcaagtggagactggcattcagattcgctggcccgcatgctgagagtgcagagataccaaatactgctgaaaggatgcaaaggatgataggatga

SEQ ID NO: 158769 - DNA, 2499 bp, Homo sapiens
  Payload ID: 11064
  Gene Symbol: NBPF6
  Gene Name: neuroblastoma breakpoint family, member 6
  Uniprot ID: Q5VWK0
  ENST ID: ENST00000444143
  CDS Start-End: 219-2135
cttctaattctgttattgcaactgcagaccgttacctggtacgctggctgctacctccctcactcttgtcagagtcggagctacaggcagtgccttcagctctgagctcaggcatcccggtccctgtttttgcggttaaggactctaaagtgttgtgtcgtgttcatcaactttttctcaacctccctggctctacctcttctgccacaaacgtcagcatggtggtatctgccgaccctttgtccagcgagagggcagagatgaacatcctagaaatcaaccaggaattgcgctcgcagctggcagagagcaatcagcagttccgagacctcaaagagaaattccttataactcaagctactgcctactccctggccaaccagctgaagaaatacaagtgtgaagagtacaaagacatcatagactctgtgctgagggatgaactgcagtccatggagaagctggcagagaagctcaggcaagctgaggagctcaggcagtataaagccctggttcactctcaggcaaaagagctgacccagttacgggagaagttacgggaagggagagatgcctcccgctggctgaacaagcatctgaaaaccctcctcactcctgatgaccctgacaagtcccagggtcaggacctccgagagcagctggctgaggggcacaggctggcagagcaccttgttcacaagctgagcccagaaaatgatgaagatgaagatgaggatgaagacgacaaagacgaggaggttgagaaagtacaggaatcacctgcccccagagaggtgcagaagactgaagaaaaggaagtccctcaggactcactggaggaatgtgctgtcacttgttcaaatagtcacaacccttctaactccaaccagcctcacaggagcaccaaaatcacatttaaggaacacgaagtcgactctgctctggttgtagagagtgaacaccctcatgatgaagaggaggaagctctaaacattcccccagaaaatcaaaatgaccatgaggaggaggaggggaaagcgccagtgccccccagacaccatgacaagtccaactcttaccggcatcgtgaagtctctttcttggcattggatgaacagaaagtttgctccgctcaggatgttgccagggattactccaatcccaaatgggatgaaacctcacttggcttcctcgaaaagcaaagtgatcttgaagaggtgaaaggacaagaaacagttgctcccaggctcagcaggggaccgctgagagtggacaagcatgaaatcccccaggagtcactggatggatgttgcttgactccttccatccttcctgacctgactccctcctaccacccttattggagcactttgtactcttttgaagacaagcaagtcagcttggctcttgtagacaaaattaaaaaggatcaagaggagatagaagaccaaagcccaccatgccccaggctcagccaggagctgccagaggtgaaggagcaggaagtcccagaggactctgtgaatgaagtttacttgactccctcagttcaccatgacgtgtctgactgccaccagccttatagcagcaccttgtcctcattggaggatcagcttgcctgctctgctctggatgtagcctcccccaccgaggcggcctgtccccaagggacttggagtggagacttgagccaccaccggtcagaggttcaaatttcacaggcacagctggaaccaagcaccctggtgcccagttgtctgcgactacagctggatcaagggttccactgtgggaacggcttggcccagcggggcctttcctccaccacctgcagcttctcagccaatgctgattctgggaaccaatggcccttccaagagctggttttagagccctctctggggatgaagaaccctccccagctggaagatgatgcacttgaaggctcagcaagcaacacacaagggcgtcaagtcactggccggattcgtgcctcccttgtcctgatactgaagaccatcagaagaagactcccgttcagcaagtggagactggcattcagattcgctggcccgcatgctgagagtgcagagataccaaatactgctgaaaggatgcaaaggatgataggatgaaagaatgtcacaaaaagcagcttttccacttgataaaaacaactaaaacagcaaagcaagtttaagtccaaacacaatactgcaggggtccttcactgaggattgaatttcagacacagaatactcttgatgacttcaagccactatgctcctttgatttgagaagccacattccatccccctccaattgtgatcaacacctagggagaccaatgcccagatggacaaatagcattgactggcgttagccctgtttctcaattcccatcatgtagagaacaggagtccgcagctgctggcaggagacagcatgtcagccgggactctgccagggcagagtatgagcaatgccatgttcttgctg

SEQ ID NO: 158770 - DNA, 2494 bp, Homo sapiens
  Payload ID: 11064
  Gene Symbol: NBPF6
  Gene Name: neuroblastoma breakpoint family, member 6
  Uniprot ID: Q5VWK0
  ENST ID: ENST00000495380
  CDS Start-End: 214-2130
aattctgttattgcaactgcagaccgttacctggtacactggctgctacctccctcactcttgtcagagtcggagctacaggcagtgccttcagctctgagctcaggcatcccggtccctgtttttgcggttaaggactctaaagtgttgtgtcgtgttcatcaactttttctcaacctccctggctctacctcttctgccacaaacgtcagcatggtggtatctgccgaccctttgtccagcgagagggcagagatgaacatcctagaaatcaaccaggaattgcgctcgcagctggcagagagcaatcagcagttccgagacctcaaagagaaattccttataactcaagctactgcctactccctggccaaccagctgaagaaatacaagtgtgaagagtacaaagacatcatagactctgtgctgagggatgaactgcagtccatggagaagctggcagagaagctcaggcaagctgaggagctcaggcagtataaagccctggttcactctcaggcaaaagagctgacccagttacgggagaagttacgggaagggagagatgcctcccgctggctgaacaagcatctgaaaaccctcctcactcctgatgaccctgacaagtcccagggtcaggacctccgagagcagctggctgaggggcacaggctggcagagcaccttgttcacaagctgagcccagaaaatgatgaagatgaagatgaggatgaagacgacaaagacgaggaggttgagaaagtacaggaatcacctgcccccagagaggtgcagaagactgaagaaaaggaagtccctcaggactcactggaggaatgtgctgtcacttgttcaaatagtcacaacccttctaactccaaccagcctcacaggagcaccaaaatcacatttaaggaacacgaagtcgactctgctctggttgtagagagtgaacaccctcatgatgaagaggaggaagctctaaacattcccccagaaaatcaaaatgaccatgaggaggaggaggggaaagcgccagtgccccccagacaccatgacaagtccaactcttaccggcatcgtgaagtctctttcttggcattggatgaacagaaagtttgctccgctcaggatgttgccagggattactccaatcccaaatgggatgaaacctcacttggcttcctcgaaaagcaaagtgatcttgaagaggtgaaaggacaagaaacagttgctcccaggctcagcaggggaccgctgagagtggacaagcatgaaatcccccaggagtcactggatggatgttgcttgactccttccatccttcctgacctgactccctcctaccacccttattggagcactttgtactcttttgaagacaagcaagtcagcttggctcttgtagacaaaattaaaaaggatcaagaggagatagaagaccaaagcccaccatgccccaggctcagccaggagctgccagaggtgaaggagcaggaagtcccagaggactctgtgaatgaagtttacttgactccctcagttcaccatgacgtgtctgactgccaccagccttatagcagcaccttgtcctcattggaggatcagcttgcctgctctgctctggatgtagcctcccccaccgaggcggcctgtccccaagggacttggagtggagacttgagccaccaccggtcagaggttcaaatttcacaggcacagctggaaccaagcaccctggtgcccagttgtctgcgactacagctggatcaagggttccactgtgggaacggcttggcccagcggggcctttcctccaccacctgcagcttctcagccaatgctgattctgggaaccaatggcccttccaagagctggttttagagccctctctggggatgaagaaccctccccagctggaagatgatgcacttgaaggctcagcaagcaacacacaagggcgtcaagtcactggccggattcgtgcctcccttgtcctgatactgaagaccatcagaagaagactcccgttcagcaagtggagactggcattcagattcgctggcccgcatgctgagagtgcagagataccaaatactgctgaaaggatgcaaaggatgataggatgaaagaatgtcacaaaaagcagcttttccacttgataaaaacaactaaaacagcaaagcaagtttaagtccaaacacaatactgcaggggtccttcactgaggattgaatttcagacacagaatactcttgatgacttcaagccactatgctcctttgatttgagaagccacattccatccccctccaattgtgatcaacacctagggagaccaatgcccagatggacaaatagcattgactggcgttagccctgtttctcaattcccatcatgtagagaacaggagtccgcagctgctggcaggagacagcatgtcagccgggactctgccagggcagagtatgagcaatgccatgttcttgctg

SEQ ID NO: 158771 - DNA, 1897 bp, Homo sapiens
  Payload ID: 11064
  Gene Symbol: NBPF6
  Gene Name: neuroblastoma breakpoint family, member 6
  ENST ID: ENST00000531446
  CDS Start-End: 180-1897
tacactggctgctacctccctcactcttgtcagagtcggagctacaggcagtgccttcagctctgagctcaggcatcccggtccctgtttttgcggttaaggactctaaagtgttgtgtcgtgttcatcaactttttctcaacctccctggctctacctcttctgccacaaacgtcagcatggtggtatctgccgaccctttgtccagcgagagggcagagatgaacatcctagaaatcaaccaggaattgcgctcgcagctggcagagagcaatcagcagttccgagacctcaaagagaaattccttataactcaagctactgcctactccctggccaaccagctgaagaaatacaagtgtgaagagtacaaagacatcatagactctgtgctgagggatgaactgcagtccatggagaagctggcagagaagctcaggcaagctgaggagctcaggcagtataaagccctggttcactctcaggcaaaagagctgacccagttacgggagaagttacgggaagggagagatgcctcccgctggctgaacaagcatctgaaaaccctcctcactcctgatgaccctgacaagtcccagggtcaggacctccgagagcagctggctgaggggcacaggctggcagagcaccttgttcacaagctgagcccagaaaatgatgaagatgaagatgaggatgaagacgacaaagacgaggaggttgagaaagtacaggaatcacctgcccccagagaggtgcagaagactgaagaaaaggaagtccctcaggactcactggaggaatgtgctgtcacttgttcaaatagtcacaacccttctaactccaaccagcctcacaggagcaccaaaatcacatttaaggaacacgaagtcgactctgctctggttgtagagagtgaacaccctcatgatgaagaggaggaagctctaaacattcccccagaaaatcaaaatgaccatgaggaggaggaggggaaagcgccagtgccccccaggaaccgacaatcacttgaaccaggtgaactgaccaacctcagggatttcctgatctcacctgtggtctcccatgtggctaatccaggacaccatgacaagtccaactcttaccggcatcgtgaagtctctttcttggcattggatgaacagaaagtttgctccgctcaggatgttgccagggattactccaatcccaaatgggatgaaacctcacttggcttcctcgaaaagcaaagtgatcttgaagaggtgaaaggacaagaaacagttgctcccaggctcagcaggggaccgctgagagtggacaagcatgaaatcccccaggagtcactggatggatgttgcttgactccttccatccttcctgacctgactccctcctaccacccttattggagcactttgtactcttttgaagacaagcaagtcagcttggctcttgtagacaaaattaaaaaggatcaagaggagatagaagaccaaagcccaccatgccccaggctcagccaggagctgccagaggtgaaggagcaggaagtcccagaggactctgtgaatgaagtttacttgactccctcagttcaccatgacgtgtctgactgccaccagccttatagcagcaccttgtcctcattggaggatcagcttgcctgctctgctctggatgtagcctcccccaccgaggcggcctgtccccaagggacttggagtggagacttgagccaccaccggtcagaggttcaaatttcacaggcacagctggaaccaagcaccctggtgcccagttgtctgcgactacagctggatcaagggttccactgtgggaacggcttggcccagcggggcctttcctccaccacctgcagcttctcagccaatgc

SEQ ID NO: 158772 - DNA, 5034 bp, Homo sapiens
  Payload ID: 11065
  Gene Symbol: NBPF9
  Gene Name: neuroblastoma breakpoint family, member 9
  ENST ID: ENST00000584027
  CDS Start-End: 76-3411
aaagtgctgtgggagtgatcacatttttcacaacagtaagtccctggccccacctcttctgccacaaacgtcagcatggtggtatcagccggcccttggtccagcgagaaggcagagatgaacattctagaaatcaacgagaaattgcgcccccagttggcagagaacaaacagcagttcggaaacctcaaagagagatgttttctaactcaactggccggcttcctggccaaccgacagaagaaatacaagtatgaagagtgtaaagacctcataaaatttatgctgaggaatgagcgacagttcaaggaggagaagcttgcagagcagctgaagcaagctgaggagctcaggcaatataaagtcctggttcactctcaggaacgagagctgacgcagttaaaggagaagttacgggaagggagagatgcctcccgctcattgaatgagcatctccaggccctcctcactccggatgagccggacaagtcccaggggcaggacctccaagaacagctggctgaggggtgtagactggcacagcaccttgtccaaaagctcagcccagaaaatgacgaagatgaggatgaagatgttcaagttgaggaggatgagaaagtactggaatcatctgcccccagggaggtgcagaaggctgaagagagcaaagtcgctgaggactcactggaggaatgtgccatcacttgttcaaatagccacggcccttgtgactccaaccagcctcacaagaacatcaaaatcacatttgaggaagacgaagtcaactcaactctggttgtagacagagaatcctctcatgatgaatgtcaggatgctctaaacattctcccagtccctggccccacctcttctgccacaaacgtcagcatggtggtatcagccggccctttgtccagcgagaaggcagagatgaacattctagaaatcaatgagaaattgcgcccccagctggcagagaagaaacagcagttcagaaacctcaaagagaaatgttttctaactcaactggccggcttcctggccaaccagcagaacaaatacaagtatgaagagtgtaaagacctcataaaatttatgctgaggaatgagcgacagttcaaggaggagaagcttgcagagcagctgaagcaagctgaggagctcaggcaatataaagtcctggttcacgctcaggaacgagagctgacccagttaagggagaagttgcgggaagggagagatgcctcccgctcattgaatgagcatctccaggccctcctcactccggatgagccggacaagtcccaggggcaggacctccaagaacagctggctgaggggtgtagactggcacagcaccttgtccaaaagctcagcccagaaaatgacaacgatgacgatgaagatgttcaaattgaggtggctgagaaagtgcagaaatcgtctgcccccagggagatgcagaaggctgaagaaaaggaagtccctgaggactcactggaggaatgtgccatcacttattcaaatagccatggcccttatgactccaaccagccacataggaaaaccaaaatcacatttgaggaagacaaagtcgactcaactctcattggctcatcctctcatgttgaacgggaagatgctgtacacattattccagaaaatgaaagtgatgatgaggaagaggaagaaaaagggccagtgtctcccaggaatctgcaggagtctgaagaggaggaagtcccccaggagtcctgggatgaaggttattcgactccctcaattcctcctgaaatgttggcctcgtacaagtcttacagcagcacatttcactcattagaggaacagcaagtctgcatggctgttgacataggcagacatcggtgggatcaagtgaaaaaggaggaccaagaggcaacaggtcccaggctcagcagggagctgctggatgagaaagggcctgaagtcttgcaggactcactggatagatgttattcaactccttcaggttgtcttgaactgactgactcatgccagccctacagaagtgccttttacgtattggagcaacagcgtgttggcttggctgttgacatggatgaaattgaaaagtaccaagaagtggaagaagaccaagacccatcatgccccaggctcagcagggagctgctggatgagaaagagcctgaagtcttgcaggactcactgggtagatggtattcgactccttcaggttatcttgaactgcctgacttaggccagccctacagcagtgctgtttactcattggaggaacagtaccttggcttggctcttgacttggacagaattaaaaaggaccaagaagaggaagaagaccaaggcccaccatgccccaggctcagcagggagctgctggaggtagtagagcctgaagtcttgcaggactcactggatagatgttattcaactccttccagttgtcttgaacagcctgactcctgccagccctatggaagttccttttatgcattggaggaaaaacatgttggcttttctcttgacgtgggagaaattgaaaagaaggggaaggggaagaaaagaaggggaagaagatcaaagaagaaaagaagaaggggaagaaaagaaggggaagaaaatcaaaacccaccatgccccaggctcagcagggagctgctggatgagaaagagcctgaagtcttgcaggactcactggatagatgttattcgactccttcaggttatcttgaactgcctgacttaggccagccctacagcagtgctgtttactcattggaggaacagtaccttggcttggctcttgacgtggacagaattaaaaaggaccaagaagaggaagaagaccaaggcccaccatgccccaggctcagcagggagctgctggaggtagtagagcctgaagtcttgcaggactcactggatagatgttattcaactccttccagttgtcttgaacagcctgactcctgccagccctatggaagttccttttatgcattggaggaaaaacatgttggcttttctcttgacgtgggagaaattgaaaagaaggggaaggggaagaaaagaaggggaagaagatcaaagaaggaaagaagaaggggaagaaaagaaggggaagaagatcaaaacccaccatgccccaggctcaacggcgtgctgatggaagtggaagagcctgaagtcttgcaggactcactggatggatgttattctactccgtcaatgtactttgaactacctgactcattccagcactacagaagtgtgttttactcatttgaggaacagcacatcagcttcgccctttacgtggacaataggttttttactttgacggtgacaagtctccacctggtgttccagatggaagtcatattcccacaataagcagcccttactaagccgagagatgtcattcctgcaggcaggacctataggcacgtgaagttttgaatgaaagtacagttccatttggaagcccagacataggatgggtcagtgggcatggctctattcctattctcaaaccatgccagtggcaacctgtgctcagtctgaagacaatggacccacgttaggtgtgacacgttcacataactgtgcagcacatgccgggagtgatcagtcagacattttaatttgaaccacgtatctctgggtagctacaaaattcctcagggatttcattttgcagacatgtctctgagcttctatacctgctcaaggtcattgtcatctttgtgtttagctcatccaaaggtgttaccctggtttcaatgaacctaacctcattcttcgtgtcttcagtgttggcttgttttagctgatccatctgtaacacaggagggatccttggctgaggattgtatttcagaaccaccaactgctcttgacaattgttaacccgctaggctcctttggttagagaagccacagtccttcagcctccaattggtgtcagtacttaggaagaccacagctagatggacaaacagcattgggaggccttagccctgctcctctcaattccatcctgtagagaacaggagtcaggagccgctggcaggagacagcatgtcacccaggactctgccggtgcagaatatgaacaatgccatgttcttgcagaaaacgcttagcctgagtttcataggaggtaatcaccagacaactgcagaatgtagaacactgagcaggacaactgacctgtctccttcacatagtccttatcaccacaaatcacacaacaaaaaggagaagagatattttgggttcaaaaaaagtaaaaagataatgtagctgcatttctttagttattttgaaccccaaatatttcctcatctttttgttgttgtcatggatggtggtgacatggacttgtttatagaggacaggtcagctgtctggctcaatgatctacattctgaagttgtctgaaaatgtcttcatgattaaattcagcctaaacgttttgccgggaacactgcagagacaatgctgtgagtttccaacctcagcccatctgcgggcagagaaggtctagtttgtccatcaccattatgatatcaggactggttacttggttaaggaggggtctaggagatctgtcccttttagagacaccttacttataatgaagtacttgggaaagcggttttcaagagtataaatatcctgtattctaatgatcatcctctaaacattttatcatttattaatcctccctgcctgtgtctattattatattcatatctctacgctggaaattttgggtctcaatttttactgtgcctttgtttttactagtgtctgctgttgcaaaaagaagaaaacattctctgcctgagttttaatttttgtccaaagttaattttaatctatacaattaaaaccttttgcctatcactctggacttttggattgttttttacattcagtgttataatatttgattatgctgattggttttggtgggtactgatgcgaattaataaaaacatttcatttcca

SEQ ID NO: 158773 - DNA, 5835 bp, Homo sapiens
  Payload ID: 11065
  Gene Symbol: NBPF9
  Gene Name: neuroblastoma breakpoint family, member 9
  ENST ID: ENST00000615421
  CDS Start-End: 871-4206
gggaccctgaggatccagctggccgcaggctatgggctgggcggcggttgagacagcggcgatattgggaggggtaggtgagcgtcgcgaggcagcgtgagcttctgagtgaacgcggtgcttttgggaacgcgggacgggcgacctgtggcgccaggagcgggccgaggcgcggcggcgcggctgccgtctggatgggaagttacggtttacagcgaagtccacccagcgtttccgaggcaatctgaaagcaaatcctgtttagatgcaggcgaaggttcctggtgacccaggctctcaccttaccgtcccttaccgtcctcctgagggtgtcctggagcttcagtgctgtgtgttcttggcctccatgctgggggtgccaccaattcccactgtccagggcttccagtggactctccgaggtactgatgtagaaacttccccattcggtgcaccaagagcaacctcacacggtgtgggccaaatgaagagctgccagatcccacaggtggcaagggctctggaacagccacataaagcccttgaagataaggatggtcaaacaaaataatatcatacctggagaaactcagatcttgctaagatttactggttgggaatccaaagttaatgccaagaagcagccgccagttgggatcaaatgtgagcctatggatcaagacggttacctggcacgctggccacaatctacctcactcttatcagagtctgagctactggcagtgctttcagctctgagttgaggcacctcaaaccttgtttttgtggtgaaggatcctaaagtgctgtgggagtgatcacatttttcacaacatccctggccccacctcttctgccacaaacgtcagcatggtggtatcagccggcccttggtccagcgagaaggcagagatgaacattctagaaatcaacgagaaattgcgcccccagttggcagagaacaaacagcagttcggaaacctcaaagagagatgttttctaactcaactggccggcttcctggccaaccgacagaagaaatacaagtatgaagagtgtaaagacctcataaaatttatgctgaggaatgagcgacagttcaaggaggagaagcttgcagagcagctgaagcaagctgaggagctcaggcaatataaagtcctggttcactctcaggaacgagagctgacgcagttaaaggagaagttacgggaagggagagatgcctcccgctcattgaatgagcatctccaggccctcctcactccggatgagccggacaagtcccaggggcaggacctccaagaacagctggctgaggggtgtagactggcacagcaccttgtccaaaagctcagcccagaaaatgacgaagatgaggatgaagatgttcaagttgaggaggatgagaaagtactggaatcatctgcccccagggaggtgcagaaggctgaagagagcaaagtcgctgaggactcactggaggaatgtgccatcacttgttcaaatagccacggcccttgtgactccaaccagcctcacaagaacatcaaaatcacatttgaggaagacgaagtcaactcaactctggttgtagacagagaatcctctcatgatgaatgtcaggatgctctaaacattctcccagtccctggccccacctcttctgccacaaacgtcagcatggtggtatcagccggccctttgtccagcgagaaggcagagatgaacattctagaaatcaatgagaaattgcgcccccagctggcagagaagaaacagcagttcagaaacctcaaagagaaatgttttctaactcaactggccggcttcctggccaaccagcagaacaaatacaagtatgaagagtgtaaagacctcataaaatttatgctgaggaatgagcgacagttcaaggaggagaagcttgcagagcagctgaagcaagctgaggagctcaggcaatataaagtcctggttcacgctcaggaacgagagctgacccagttaagggagaagttgcgggaagggagagatgcctcccgctcattgaatgagcatctccaggccctcctcactccggatgagccggacaagtcccaggggcaggacctccaagaacagctggctgaggggtgtagactggcacagcaccttgtccaaaagctcagcccagaaaatgacaacgatgacgatgaagatgttcaaattgaggtggctgagaaagtgcagaaatcgtctgcccccagggagatgcagaaggctgaagaaaaggaagtccctgaggactcactggaggaatgtgccatcacttattcaaatagccatggcccttatgactccaaccagccacataggaaaaccaaaatcacatttgaggaagacaaagtcgactcaactctcattggctcatcctctcatgttgaacgggaagatgctgtacacattattccagaaaatgaaagtgatgatgaggaagaggaagaaaaagggccagtgtctcccaggaatctgcaggagtctgaagaggaggaagtcccccaggagtcctgggatgaaggttattcgactccctcaattcctcctgaaatgttggcctcgtacaagtcttacagcagcacatttcactcattagaggaacagcaagtctgcatggctgttgacataggcagacatcggtgggatcaagtgaaaaaggaggaccaagaggcaacaggtcccaggctcagcagggagctgctggatgagaaagggcctgaagtcttgcaggactcactggatagatgttattcaactccttcaggttgtcttgaactgactgactcatgccagccctacagaagtgccttttacgtattggagcaacagcgtgttggcttggctgttgacatggatgaaattgaaaagtaccaagaagtggaagaagaccaagacccatcatgccccaggctcagcagggagctgctggatgagaaagagcctgaagtcttgcaggactcactgggtagatggtattcgactccttcaggttatcttgaactgcctgacttaggccagccctacagcagtgctgtttactcattggaggaacagtaccttggcttggctcttgacttggacagaattaaaaaggaccaagaagaggaagaagaccaaggcccaccatgccccaggctcagcagggagctgctggaggtagtagagcctgaagtcttgcaggactcactggatagatgttattcaactccttccagttgtcttgaacagcctgactcctgccagccctatggaagttccttttatgcattggaggaaaaacatgttggcttttctcttgacgtgggagaaattgaaaagaaggggaaggggaagaaaagaaggggaagaagatcaaagaagaaaagaagaaggggaagaaaagaaggggaagaaaatcaaaacccaccatgccccaggctcagcagggagctgctggatgagaaagagcctgaagtcttgcaggactcactggatagatgttattcgactccttcaggttatcttgaactgcctgacttaggccagccctacagcagtgctgtttactcattggaggaacagtaccttggcttggctcttgacgtggacagaattaaaaaggaccaagaagaggaagaagaccaaggcccaccatgccccaggctcagcagggagctgctggaggtagtagagcctgaagtcttgcaggactcactggatagatgttattcaactccttccagttgtcttgaacagcctgactcctgccagccctatggaagttccttttatgcattggaggaaaaacatgttggcttttctcttgacgtgggagaaattgaaaagaaggggaaggggaagaaaagaaggggaagaagatcaaagaaggaaagaagaaggggaagaaaagaaggggaagaagatcaaaacccaccatgccccaggctcaacggcgtgctgatggaagtggaagagcctgaagtcttgcaggactcactggatggatgttattctactccgtcaatgtactttgaactacctgactcattccagcactacagaagtgtgttttactcatttgaggaacagcacatcagcttcgccctttacgtggacaataggttttttactttgacggtgacaagtctccacctggtgttccagatggaagtcatattcccacaataagcagcccttactaagccgagagatgtcattcctgcaggcaggacctataggcacgtgaagttttgaatgaaagtacagttccatttggaagcccagacataggatgggtcagtgggcatggctctattcctattctcaaaccatgccagtggcaacctgtgctcagtctgaagacaatggacccacgttaggtgtgacacgttcacataactgtgcagcacatgccgggagtgatcagtcagacattttaatttgaaccacgtatctctgggtagctacaaaattcctcagggatttcattttgcagacatgtctctgagcttctatacctgctcaaggtcattgtcatctttgtgtttagctcatccaaaggtgttaccctggtttcaatgaacctaacctcattcttcgtgtcttcagtgttggcttgttttagctgatccatctgtaacacaggagggatccttggctgaggattgtatttcagaaccaccaactgctcttgacaattgttaacccgctaggctcctttggttagagaagccacagtccttcagcctccaattggtgtcagtacttaggaagaccacagctagatggacaaacagcattgggaggccttagccctgctcctctcaattccatcctgtagagaacaggagtcaggagccgctggcaggagacagcatgtcacccaggactctgccggtgcagaatatgaacaatgccatgttcttgcagaaaacgcttagcctgagtttcataggaggtaatcaccagacaactgcagaatgtagaacactgagcaggacaactgacctgtctccttcacatagtccttatcaccacaaatcacacaacaaaaaggagaagagatattttgggttcaaaaaaagtaaaaagataatgtagctgcatttctttagttattttgaaccccaaatatttcctcatctttttgttgttgtcatggatggtggtgacatggacttgtttatagaggacaggtcagctgtctggctcaatgatctacattctgaagttgtctgaaaatgtcttcatgattaaattcagcctaaacgttttgccgggaacactgcagagacaatgctgtgagtttccaacctcagcccatctgcgggcagagaaggtctagtttgtccatcaccattatgatatcaggactggttacttggttaaggaggggtctaggagatctgtcccttttagagacaccttacttataatgaagtacttgggaaagcggttttcaagagtataaatatcctgtattctaatgatcatcctctaaacattttatcatttattaatcctccctgcctgtgtctattattatattcatatctctacgctggaaattttgggtctcaatttttactgtgcctttgtttttactagtgtctgctgttgcaaaaagaagaaaacattctctgcctgagttttaatttttgtccaaagttaattttaatctatacaattaaaaccttttgcctatcactctggacttttggattgttttttacattcagtgttataatatttgattatgctgattggttttggtgggtactgatgcgaattaataaaaacatttcatttccatgttta

SEQ ID NO: 158774 - DNA, 4302 bp, Homo sapiens
  Payload ID: 11065
  Gene Symbol: NBPF9
  Gene Name: neuroblastoma breakpoint family, member 9
  ENST ID: ENST00000621074
  CDS Start-End: 76-2679
aaagtgctgtgggagtgatcacatttttcacaacagtaagtccctggccccacctcttctgccacaaacgtcagcatggtggtatcagccggcccttggtccagcgagaaggcagagatgaacattctagaaatcaacgagaaattgcgcccccagttggcagagaacaaacagcagttcggaaacctcaaagagagatgttttctaactcaactggccggcttcctggccaaccgacagaagaaatacaagtatgaagagtgtaaagacctcataaaatttatgctgaggaatgagcgacagttcaaggaggagaagcttgcagagcagctgaagcaagctgaggagctcaggcaatataaagtcctggttcactctcaggaacgagagctgacgcagttaaaggagaagttacgggaagggagagatgcctcccgctcattgaatgagcatctccaggccctcctcactccggatgagccggacaagtcccaggggcaggacctccaagaacagctggctgaggggtgtagactggcacagcaccttgtccaaaagctcagcccagaaaatgacgaagatgaggatgaagatgttcaagttgaggaggatgagaaagtactggaatcatctgcccccagggaggtgcagaaggctgaagagagcaaagtcgctgaggactcactggaggaatgtgccatcacttgttcaaatagccacggcccttgtgactccaaccagcctcacaagaacatcaaaatcacatttgaggaagacgaagtcaactcaactctggttgtagacagagaatcctctcatgatgaatgtcaggatgctctaaacattctcccagtccctggccccacctcttctgccacaaacgtcagcatggtggtatcagccggccctttgtccagcgagaaggcagagatgaacattctagaaatcaatgagaaattgcgcccccagctggcagagaagaaacagcagttcagaaacctcaaagagaaatgttttctaactcaactggccggcttcctggccaaccagcagaacaaatacaagtatgaagagtgtaaagacctcataaaatttatgctgaggaatgagcgacagttcaaggaggagaagcttgcagagcagctgaagcaagctgaggagctcaggcaatataaagtcctggttcacgctcaggaacgagagctgacccagttaagggagaagttgcgggaagggagagatgcctcccgctcattgaatgagcatctccaggccctcctcactccggatgagccggacaagtcccaggggcaggacctccaagaacagctggctgaggggtgtagactggcacagcaccttgtccaaaagctcagcccagaaaatgacaacgatgacgatgaagatgttcaaattgaggtggctgagaaagtgcagaaatcgtctgcccccagggagatgcagaaggctgaagaaaaggaagtccctgaggactcactggaggaatgtgccatcacttattcaaatagccatggcccttatgactccaaccagccacataggaaaaccaaaatcacatttgaggaagacaaagtcgactcaactctcattggctcatcctctcatgttgaacgggaagatgctgtacacattattccagaaaatgaaagtgatgatgaggaagaggaagaaaaagggccagtgtctcccaggaatctgcaggagtctgaagaggaggaagtcccccaggagtcctgggatgaaggttattcgactccctcaattcctcctgaaatgttggcctcgtacaagtcttacagcagcacatttcactcattagaggaacagcaagtctgcatggctgttgacataggcagacatcggtgggatcaagtgaaaaaggaggaccaagaggcaacaggtcccaggctcagcagggagctgctggatgagaaagagcctgaagtcttgcaggactcactggatagatgttattcgactccttcaggttatcttgaactgcctgacttaggccagccctacagcagtgctgtttactcattggaggaacagtaccttggcttggctcttgacgtggacagaattaaaaaggaccaagaagaggaagaagaccaaggcccaccatgccccaggctcagcagggagctgctggaggtagtagagcctgaagtcttgcaggactcactggatagatgttattcaactccttccagttgtcttgaacagcctgactcctgccagccctatggaagttccttttatgcattggaggaaaaacatgttggcttttctcttgacgtgggagaaattgaaaagaaggggaaggggaagaaaagaaggggaagaagatcaaagaaggaaagaagaaggggaagaaaagaaggggaagaagatcaaaacccaccatgccccaggctcaacggcgtgctgatggaagtggaagagcctgaagtcttgcaggactcactggatggatgttattctactccgtcaatgtactttgaactacctgactcattccagcactacagaagtgtgttttactcatttgaggaacagcacatcagcttcgccctttacgtggacaataggttttttactttgacggtgacaagtctccacctggtgttccagatggaagtcatattcccacaataagcagcccttactaagccgagagatgtcattcctgcaggcaggacctataggcacgtgaagttttgaatgaaagtacagttccatttggaagcccagacataggatgggtcagtgggcatggctctattcctattctcaaaccatgccagtggcaacctgtgctcagtctgaagacaatggacccacgttaggtgtgacacgttcacataactgtgcagcacatgccgggagtgatcagtcagacattttaatttgaaccacgtatctctgggtagctacaaaattcctcagggatttcattttgcagacatgtctctgagcttctatacctgctcaaggtcattgtcatctttgtgtttagctcatccaaaggtgttaccctggtttcaatgaacctaacctcattcttcgtgtcttcagtgttggcttgttttagctgatccatctgtaacacaggagggatccttggctgaggattgtatttcagaaccaccaactgctcttgacaattgttaacccgctaggctcctttggttagagaagccacagtccttcagcctccaattggtgtcagtacttaggaagaccacagctagatggacaaacagcattgggaggccttagccctgctcctctcaattccatcctgtagagaacaggagtcaggagccgctggcaggagacagcatgtcacccaggactctgccggtgcagaatatgaacaatgccatgttcttgcagaaaacgcttagcctgagtttcataggaggtaatcaccagacaactgcagaatgtagaacactgagcaggacaactgacctgtctccttcacatagtccttatcaccacaaatcacacaacaaaaaggagaagagatattttgggttcaaaaaaagtaaaaagataatgtagctgcatttctttagttattttgaaccccaaatatttcctcatctttttgttgttgtcatggatggtggtgacatggacttgtttatagaggacaggtcagctgtctggctcaatgatctacattctgaagttgtctgaaaatgtcttcatgattaaattcagcctaaacgttttgccgggaacactgcagagacaatgctgtgagtttccaacctcagcccatctgcgggcagagaaggtctagtttgtccatcaccattatgatatcaggactggttacttggttaaggaggggtctaggagatctgtcccttttagagacaccttacttataatgaagtacttgggaaagcggttttcaagagtataaatatcctgtattctaatgatcatcctctaaacattttatcatttattaatcctccctgcctgtgtctattattatattcatatctctacgctggaaattttgggtctcaatttttactgtgcctttgtttttactagtgtctgctgttgcaaaaagaagaaaacattctctgcctgagttttaatttttgtccaaagttaattttaatctatacaattaaaaccttttgcctatcactctggacttttggattgttttttacattcagtgttataatatttgattatgctgattggttttggtgggtactgatgcgaattaataaaaacatttcatttcca

SEQ ID NO: 158775 - DNA, 2930 bp, Homo sapiens
  Payload ID: 11065
  Gene Symbol: NBPF9
  Gene Name: neuroblastoma breakpoint family, member 9
  ENST ID: ENST00000610300
  CDS Start-End: 76-2904
aaagtgctgtgggagtgatcacatttttcacaacagtaagtccctggccccacctcttctgccacaaacgtcagcatggtggtatcagccggcccttggtccagcgagaaggcagagatgaacattctagaaatcaacgagaaattgcgcccccagttggcagagaacaaacagcagttcggaaacctcaaagagagatgttttctaactcaactggccggcttcctggccaaccgacagaagaaatacaagtatgaagagtgtaaagacctcataaaatttatgctgaggaatgagcgacagttcaaggaggagaagcttgcagagcagctgaagcaagctgaggagctcaggcaatataaagtcctggttcactctcaggaacgagagctgacgcagttaaaggagaagttacgggaagggagagatgcctcccgctcattgaatgagcatctccaggccctcctcactccggatgagccggacaagtcccaggggcaggacctccaagaacagctggctgaggggtgtagactggcacagcaccttgtccaaaagctcagcccagaaaatgacgaagatgaggatgaagatgttcaagttgaggaggatgagaaagtactggaatcatctgcccccagggaggtgcagaaggctgaagagagcaaagtcgctgaggactcactggaggaatgtgccatcacttgttcaaatagccacggcccttgtgactccaaccagcctcacaagaacatcaaaatcacatttgaggaagacgaagtcaactcaactctggttgtagacagagaatcctctcatgatgaatgtcaggatgctctaaacattctcccagtccctggccccacctcttctgccacaaacgtcagcatggtggtatcagccggccctttgtccagcgagaaggcagagatgaacattctagaaatcaatgagaaattgcgcccccagctggcagagaagaaacagcagttcagaaacctcaaagagaaatgttttctaactcaactggccggcttcctggccaaccagcagaacaaatacaagtatgaagagtgtaaagacctcataaaatttatgctgaggaatgagcgacagttcaaggaggagaagcttgcagagcagctgaagcaagctgaggagctcaggcaatataaagtcctggttcacgctcaggaacgagagctgacccagttaagggagaagttgcgggaagggagagatgcctcccgctcattgaatgagcatctccaggccctcctcactccggatgagccggacaagtcccaggggcaggacctccaagaacagctggctgaggggtgtagactggcacagcaccttgtccaaaagctcagcccagaaaatgacaacgatgacgatgaagatgttcaaattgaggtggctgagaaagtgcagaaatcgtctgcccccagggagatgcagaaggctgaagaaaaggaagtccctgaggactcactggaggaatgtgccatcacttattcaaatagccatggcccttatgactccaaccagccacataggaaaaccaaaatcacatttgaggaagacaaagtcgactcaactctcattggctcatcctctcatgttgaacgggaagatgctgtacacattattccagaaaatgaaagtgatgatgaggaagaggaagaaaaagggccagtgtctcccaggaatctgcaggagtctgaagaggaggaagtcccccaggagtcctgggatgaaggttattcgactccctcaattcctcctgaaatgttggcctcgtacaagtcttacagcagcacatttcactcattagaggaacagcaagtctgcatggctgttgacataggcagacatcggtgggatcaagtgaaaaaggaggaccaagaggcaacaggtcccaggctcagcagggagctgctggatgagaaagggcctgaagtcttgcaggactcactggatagatgttattcaactccttcaggttgtcttgaactgactgactcatgccagccctacagaagtgccttttacgtattggagcaacagcgtgttggcttggctgttgacatggatgaaattgaaaagtaccaagaagtggaagaagaccaagacccatcatgccccaggctcagcagggagctgctggatgagaaagagcctgaagtcttgcaggactcactgggtagatggtattcgactccttcaggttatcttgaactgcctgacttaggccagccctacagcagtgctgtttactcattggaggaacagtaccttggcttggctcttgacttggacagaattaaaaaggaccaagaagaggaagaagaccaaggcccaccatgccccaggctcagcagggagctgctggaggtagtagagcctgaagtcttgcaggactcactggatagatgttattcaactccttccagttgtcttgaacagcctgactcctgccagccctatggaagttccttttatgcattggaggaaaaacatgttggcttttctcttgacgtgggagaaattgaaaagaaggggaaggggaagaaaagaaggggaagaagatcaaagaaggaaagaagaaggggaagaaaagaaggggaagaagatcaaaacccaccatgccccaggctcaacggcgtgctgatggaagtggaagagcctgaagtcttgcaggactcactggatggatgttattctactccgtcaatgtactttgaactacctgactcattccagcactacagaagtgtgttttactcatttgaggaacagcacatcagcttcgccctttacgtggacaataggttttttactttgacggtgacaagtctccacctggtgttccagatggaagtcatattcccacaataagcagcccttactaagccgagagatgt

SEQ ID NO: 158776 - DNA, 4624 bp, Homo sapiens
  Payload ID: 11065
  Gene Symbol: NBPF9
  Gene Name: neuroblastoma breakpoint family, member 9
  ENST ID: ENST00000613969
  CDS Start-End: 173-3001
aaagtgctgtgggagtgatcacatttttcacaacagtaaggtaagaatttcagttactgacatccctcagtcctgattaaacctatttgatttcaccagtttttaacccatcatatgtttgggtttcttctccccagtccctggccccacctcttctgccacaaacgtcagcatggtggtatcagccggcccttggtccagcgagaaggcagagatgaacattctagaaatcaacgagaaattgcgcccccagttggcagagaacaaacagcagttcggaaacctcaaagagagatgttttctaactcaactggccggcttcctggccaaccgacagaagaaatacaagtatgaagagtgtaaagacctcataaaatttatgctgaggaatgagcgacagttcaaggaggagaagcttgcagagcagctgaagcaagctgaggagctcaggcaatataaagtcctggttcactctcaggaacgagagctgacgcagttaaaggagaagttacgggaagggagagatgcctcccgctcattgaatgagcatctccaggccctcctcactccggatgagccggacaagtcccaggggcaggacctccaagaacagctggctgaggggtgtagactggcacagcaccttgtccaaaagctcagcccagaaaatgacgaagatgaggatgaagatgttcaagttgaggaggatgagaaagtactggaatcatctgcccccagggaggtgcagaaggctgaagagagcaaagtcgctgaggactcactggaggaatgtgccatcacttgttcaaatagccacggcccttgtgactccaaccagcctcacaagaacatcaaaatcacatttgaggaagacgaagtcaactcaactctggttgtagacagagaatcctctcatgatgaatgtcaggatgctctaaacattctcccagtccctggccccacctcttctgccacaaacgtcagcatggtggtatcagccggccctttgtccagcgagaaggcagagatgaacattctagaaatcaatgagaaattgcgcccccagctggcagagaagaaacagcagttcagaaacctcaaagagaaatgttttctaactcaactggccggcttcctggccaaccagcagaacaaatacaagtatgaagagtgtaaagacctcataaaatttatgctgaggaatgagcgacagttcaaggaggagaagcttgcagagcagctgaagcaagctgaggagctcaggcaatataaagtcctggttcacgctcaggaacgagagctgacccagttaagggagaagttgcgggaagggagagatgcctcccgctcattgaatgagcatctccaggccctcctcactccggatgagccggacaagtcccaggggcaggacctccaagaacagctggctgaggggtgtagactggcacagcaccttgtccaaaagctcagcccagaaaatgacaacgatgacgatgaagatgttcaaattgaggtggctgagaaagtgcagaaatcgtctgcccccagggagatgcagaaggctgaagaaaaggaagtccctgaggactcactggaggaatgtgccatcacttattcaaatagccatggcccttatgactccaaccagccacataggaaaaccaaaatcacatttgaggaagacaaagtcgactcaactctcattggctcatcctctcatgttgaacgggaagatgctgtacacattattccagaaaatgaaagtgatgatgaggaagaggaagaaaaagggccagtgtctcccaggaatctgcaggagtctgaagaggaggaagtcccccaggagtcctgggatgaaggttattcgactccctcaattcctcctgaaatgttggcctcgtacaagtcttacagcagcacatttcactcattagaggaacagcaagtctgcatggctgttgacataggcagacatcggtgggatcaagtgaaaaaggaggaccaagaggcaacaggtcccaggctcagcagggagctgctggatgagaaagggcctgaagtcttgcaggactcactggatagatgttattcaactccttcaggttgtcttgaactgactgactcatgccagccctacagaagtgccttttacgtattggagcaacagcgtgttggcttggctgttgacatggatgaaattgaaaagtaccaagaagtggaagaagaccaagacccatcatgccccaggctcagcagggagctgctggatgagaaagagcctgaagtcttgcaggactcactggatagatgttattcgactccttcaggttatcttgaactgcctgacttaggccagccctacagcagtgctgtttactcattggaggaacagtaccttggcttggctcttgacgtggacagaattaaaaaggaccaagaagaggaagaagaccaaggcccaccatgccccaggctcagcagggagctgctggaggtagtagagcctgaagtcttgcaggactcactggatagatgttattcaactccttccagttgtcttgaacagcctgactcctgccagccctatggaagttccttttatgcattggaggaaaaacatgttggcttttctcttgacgtgggagaaattgaaaagaaggggaaggggaagaaaagaaggggaagaagatcaaagaaggaaagaagaaggggaagaaaagaaggggaagaagatcaaaacccaccatgccccaggctcaacggcgtgctgatggaagtggaagagcctgaagtcttgcaggactcactggatggatgttattctactccgtcaatgtactttgaactacctgactcattccagcactacagaagtgtgttttactcatttgaggaacagcacatcagcttcgccctttacgtggacaataggttttttactttgacggtgacaagtctccacctggtgttccagatggaagtcatattcccacaataagcagcccttactaagccgagagatgtcattcctgcaggcaggacctataggcacgtgaagttttgaatgaaagtacagttccatttggaagcccagacataggatgggtcagtgggcatggctctattcctattctcaaaccatgccagtggcaacctgtgctcagtctgaagacaatggacccacgttaggtgtgacacgttcacataactgtgcagcacatgccgggagtgatcagtcagacattttaatttgaaccacgtatctctgggtagctacaaaattcctcagggatttcattttgcagacatgtctctgagcttctatacctgctcaaggtcattgtcatctttgtgtttagctcatccaaaggtgttaccctggtttcaatgaacctaacctcattcttcgtgtcttcagtgttggcttgttttagctgatccatctgtaacacaggagggatccttggctgaggattgtatttcagaaccaccaactgctcttgacaattgttaacccgctaggctcctttggttagagaagccacagtccttcagcctccaattggtgtcagtacttaggaagaccacagctagatggacaaacagcattgggaggccttagccctgctcctctcaattccatcctgtagagaacaggagtcaggagccgctggcaggagacagcatgtcacccaggactctgccggtgcagaatatgaacaatgccatgttcttgcagaaaacgcttagcctgagtttcataggaggtaatcaccagacaactgcagaatgtagaacactgagcaggacaactgacctgtctccttcacatagtccttatcaccacaaatcacacaacaaaaaggagaagagatattttgggttcaaaaaaagtaaaaagataatgtagctgcatttctttagttattttgaaccccaaatatttcctcatctttttgttgttgtcatggatggtggtgacatggacttgtttatagaggacaggtcagctgtctggctcaatgatctacattctgaagttgtctgaaaatgtcttcatgattaaattcagcctaaacgttttgccgggaacactgcagagacaatgctgtgagtttccaacctcagcccatctgcgggcagagaaggtctagtttgtccatcaccattatgatatcaggactggttacttggttaaggaggggtctaggagatctgtcccttttagagacaccttacttataatgaagtacttgggaaagcggttttcaagagtataaatatcctgtattctaatgatcatcctctaaacattttatcatttattaatcctccctgcctgtgtctattattatattcatatctctacgctggaaattttgggtctcaatttttactgtgcctttgtttttactagtgtctgctgttgcaaaaagaagaaaacattctctgcctgagttttaatttttgtccaaagttaattttaatctatacaattaaaaccttttgcctatcactctggacttttggattgttttttacattcagtgttataatatttgattatgctgattggttttggtgggtactgatgcgaattaataaaaacatttcatttcca

SEQ ID NO: 158777 - DNA, 5632 bp, Homo sapiens
  Payload ID: 11065
  Gene Symbol: NBPF9
  Gene Name: neuroblastoma breakpoint family, member 9
  ENST ID: ENST00000621645
  CDS Start-End: 1169-4114
gggctctcctgacgcgccgagcgggaccctgaggatccagctggccgcaggctatgggctgggcggcggttgagacagcggcgatattgggaggggtaggtgagcgtcgcgaggcagcgtgagcttctgagtgaacgcggtgcttttgggaacgcgggacgggcgacctgtggcgccaggagcgggccgaggcgcggcggcgcggctgccgtctggatgggaagttacggtttacagcgaagtccacccagcgtttccgaggctggtgatgggcaagccgggtgtaccaagtccaggatgcacatgaggagcgtttgtagccgtcactgaatcacctcatgactagcggggcaggcctctaattcaccgcaggatttccgatctcactctgttgcccaggctggagtgcagtggcacaatcacagctgaccacaaccttgacctcccaaggctcaggtgatcctcctgcctcagcccccaagtagctgggacctacaggcaatctgaaagcaaatcctgtttagatgcaggcgaaggttcctggtgacccaggctctcaccttaccgtcccttaccgtcctcctgagggtgtcctggagcttcagtgctgtgtgttcttggcctccatgctgggggtgccaccaattcccactgtccagggcttccagtggactctccgaggtactgatgtagaaacttccccattcggtgcaccaagagcaacctcacacggtgtgggccaaatgaagagctgccagatcccacagcccttgaagataaggatggtcaaacaaaataatatcatacctggagaaactcagatcttgctaagatttactggttgggaatccaaagttaatgccaagaagcagccgccagttgggatcaaatgtgagcctatggatcaaggaaatgagcaaacaggtggccatgaaacagatggtcatagaattggttcagtggttgtgagtgcagcaacccaagagtgtcttatctgaaataccaccaggaatgtctggacacagtagacaaagttttttcaactggacgccttaggatacatgcttccaaaaacaaagtagccaaaaagaaaccagagtcacagaatatcagagccaaaggaacatttggagtccctggccccacctcttctgccacaaacgtcagcatggtggtatcagccggcccttggtccagcgagaaggcagagatgaacattctagaaatcaacgagaaattgcgcccccagttggcagagaacaaacagcagttcggaaacctcaaagagagatgttttctaactcaactggccggcttcctggccaaccgacagaagaaatacaagtatgaagagtgtaaagacctcataaaatttatgctgaggaatgagcgacagttcaaggaggagaagcttgcagagcagctgaagcaagctgaggagctcaggcaatataaagtcctggttcactctcaggaacgagagctgacgcagttaaaggagaagttacgggaagggagagatgcctcccgctcattgaatgagcatctccaggccctcctcactccggatgagccggacaagtcccaggggcaggacctccaagaacagctggctgaggggtgtagactggcacagcaccttgtccaaaagctcagcccagaaaatgacgaagatgaggatgaagatgttcaagttgaggaggatgagaaagtactggaatcatctgcccccagggaggtgcagaaggctgaagagagcaaagtcgctgaggactcactggaggaatgtgccatcacttgttcaaatagccacggcccttgtgactccaaccagcctcacaagaacatcaaaatcacatttgaggaagacgaagtcaactcaactctggttgtagacagagaatcctctcatgatgaatgtcaggatgctctaaacattctcccagtccctggccccacctcttctgccacaaacgtcagcatggtggtatcagccggccctttgtccagcgagaaggcagagatgaacattctagaaatcaatgagaaattgcgcccccagctggcagagaagaaacagcagttcagaaacctcaaagagaaatgttttctaactcaactggccggcttcctggccaaccagcagaacaaatacaagtatgaagagtgtaaagacctcataaaatttatgctgaggaatgagcgacagttcaaggaggagaagcttgcagagcagctgaagcaagctgaggagctcaggcaatataaagtcctggttcacgctcaggaacgagagctgacccagttaagggagaagttgcgggaagggagagatgcctcccgctcattgaatgagcatctccaggccctcctcactccggatgagccggacaagtcccaggggcaggacctccaagaacagctggctgaggggtgtagactggcacagcaccttgtccaaaagctcagcccagaaaatgaaagtgatgatgaggaagaggaagaaaaagggccagtgtctcccaggaatctgcaggagtctgaagaggaggaagtcccccaggagtcctgggatgaaggacatcggtgggatcaagtgaaaaaggaggaccaagaggcaacaggtcccaggctcagcagggagctgctggatgagaaagggcctgaagtcttgcaggactcactggatagatgttattcaactccttcaggttgtcttgaactgactgactcatgccagccctacagaagtgccttttacgtattggagcaacagcgtgttggcttggctgttgacatggatgaaattgaaaagtaccaagaagtggaagaagaccaagacccatcatgccccaggctcagcagggagctgctggatgagaaagagcctgaagtcttgcaggactcactgggtagatggtattcgactccttcaggttatcttgaactgcctgacttaggccagccctacagcagtgctgtttactcattggaggaacagtaccttggcttggctcttgacttggacagaattaaaaaggaccaagaagaggaagaagaccaaggcccaccatgccccaggctcagcagggagctgctggaggtagtagagcctgaagtcttgcaggactcactggatagatgttattcaactccttccagttgtcttgaacagcctgactcctgccagccctatggaagttccttttatgcattggaggaaaaacatgttggcttttctcttgacgtgggagaaattgaaaagaaggggaaggggaagaaaagaaggggaagaagatcaaagaagaaaagaagaaggggaagaaaagaaggggaagaaaatcaaaacccaccatgccccaggctcagcagggagctgctggatgagaaagagcctgaagtcttgcaggactcactggatagatgttattcgactccttcaggttatcttgaactgcctgacttaggccagccctacagcagtgctgtttactcattggaggaacagtaccttggcttggctcttgacgtggacagaattaaaaaggaccaagaagaggaagaagaccaaggcccaccatgccccaggctcagcagggagctgctggaggtagtagagcctgaagtcttgcaggactcactggatagatgttattcaactccttccagttgtcttgaacagcctgactcctgccagccctatggaagttccttttatgcattggaggaaaaacatgttggcttttctcttgacgtgggagaaattgaaaagaaggggaaggggaagaaaagaaggggaagaagatcaaagaaggaaagaagaaggggaagaaaagaaggggaagaagatcaaaacccaccatgccccaggctcaacggcgtgctgatggaagtggaagagcctgaagtcttgcaggactcactggatggatgttattctactccgtcaatgtactttgaactacctgactcattccagcactacagaagtgtgttttactcatttgaggaacagcacatcagcttcgccctttacgtggacaataggttttttactttgacggtgacaagtctccacctggtgttccagatggaagtcatattcccacaataagcagcccttactaagccgagagatgtcattcctgcaggcaggacctataggcacgtgaagttttgaatgaaagtacagttccatttggaagcccagacataggatgggtcagtgggcatggctctattcctattctcaaaccatgccagtggcaacctgtgctcagtctgaagacaatggacccacgttaggtgtgacacgttcacataactgtgcagcacatgccgggagtgatcagtcagacattttaatttgaaccacgtatctctgggtagctacaaaattcctcagggatttcattttgcagacatgtctctgagcttctatacctgctcaaggtcattgtcatctttgtgtttagctcatccaaaggtgttaccctggtttcaatgaacctaacctcattcttcgtgtcttcagtgttggcttgttttagctgatccatctgtaacacaggagggatccttggctgaggattgtatttcagaaccaccaactgctcttgacaattgttaacccgctaggctcctttggttagagaagccacagtccttcagcctccaattggtgtcagtacttaggaagaccacagctagatggacaaacagcattgggaggccttagccctgctcctctcaattccatcctgtagagaacaggagtcaggagccgctggcaggagacagcatgtcacccaggactctgccggtgcagaatatgaacaatgccatgttcttgcagaaaacgcttagcctgagtttcataggaggtaatcaccagacaactgcagaatgtagaacactgagcaggacaactgacctgtctccttcacatagtccttatcaccacaaatcacacaacaaaaaggagaagagatattttgggttcaaaaaaagtaaaaagataatgtagctgcatttctttagttattttgaaccccaaatatttcctcatctttttgttgttgtcatggatggtggtgacatggacttgtttatagaggacaggtcagctgtctggctcaatgatctacattctgaagttgtctgaaaatgtcttcatgattaaattcagcctaaacgttttgccgggaacactgcagagacaatgctgtgagtttccaacctcagcccatctgcgggcagagaaggtctagtttgtccatcaccattatgatatcaggactggttacttggttaaggaggggtctaggagatctgtcccttttagagacaccttacttataatgaagtacttgggaaagcggttttcaagagtataaatatcctgtattctaatgatcatcctctaaacattttatcatttattaatcctccctgcctgtgtctattattatattcatatctctacgctggaaattttgggtctcaatttttactgtgcctttgtttttactagtgtctgctgttgcaaaaagaagaaaacattctctgcctgagttttaatttttgtccaaagttaattttaatctatacaattaaaaccttttgcctatca

SEQ ID NO: 158778 - DNA, 1915 bp, Homo sapiens
  Payload ID: 11065
  Gene Symbol: NBPF9
  Gene Name: neuroblastoma breakpoint family, member 9
  ENST ID: ENST00000483630
  CDS Start-End: 38-937
agtccctggccccacctcttctgccacaaacgtcagcatggtggtatcagccggccctttgtccagcgagaaggcagagatgaacattctagaaatcaatgagaaattgcgcccccagctggcagagaagaaacagcagttcagaaacctcaaagagaaatgttttctaactcaactggccggcttcctggccaaccagcagaacaaatacaagtatgaagagtgtaaagacctcataaaatttatgctgaggaatgagcgacagttcaaggaggagaagcttgcagagcagctgaagcaagctgaggagctcaggcaatataaagtcctggttcacgctcaggaacgagagctgacccagttaagggagaagttgcgggaagggagagatgcctcccgctcattgaatgagcatctccaggccctcctcactccggatgagccggacaagtcccaggggcaggacctccaagaacagctggctgaggggtgtagactggcacagcaccttgtccaaaagctcagcccagaaaatgacaacgatgacgatgaagatgttcaaattgaggtggctgagaaagtgcagaaatcgtctgcccccagggagatgcagaaggctgaagaaaaggaagtccctgaggactcactggaggaatgtgccatcacttattcaaatagccatggcccttatgactccaaccagccacataggaaaaccaaaatcacatttgaggaagacaaagtcgactcaactctcattggctcatcctctcatgttgaacgggaagatgctgtacacattattccagaaaatgaaagtgatgatgaggaagaggaagaaaaagggccagtgtctcccaggacatcggtgggatcaagtgaaaaaggaggaccaagaggcaacaggtcccaggctcagcagggagctgctggatgagaaagggcctgaagtcttgcaggactcactggatagatgttattcaactccttcaggttgtcttgaactgactgactcatgccagccctacagaagtgccttttacgtattggagcaacagcgtgttggcttggctgttgacatggatgaaattgaaaagtaccaagaagtggaagaagaccaagacccatcatgccccaggctcagcagggagctgctggatgagaaagagcctgaagtcttgcaggactcactggatagatgttattcgactccttcaggttatcttgaactgcctgacttaggccagccctacagcagtgctgtttactcattggaggaacagtaccttggcttggctcttgacgtggacagaattaaaaaggaccaagaagaggaagaagaccaaggcccaccatgccccaggctcagcagggagctgctggaggtagtagagcctgaagtcttgcaggactcactggatagatgttattcaactccttccagttgtcttgaacagcctgactcctgccagccctatggaagttccttttatgcattggaggaaaaacatgttggcttttctcttgacgtgggagaaattgaaaagaaggggaaggggaagaaaagaaggggaagaagatcaaagaaggaaagaagaaggggaagaaaagaaggggaagaagatcaaaacccaccatgccccaggctcaacggcgtgctgatggaagtggaagagcctgaagtcttgcaggactcactggatggatgttattctactccgtcaatgtactttgaactacctgactcattccagcactacagaagtgtgttttactcatttgaggaacagcacatcagcttcgccctttacgtggacaataggttttttactttgacggtgacaagtctccacctggtgttccagatggaagtcatattcccacaataagcagcccttactaagccgagagatgt

SEQ ID NO: 158779 - DNA, 4527 bp, Homo sapiens
  Payload ID: 11065
  Gene Symbol: NBPF9
  Gene Name: neuroblastoma breakpoint family, member 9
  ENST ID: ENST00000613595
  CDS Start-End: 76-2904
aaagtgctgtgggagtgatcacatttttcacaacagtaagtccctggccccacctcttctgccacaaacgtcagcatggtggtatcagccggcccttggtccagcgagaaggcagagatgaacattctagaaatcaacgagaaattgcgcccccagttggcagagaacaaacagcagttcggaaacctcaaagagagatgttttctaactcaactggccggcttcctggccaaccgacagaagaaatacaagtatgaagagtgtaaagacctcataaaatttatgctgaggaatgagcgacagttcaaggaggagaagcttgcagagcagctgaagcaagctgaggagctcaggcaatataaagtcctggttcactctcaggaacgagagctgacgcagttaaaggagaagttacgggaagggagagatgcctcccgctcattgaatgagcatctccaggccctcctcactccggatgagccggacaagtcccaggggcaggacctccaagaacagctggctgaggggtgtagactggcacagcaccttgtccaaaagctcagcccagaaaatgacgaagatgaggatgaagatgttcaagttgaggaggatgagaaagtactggaatcatctgcccccagggaggtgcagaaggctgaagagagcaaagtcgctgaggactcactggaggaatgtgccatcacttgttcaaatagccacggcccttgtgactccaaccagcctcacaagaacatcaaaatcacatttgaggaagacgaagtcaactcaactctggttgtagacagagaatcctctcatgatgaatgtcaggatgctctaaacattctcccagtccctggccccacctcttctgccacaaacgtcagcatggtggtatcagccggccctttgtccagcgagaaggcagagatgaacattctagaaatcaatgagaaattgcgcccccagctggcagagaagaaacagcagttcagaaacctcaaagagaaatgttttctaactcaactggccggcttcctggccaaccagcagaacaaatacaagtatgaagagtgtaaagacctcataaaatttatgctgaggaatgagcgacagttcaaggaggagaagcttgcagagcagctgaagcaagctgaggagctcaggcaatataaagtcctggttcacgctcaggaacgagagctgacccagttaagggagaagttgcgggaagggagagatgcctcccgctcattgaatgagcatctccaggccctcctcactccggatgagccggacaagtcccaggggcaggacctccaagaacagctggctgaggggtgtagactggcacagcaccttgtccaaaagctcagcccagaaaatgacaacgatgacgatgaagatgttcaaattgaggtggctgagaaagtgcagaaatcgtctgcccccagggagatgcagaaggctgaagaaaaggaagtccctgaggactcactggaggaatgtgccatcacttattcaaatagccatggcccttatgactccaaccagccacataggaaaaccaaaatcacatttgaggaagacaaagtcgactcaactctcattggctcatcctctcatgttgaacgggaagatgctgtacacattattccagaaaatgaaagtgatgatgaggaagaggaagaaaaagggccagtgtctcccaggaatctgcaggagtctgaagaggaggaagtcccccaggagtcctgggatgaaggttattcgactccctcaattcctcctgaaatgttggcctcgtacaagtcttacagcagcacatttcactcattagaggaacagcaagtctgcatggctgttgacataggcagacatcggtgggatcaagtgaaaaaggaggaccaagaggcaacaggtcccaggctcagcagggagctgctggatgagaaagggcctgaagtcttgcaggactcactggatagatgttattcaactccttcaggttgtcttgaactgactgactcatgccagccctacagaagtgccttttacgtattggagcaacagcgtgttggcttggctgttgacatggatgaaattgaaaagtaccaagaagtggaagaagaccaagacccatcatgccccaggctcagcagggagctgctggatgagaaagagcctgaagtcttgcaggactcactgggtagatggtattcgactccttcaggttatcttgaactgcctgacttaggccagccctacagcagtgctgtttactcattggaggaacagtaccttggcttggctcttgacttggacagaattaaaaaggaccaagaagaggaagaagaccaaggcccaccatgccccaggctcagcagggagctgctggaggtagtagagcctgaagtcttgcaggactcactggatagatgttattcaactccttccagttgtcttgaacagcctgactcctgccagccctatggaagttccttttatgcattggaggaaaaacatgttggcttttctcttgacgtgggagaaattgaaaagaaggggaaggggaagaaaagaaggggaagaagatcaaagaaggaaagaagaaggggaagaaaagaaggggaagaagatcaaaacccaccatgccccaggctcaacggcgtgctgatggaagtggaagagcctgaagtcttgcaggactcactggatggatgttattctactccgtcaatgtactttgaactacctgactcattccagcactacagaagtgtgttttactcatttgaggaacagcacatcagcttcgccctttacgtggacaataggttttttactttgacggtgacaagtctccacctggtgttccagatggaagtcatattcccacaataagcagcccttactaagccgagagatgtcattcctgcaggcaggacctataggcacgtgaagttttgaatgaaagtacagttccatttggaagcccagacataggatgggtcagtgggcatggctctattcctattctcaaaccatgccagtggcaacctgtgctcagtctgaagacaatggacccacgttaggtgtgacacgttcacataactgtgcagcacatgccgggagtgatcagtcagacattttaatttgaaccacgtatctctgggtagctacaaaattcctcagggatttcattttgcagacatgtctctgagcttctatacctgctcaaggtcattgtcatctttgtgtttagctcatccaaaggtgttaccctggtttcaatgaacctaacctcattcttcgtgtcttcagtgttggcttgttttagctgatccatctgtaacacaggagggatccttggctgaggattgtatttcagaaccaccaactgctcttgacaattgttaacccgctaggctcctttggttagagaagccacagtccttcagcctccaattggtgtcagtacttaggaagaccacagctagatggacaaacagcattgggaggccttagccctgctcctctcaattccatcctgtagagaacaggagtcaggagccgctggcaggagacagcatgtcacccaggactctgccggtgcagaatatgaacaatgccatgttcttgcagaaaacgcttagcctgagtttcataggaggtaatcaccagacaactgcagaatgtagaacactgagcaggacaactgacctgtctccttcacatagtccttatcaccacaaatcacacaacaaaaaggagaagagatattttgggttcaaaaaaagtaaaaagataatgtagctgcatttctttagttattttgaaccccaaatatttcctcatctttttgttgttgtcatggatggtggtgacatggacttgtttatagaggacaggtcagctgtctggctcaatgatctacattctgaagttgtctgaaaatgtcttcatgattaaattcagcctaaacgttttgccgggaacactgcagagacaatgctgtgagtttccaacctcagcccatctgcgggcagagaaggtctagtttgtccatcaccattatgatatcaggactggttacttggttaaggaggggtctaggagatctgtcccttttagagacaccttacttataatgaagtacttgggaaagcggttttcaagagtataaatatcctgtattctaatgatcatcctctaaacattttatcatttattaatcctccctgcctgtgtctattattatattcatatctctacgctggaaattttgggtctcaatttttactgtgcctttgtttttactagtgtctgctgttgcaaaaagaagaaaacattctctgcctgagttttaatttttgtccaaagttaattttaatctatacaattaaaaccttttgcctatcactctggacttttggattgttttttacattcagtgttataatatttgattatgctgattggttttggtgggtactgatgcgaattaataaaaacatttcatttcca

SEQ ID NO: 158780 - DNA, 4449 bp, Homo sapiens
  Payload ID: 11066
  Gene Symbol: NRAS
  Gene Name: neuroblastoma RAS viral (v-ras) oncogene homolog
  Uniprot ID: P01111
  ENST ID: ENST00000369535
  CDS Start-End: 255-824
gaaacgtcccgtgtgggaggggcgggtctgggtgcggcctgccgcatgactcgtggttcggaggcccacgtggccggggcggggactcaggcgcctggggcgccgactgattacgtagcgggcggggccggaagtgccgctccttggtgggggctgttcatggcggttccggggtctccaacatttttcccggctgtggtcctaaatctgtccaaagcagaggcagtggagcttgaggttcttgctggtgtgaaatgactgagtacaaactggtggtggttggagcaggtggtgttgggaaaagcgcactgacaatccagctaatccagaaccactttgtagatgaatatgatcccaccatagaggattcttacagaaaacaagtggttatagatggtgaaacctgtttgttggacatactggatacagctggacaagaagagtacagtgccatgagagaccaatacatgaggacaggcgaaggcttcctctgtgtatttgccatcaataatagcaagtcatttgcggatattaacctctacagggagcagattaagcgagtaaaagactcggatgatgtacctatggtgctagtgggaaacaagtgtgatttgccaacaaggacagttgatacaaaacaagcccacgaactggccaagagttacgggattccattcattgaaacctcagccaagaccagacagggtgttgaagatgctttttacacactggtaagagaaatacgccagtaccgaatgaaaaaactcaacagcagtgatgatgggactcagggttgtatgggattgccatgtgtggtgatgtaacaagatacttttaaagttttgtcagaaaagagccactttcaagctgcactgacaccctggtcctgacttccctggaggagaagtattcctgttgctgtcttcagtctcacagagaagctcctgctacttccccagctctcagtagtttagtacaataatctctatttgagaagttctcagaataactacctcctcacttggctgtctgaccagagaatgcacctcttgttactccctgttatttttctgccctgggttcttccacagcacaaacacacctctgccaccccaggtttttcatctgaaaagcagttcatgtctgaaacagagaaccaaaccgcaaacgtgaaattctattgaaaacagtgtcttgagctctaaagtagcaactgctggtgattttttttttctttttactgttgaacttagaactatgctaatttttggagaaatgtcataaattactgttttgccaagaatatagttattattgctgtttggtttgtttataatgttatcggctctattctctaaactggcatctgctctagattcataaatacaaaaatgaatactgaattttgagtctatcctagtcttcacaactttgacgtaattaaatccaactttcacagtgaagtgcctttttcctagaagtggtttgtagacttcctttataatatttcagtggaatagatgtctcaaaaatccttatgcatgaaatgaatgtctgagatacgtctgtgacttatctaccattgaaggaaagctatatctatttgagagcagatgccattttgtacatgtatgaaattggttttccagaggcctgttttggggctttcccaggagaaagatgaaactgaaagcacatgaataatttcacttaataatttttacctaatctccacttttttcataggttactacctatacaatgtatgtaatttgtttcccctagcttactgataaacctaatattcaatgaacttccatttgtattcaaatttgtgtcataccagaaagctctacatttgcagatgttcaaatattgtaaaactttggtgcattgttatttaatagctgtgatcagtgattttcaaacctcaaatatagtatattaacaaattacattttcactgtatatcatggtatcttaatgatgtatataattgccttcaatccccttctcaccccaccctctacagcttcccccacagcaataggggcttgattatttcagttgagtaaagcatggtgctaatggaccagggtcacagtttcaaaacttgaacaatccagttagcatcacagagaaagaaattcttctgcatttgctcattgcaccagtaactccagctagtaattttgctaggtagctgcagttagccctgcaaggaaagaagaggtcagttagcacaaaccctttaccatgactggaaaactcagtatcacgtatttaaacatttttttttcttttagccatgtagaaactctaaattaagccaatattctcatttgagaatgaggatgtctcagctgagaaacgttttaaattctctttattcataatgttctttgaagggtttaaaacaagatgttgataaatctaagctgatgagtttgctcaaaacaggaagttgaaattgttgagacaggaatggaaaatataattaattgatacctatgaggatttggaggcttggcattttaatttgcagataataccctggtaattctcatgaaaaatagacttggataacttttgataaaagactaattccaaaatggccactttgttcctgtctttaatatctaaatacttactgaggtcctccatcttctatattatgaattttcatttattaagcaaatgtcatattaccttgaaattcagaagagaagaaacatatactgtgtccagagtataatgaacctgcagagttgtgcttcttactgctaattctgggagctttcacagtactgtcatcatttgtaaatggaaattctgcttttctgtttctgctccttctggagcagtgctactctgtaattttcctgaggcttatcacctcagtcatttcttttttaaatgtctgtgactggcagtgattctttttcttaaaaatctattaaatttgatgtcaaattagggagaaagatagttactcatcttgggctcttgtgccaatagcccttgtatgtatgtacttagagttttccaagtatgttctaagcacagaagtttctaaatggggccaaaattcagacttgagtatgttctttgaataccttaagaagttacaattagccgggcatggtggcccgtgcctgtagtcccagctacttgagaggctgaggcaggagaatcacttcaacccaggaggtggaggttacagtgagcagagatcgtgccactgcactccagcctgggtgacaagagagacttgtctccaaaaaaaaagttacacctaggtgtgaattttggcacaaaggagtgacaaacttatagttaaaagctgaataacttcagtgtggtataaaacgtggtttttaggctatgtttgtgattgctgaaaagaattctagtttacctcaaaatccttctctttccccaaattaagtgcctggccagctgtcataaattacatattccttttggtttttttaaaggttacatgttcaagagtgaaaataagatgttctgtctgaaggctaccatgccggatctgtaaatgaacctgttaaatgctgtatttgctccaacggcttactatagaatgttacttaatacaatatcatacttattacaatttttactataggagtgtaataggtaaaattaatctctattttagtgggcccatgtttagtctttcaccatcctttaaactgctgtgaatttttttgtcatgacttgaaagcaaggatagagaaacactttagagatatgtggggtttttttaccattccagagcttgtgagcataatcatatttgctttatatttatagtcatgaactcctaagttggcagctacaaccaagaaccaaaaaatggtgcgttctgcttcttgtaattcatctctgctaataaattataagaagcaaggaaaattagggaaaatattttatttggatggtttctataaacaagggactataattcttgtacattatttttcatctttgctgtttctttgagcagtctaatgtgccacacaattatctaaggtatttgttttctataagaattgttttaaaagtattcttgttaccagagtagttgtattatatttcaaaacgtaagatgatttttaaaagcctgagtactgacctaagatggaattgtatgaactctgctctggagggaggggaggatgtccgtggaagttgtaagacttttatttttttgtgccatcaaatataggtaaaaataattgtgcaattctgctgtttaaacaggaactattggcctccttggccctaaatggaagggccgatattttaagttgattattttattgtaaattaatccaacctagttctttttaatttggttgaatgttttttcttgttaaatgatgtttaaaaaataaaaactggaagttcttggcttagtcataa

SEQ ID NO: 158781 - DNA, 3283 bp, Homo sapiens
  Payload ID: 11067
  Gene Symbol: NCALD
  Gene Name: neurocalcin delta
  Uniprot ID: P61601
  ENST ID: ENST00000220931
  CDS Start-End: 120-701
gtgagaatctggtggatgctggaccttgctgctgctgctactgctgtttccaggggctgcagagcatggactgttaaatcttgcacttcttctgagtgagctgaattcttgccgccaggatggggaaacagaacagcaagctgcgcccggaggtcatgcaggacttgctggaaagcacagactttacagagcatgagatccaggaatggtataaaggcttcttgagagactgccccagtggacatttgtcaatggaagagtttaagaaaatatatgggaactttttcccttatggggatgcttccaaatttgcagagcatgtcttccgcaccttcgatgcaaatggagatgggacaatagactttagagaattcatcatcgccttgagtgtaacttcgagggggaagctggagcagaagctgaaatgggccttcagcatgtacgacctggacggaaatggctatatcagcaaggcagagatgctagagatcgtgcaggcaatctataagatggtttcctctgtaatgaaaatgcctgaagatgagtcaaccccagagaaaagaacagaaaagatcttccgccagatggacaccaatagagacggaaaactctccctggaagagttcatccgaggagccaaaagcgacccgtccattgtgcgcctcctgcagtgcgacccgagcagtgccggccagttctgagccctgcgcccaccaatcgaattgtagagctgcttgtgttcccttttgattcttctttttaacaatttttttttttttttgccaaacaatatcaatggtgatgccgtcccctgtgcggtctgatgcgccttcctccgtgacgccttcagcttcttttgtcgtggatgcttcgtgggaatgcccagagccccagtgtgcttgtggagagcatggacagacttcgtggtgttcattgtttgatgatttttaatcgttactattatttttttttattctaatgtctctgttctaaaacgtaagactcgggggttggggcaaaagaagggaaacccatccagtcctgtgattctattgcaagcttcaaggggcttttgtttgaaagacaaaactccccacctgaatctgttgtcacacgtgccgtaggggtgatggatggcaccggatgctggattccccaagaacaagttaccctctggggtgaggctattccagcgagctgggacatttccccatgggggcccactcccctctcttccccagcaggctgtagtttctaagctgtgaacatttcaagataaattaacagaggagaggaaaaagatggctcagctattttttcacaggtttacactagttgagctaatatgcgtgtctttggaaattaaacacaaatggtaacatattccaaaaccagacccatcttgttgcctattgtgataaaataaaaagacggctgtatataacatattgggtaatgcagaccaaattaagtgttttgccttgtttaaatgaaatgcatgtttagtgagcactaatacaatcttattccagaagactgtttttagtagcttattgtgaagtaagacaactataatgaatgtctgtcttgtttggaagtcatatctgtctttgcacaaatgtaccaatcgacaagtatattttatatattccataaaaatacaaagtaaccctgactagggcccaactttaattttgaatgcatttccagagtggccatgcctagagggcagatgcagagcaggtggtagtgggacaggacaattggagcacaggaatgttaacatgtatgacaggggaccagtagggtggtttccctctcaggcccagcagcccattgacagcattagactggcggcatggtgcttttctgagcagatcaatactctgcagactcgaaaaaacatcacatacattcttggaacttcccagtggtttaatctatgtgcatggttagggagccaggtctggaatattcagtttccctgcccctgttaaagaatcagaggttgggcagtcatcaaattcatcataaagacatgggcaagtgtgtctgtggtttccaaggcccccctatggagaatccaaaagtattttccattgccgtgctctttgaatgcagacttctatttccagaagtgacagcacaagtctgagttgctgtttggtctggtgacctcagacacactaatttgaattgaaagctaagagtaaaaatttgctggttacaggcgagtcatactcttgcaagtagttagcaaagggaggcccaaattctcaaggttgttgatggggaacttgccactaagagaaggcagagaggtccctagtgggtatatttgctgccaagccacttgccaaagaagaggaaccacagaaagagagacatcatgaccaggagaaaaatgtgactagacatgctaacctccaggtttttatatatgacttgagtctgctgtaattggcagcagaaatccaaatttgtatggtagaccaaaaagaaccaaatccatagggtgaaattttgagacctagactctgtaaaaataatcctagtcttcctccaggggtcagttcctcacagtggttctgtaccaaaacttgccaaattcctccatggccaagtgttaaaatctgtgtttggaaaatagcgaattaacctaagacacagaaggcagactgggtgaggagacctagcatgccctattggcagtgctcaggagctgcatcccacttttccctgctctgaatcgaagtcctagttccttcctttgattctcctttggtaggtggaatcagttaatgttttgagaaacctgcctgggctctgcccttagtcatgacatctcgctgagccagacccactctgttccttggaacctagagctggagtgaggagtagaggtctccggctattccagaaagaaaagtgagccacatgcaggctgatgaatgccgacacttccagaatgtatagaaatagtccctgtcctggcctgccactgaccctgtctgtattttctcggaggttgtttttctccttctccttcccaggaaggtctttgtatgtcgaatccagtgcactcaagtttggccaagggactccacagcacccagaagactgcatgcctcaaggtttatgtcactcctctgctgggctgttcattgtcattgctgtgttcagggacctttggaaataaaacctgttctgtcccaaataaaaccagcctgtgatgttcaagggactggaataaagtggcttacgacctgaaggattctacaga

SEQ ID NO: 158782 - DNA, 3655 bp, Homo sapiens
  Payload ID: 11067
  Gene Symbol: NCALD
  Gene Name: neurocalcin delta
  Uniprot ID: P61601
  ENST ID: ENST00000311028
  CDS Start-End: 308-889
gacggtgctgtccagggggaggcgggcggagggaaggcgctgccgctgctgccgccgcctcgcccgaagcgacacagacgctgggagcggccgaggcgagtgatttcttctgacttgagcctgcagtgtgctgtgagagatctaccactagattatctcaactttggtctcctgggaccactcgttgctgacagtcagaaattgcaaggcatctgatctcctggtgttaaaatctgtcgtgataccgaggaaggccccgagatcccaggcactgagtgactgcatactctgaattcttgccgccaggatggggaaacagaacagcaagctgcgcccggaggtcatgcaggacttgctggaaagcacagactttacagagcatgagatccaggaatggtataaaggcttcttgagagactgccccagtggacatttgtcaatggaagagtttaagaaaatatatgggaactttttcccttatggggatgcttccaaatttgcagagcatgtcttccgcaccttcgatgcaaatggagatgggacaatagactttagagaattcatcatcgccttgagtgtaacttcgagggggaagctggagcagaagctgaaatgggccttcagcatgtacgacctggacggaaatggctatatcagcaaggcagagatgctagagatcgtgcaggcaatctataagatggtttcctctgtaatgaaaatgcctgaagatgagtcaaccccagagaaaagaacagaaaagatcttccgccagatggacaccaatagagacggaaaactctccctggaagagttcatccgaggagccaaaagcgacccgtccattgtgcgcctcctgcagtgcgacccgagcagtgccggccagttctgagccctgcgcccaccaatcgaattgtagagctgcttgtgttcccttttgattcttctttttaacaatttttttttttttttgccaaacaatatcaatggtgatgccgtcccctgtgcggtctgatgcgccttcctccgtgacgccttcagcttcttttgtcgtggatgcttcgtgggaatgcccagagccccagtgtgcttgtggagagcatggacagacttcgtggtgttcattgtttgatgatttttaatcgttactattatttttttttattctaatgtctctgttctaaaacgtaagactcgggggttggggcaaaagaagggaaacccatccagtcctgtgattctattgcaagcttcaaggggcttttgtttgaaagacaaaactccccacctgaatctgttgtcacacgtgccgtaggggtgatggatggcaccggatgctggattccccaagaacaagttaccctctggggtgaggctattccagcgagctgggacatttccccatgggggcccactcccctctcttccccagcaggctgtagtttctaagctgtgaacatttcaagataaattaacagaggagaggaaaaagatggctcagctattttttcacaggtttacactagttgagctaatatgcgtgtctttggaaattaaacacaaatggtaacatattccaaaaccagacccatcttgttgcctattgtgataaaataaaaagacggctgtatataacatattgggtaatgcagaccaaattaagtgttttgccttgtttaaatgaaatgcatgtttagtgagcactaatacaatcttattccagaagactgtttttagtagcttattgtgaagtaagacaactataatgaatgtctgtcttgtttggaagtcatatctgtctttgcacaaatgtaccaatcgacaagtatattttatatattccataaaaatacaaagtaaccctgactagggcccaactttaattttgaatgcatttccagagtggccatgcctagagggcagatgcagagcaggtggtagtgggacaggacaattggagcacaggaatgttaacatgtatgacaggggaccagtagggtggtttccctctcaggcccagcagcccattgacagcattagactggcggcatggtgcttttctgagcagatcaatactctgcagactcgaaaaaacatcacatacattcttggaacttcccagtggtttaatctatgtgcatggttagggagccaggtctggaatattcagtttccctgcccctgttaaagaatcagaggttgggcagtcatcaaattcatcataaagacatgggcaagtgtgtctgtggtttccaaggcccccctatggagaatccaaaagtattttccattgccgtgctctttgaatgcagacttctatttccagaagtgacagcacaagtctgagttgctgtttggtctggtgacctcagacacactaatttgaattgaaagctaagagtaaaaatttgctggttacaggcgagtcatactcttgcaagtagttagcaaagggaggcccaaattctcaaggttgttgatggggaacttgccactaagagaaggcagagaggtccctagtgggtatatttgctgccaagccacttgccaaagaagaggaaccacagaaagagagacatcatgaccaggagaaaaatgtgactagacatgctaacctccaggtttttatatatgacttgagtctgctgtaattggcagcagaaatccaaatttgtatggtagaccaaaaagaaccaaatccatagggtgaaattttgagacctagactctgtaaaaataatcctagtcttcctccaggggtcagttcctcacagtggttctgtaccaaaacttgccaaattcctccatggccaagtgttaaaatctgtgtttggaaaatagcgaattaacctaagacacagaaggcagactgggtgaggagacctagcatgccctattggcagtgctcaggagctgcatcccacttttccctgctctgaatcgaagtcctagttccttcctttgattctcctttggtaggtggaatcagttaatgttttgagaaacctgcctgggctctgcccttagtcatgacatctcgctgagccagacccactctgttccttggaacctagagctggagtgaggagtagaggtctccggctattccagaaagaaaagtgagccacatgcaggctgatgaatgccgacacttccagaatgtatagaaatagtccctgtcctggcctgccactgaccctgtctgtattttctcggaggttgtttttctccttctccttcccaggaaggtctttgtatgtcgaatccagtgcactcaagtttggccaagggactccacagcacccagaagactgcatgcctcaaggtttatgtcactcctctgctgggctgttcattgtcattgctgtgttcagggacctttggaaataaaacctgttctgtcccaaataaaaccagcctgtgatgttcaagggactggaataaagtggcttacgacctgaaggattctacagagtgctcaactgttcatacatcattcagagtgggagggagctgggggtgctgtcccatcccatctgtatgcccacggtggatttaataatatataatttataaatcatagcctatggagtggcccgtaaatcagttgactgtgtagctcttgcctggcattaaagcatgtttttggtttaacatg

SEQ ID NO: 158783 - DNA, 3808 bp, Homo sapiens
  Payload ID: 11067
  Gene Symbol: NCALD
  Gene Name: neurocalcin delta
  Uniprot ID: P61601
  ENST ID: ENST00000395923
  CDS Start-End: 461-1042
aggggccccttagatgtcttcctccggattttttgttaagcttttcctagacagtttacagaaggctttgggtagagaaagcactagttagacaaaagcagcccccctcccaccttgtgggcatgaagagtccagaggacaccacctgagaagcttttcaactgccttccaaggctcccttgaacttcactgcggtagagcagggaccccagaccccccctcaaatcgaagcttggaaggaggtgctctaggctgaatctgacctcccaggacccgaggaggcaagcagatggcaccccttggaaagtagcagtgcaggctggctagaggcctgggcgagtgatttcttctgacttgagcctgcagtgtgctgtgagagatctaccactagattatctcaactttggtctcctgggaccactcgttgctgacagtcagaaactgaattcttgccgccaggatggggaaacagaacagcaagctgcgcccggaggtcatgcaggacttgctggaaagcacagactttacagagcatgagatccaggaatggtataaaggcttcttgagagactgccccagtggacatttgtcaatggaagagtttaagaaaatatatgggaactttttcccttatggggatgcttccaaatttgcagagcatgtcttccgcaccttcgatgcaaatggagatgggacaatagactttagagaattcatcatcgccttgagtgtaacttcgagggggaagctggagcagaagctgaaatgggccttcagcatgtacgacctggacggaaatggctatatcagcaaggcagagatgctagagatcgtgcaggcaatctataagatggtttcctctgtaatgaaaatgcctgaagatgagtcaaccccagagaaaagaacagaaaagatcttccgccagatggacaccaatagagacggaaaactctccctggaagagttcatccgaggagccaaaagcgacccgtccattgtgcgcctcctgcagtgcgacccgagcagtgccggccagttctgagccctgcgcccaccaatcgaattgtagagctgcttgtgttcccttttgattcttctttttaacaatttttttttttttttgccaaacaatatcaatggtgatgccgtcccctgtgcggtctgatgcgccttcctccgtgacgccttcagcttcttttgtcgtggatgcttcgtgggaatgcccagagccccagtgtgcttgtggagagcatggacagacttcgtggtgttcattgtttgatgatttttaatcgttactattatttttttttattctaatgtctctgttctaaaacgtaagactcgggggttggggcaaaagaagggaaacccatccagtcctgtgattctattgcaagcttcaaggggcttttgtttgaaagacaaaactccccacctgaatctgttgtcacacgtgccgtaggggtgatggatggcaccggatgctggattccccaagaacaagttaccctctggggtgaggctattccagcgagctgggacatttccccatgggggcccactcccctctcttccccagcaggctgtagtttctaagctgtgaacatttcaagataaattaacagaggagaggaaaaagatggctcagctattttttcacaggtttacactagttgagctaatatgcgtgtctttggaaattaaacacaaatggtaacatattccaaaaccagacccatcttgttgcctattgtgataaaataaaaagacggctgtatataacatattgggtaatgcagaccaaattaagtgttttgccttgtttaaatgaaatgcatgtttagtgagcactaatacaatcttattccagaagactgtttttagtagcttattgtgaagtaagacaactataatgaatgtctgtcttgtttggaagtcatatctgtctttgcacaaatgtaccaatcgacaagtatattttatatattccataaaaatacaaagtaaccctgactagggcccaactttaattttgaatgcatttccagagtggccatgcctagagggcagatgcagagcaggtggtagtgggacaggacaattggagcacaggaatgttaacatgtatgacaggggaccagtagggtggtttccctctcaggcccagcagcccattgacagcattagactggcggcatggtgcttttctgagcagatcaatactctgcagactcgaaaaaacatcacatacattcttggaacttcccagtggtttaatctatgtgcatggttagggagccaggtctggaatattcagtttccctgcccctgttaaagaatcagaggttgggcagtcatcaaattcatcataaagacatgggcaagtgtgtctgtggtttccaaggcccccctatggagaatccaaaagtattttccattgccgtgctctttgaatgcagacttctatttccagaagtgacagcacaagtctgagttgctgtttggtctggtgacctcagacacactaatttgaattgaaagctaagagtaaaaatttgctggttacaggcgagtcatactcttgcaagtagttagcaaagggaggcccaaattctcaaggttgttgatggggaacttgccactaagagaaggcagagaggtccctagtgggtatatttgctgccaagccacttgccaaagaagaggaaccacagaaagagagacatcatgaccaggagaaaaatgtgactagacatgctaacctccaggtttttatatatgacttgagtctgctgtaattggcagcagaaatccaaatttgtatggtagaccaaaaagaaccaaatccatagggtgaaattttgagacctagactctgtaaaaataatcctagtcttcctccaggggtcagttcctcacagtggttctgtaccaaaacttgccaaattcctccatggccaagtgttaaaatctgtgtttggaaaatagcgaattaacctaagacacagaaggcagactgggtgaggagacctagcatgccctattggcagtgctcaggagctgcatcccacttttccctgctctgaatcgaagtcctagttccttcctttgattctcctttggtaggtggaatcagttaatgttttgagaaacctgcctgggctctgcccttagtcatgacatctcgctgagccagacccactctgttccttggaacctagagctggagtgaggagtagaggtctccggctattccagaaagaaaagtgagccacatgcaggctgatgaatgccgacacttccagaatgtatagaaatagtccctgtcctggcctgccactgaccctgtctgtattttctcggaggttgtttttctccttctccttcccaggaaggtctttgtatgtcgaatccagtgcactcaagtttggccaagggactccacagcacccagaagactgcatgcctcaaggtttatgtcactcctctgctgggctgttcattgtcattgctgtgttcagggacctttggaaataaaacctgttctgtcccaaataaaaccagcctgtgatgttcaagggactggaataaagtggcttacgacctgaaggattctacagagtgctcaactgttcatacatcattcagagtgggagggagctgggggtgctgtcccatcccatctgtatgcccacggtggatttaataatatataatttataaatcatagcctatggagtggcccgtaaatcagttgactgtgtagctcttgcctggcattaaagcatgtttttggtttaacatg

SEQ ID NO: 158784 - DNA, 548 bp, Homo sapiens
  Payload ID: 11067
  Gene Symbol: NCALD
  Gene Name: neurocalcin delta
  ENST ID: ENST00000518661
  CDS Start-End: 327-548
aatttgtattttatgtatattaacagatctataaatacatctattagatgtatttagactttttaattattcttcctagttcctgataagctaagacaatacttttatttttgacagagtgatttcttctgacttgagcctgcagtgtgctgtgagagatctaccactagattatctcaactttggtctcctgggaccactcgttgctgacagtcagaaattgcaaggcatctgatctcctggtgttaaaatctgtcgtgataccgaggaaggccccgagatcccaggcactgagtgactgcatactctgaattcttgccgccaggatggggaaacagaacagcaagctgcgcccggaggtcatgcaggacttgctggaaagcacagactttacagagcatgagatccaggaatggtataaaggcttcttgagagactgccccagtggacatttgtcaatggaagagtttaagaaaatatatgggaactttttcccttatggggatgcttccaaatttgcagagcatgtcttccgcaccttcgatgca

SEQ ID NO: 158785 - DNA, 2289 bp, Homo sapiens
  Payload ID: 11067
  Gene Symbol: NCALD
  Gene Name: neurocalcin delta
  Uniprot ID: P61601
  ENST ID: ENST00000521599
  CDS Start-End: 294-875
gggggaggcgggcggagggaaggcgctgccgctgctgccgccgcctcgcccgaagcgacacagacgctgggagcggccgaggcgagatcctatcattattttaaaattcctcctcctccacgaagtccttcctgattccttcaaagaaatatcactcctccgaattcccagagtgatttcttctgacttgagcctgcagtgtgctgtgagagatctaccactagattatctcaactttggtctcctgggaccactcgttgctgacagtcagaaactgaattcttgccgccaggatggggaaacagaacagcaagctgcgcccggaggtcatgcaggacttgctggaaagcacagactttacagagcatgagatccaggaatggtataaaggcttcttgagagactgccccagtggacatttgtcaatggaagagtttaagaaaatatatgggaactttttcccttatggggatgcttccaaatttgcagagcatgtcttccgcaccttcgatgcaaatggagatgggacaatagactttagagaattcatcatcgccttgagtgtaacttcgagggggaagctggagcagaagctgaaatgggccttcagcatgtacgacctggacggaaatggctatatcagcaaggcagagatgctagagatcgtgcaggcaatctataagatggtttcctctgtaatgaaaatgcctgaagatgagtcaaccccagagaaaagaacagaaaagatcttccgccagatggacaccaatagagacggaaaactctccctggaagagttcatccgaggagccaaaagcgacccgtccattgtgcgcctcctgcagtgcgacccgagcagtgccggccagttctgagccctgcgcccaccaatcgaattgtagagctgcttgtgttcccttttgattcttctttttaacaatttttttttttttttgccaaacaatatcaatggtgatgccgtcccctgtgcggtctgatgcgccttcctccgtgacgccttcagcttcttttgtcgtggatgcttcgtgggaatgcccagagccccagtgtgcttgtggagagcatggacagacttcgtggtgttcattgtttgatgatttttaatcgttactattatttttttttattctaatgtctctgttctaaaacgtaagactcgggggttggggcaaaagaagggaaacccatccagtcctgtgattctattgcaagcttcaaggggcttttgtttgaaagacaaaactccccacctgaatctgttgtcacacgtgccgtaggggtgatggatggcaccggatgctggattccccaagaacaagttaccctctggggtgaggctattccagcgagctgggacatttccccatgggggcccactcccctctcttccccagcaggctgtagtttctaagctgtgaacatttcaagataaattaacagaggagaggaaaaagatggctcagctattttttcacaggtttacactagttgagctaatatgcgtgtctttggaaattaaacacaaatggtaacatattccaaaaccagacccatcttgttgcctattgtgataaaataaaaagacggctgtatataacatattgggtaatgcagaccaaattaagtgttttgccttgtttaaatgaaatgcatgtttagtgagcactaatacaatcttattccagaagactgtttttagtagcttattgtgaagtaagacaactataatgaatgtctgtcttgtttggaagtcatatctgtctttgcacaaatgtaccaatcgacaagtatattttatatattccataaaaatacaaagtaaccctgactagggcccaactttaattttgaatgcatttccagagtggccatgcctagagggcagatgcagagcaggtggtagtgggacaggacaattggagcacaggaatgttaacatgtatgacaggggaccagtagggtggtttccctctcaggcccagcagcccattgacagcattagactggcggcatggtgcttttctgagcagatcaatactctgcagactcgaaaaaacatcacatacattcttggaacttcccagtggtttaatctatgtgcatggttagggagccaggtctggaatattcagtttccctgcccctgttaaagaatcagaggttgggcagtcatcaaattcatcataaagacatgggcaagtgtgtctgtggtttccaaggcccccctatggagaatccaaaagtattttccattgccgtgctctttga

SEQ ID NO: 158786 - DNA, 549 bp, Homo sapiens
  Payload ID: 11067
  Gene Symbol: NCALD
  Gene Name: neurocalcin delta
  ENST ID: ENST00000523923
  CDS Start-End: 306-549
gacacagacgctgggagcggccgaggcgagtgatttcttctgacttgagcctgcagtgtgctgtgagagatctaccactagattatctcaactttggtctcctgggaccactcgttgctgacagtcagaaactgctctatgaatggacgctgccccagtacagcgaggacctgctgcaaaatgcatttcttagtcttcaatacttattcctccttgtaactggatttctgaagaaaaagaactctgaaatgaaattgaggatttgaacttcacacagctgtttgaactgaattcttgccgccaggatggggaaacagaacagcaagctgcgcccggaggtcatgcaggacttgctggaaagcacagactttacagagcatgagatccaggaatggtataaaggcttcttgagagactgccccagtggacatttgtcaatggaagagtttaagaaaatatatgggaactttttcccttatggggatgcttccaaatttgcagagcatgtcttccgcaccttcgatgcaaatggagatgggacaatagact

SEQ ID NO: 158787 - DNA, 583 bp, Homo sapiens
  Payload ID: 11067
  Gene Symbol: NCALD
  Gene Name: neurocalcin delta
  ENST ID: ENST00000517822
  CDS Start-End: 249-583
acacagacgctgggagcggccgaggcgagtgatttcttctgacttgagcctgcagtgtgctgtgagagatctaccactagattatctcaactttggtctcctgggaccactcgttgctgacagtcagaaactgctctatgaatggacgctgccccagtacagcgaggacctgctgcaaaatgcatttcttagtcttcaatacttattcctccttgtaactggatttctgctgaattcttgccgccaggatggggaaacagaacagcaagctgcgcccggaggtcatgcaggacttgctggaaagcacagactttacagagcatgagatccaggaatggtataaaggcttcttgagagactgccccagtggacatttgtcaatggaagagtttaagaaaatatatgggaactttttcccttatggggatgcttccaaatttgcagagcatgtcttccgcaccttcgatgcaaatggagatgggacaatagactttagagaattcatcatcgccttgagtgtaacttcgagggggaagctggagcagaagctgaaatgggccttcagcatgtacgacctggacgg

SEQ ID NO: 158788 - DNA, 562 bp, Homo sapiens
  Payload ID: 11067
  Gene Symbol: NCALD
  Gene Name: neurocalcin delta
  ENST ID: ENST00000522252
  CDS Start-End: 226-562
acacagtcaaaggcttgtgagaatctggtggatgctggaccttgctgctgctgctactgctgtttccaggggctgcagagcatggactgttaaatcttgcacttcttctgagtgagggagaaaagggaatttttaaaaggagaatgaaagtgtccttgtctctagaactgaagcaacttggaggaatgagtggagtctttgtttagctgaattcttgccgccaggatggggaaacagaacagcaagctgcgcccggaggtcatgcaggacttgctggaaagcacagactttacagagcatgagatccaggaatggtataaaggcttcttgagagactgccccagtggacatttgtcaatggaagagtttaagaaaatatatgggaactttttcccttatggggatgcttccaaatttgcagagcatgtcttccgcaccttcgatgcaaatggagatgggacaatagactttagagaattcatcatcgccttgagtgtaacttcgagggggaagctggagcagaagctgaaatgggccttcagcatgtacgacctggacggaa

SEQ ID NO: 158789 - DNA, 1315 bp, Homo sapiens
  Payload ID: 11067
  Gene Symbol: NCALD
  Gene Name: neurocalcin delta
  ENST ID: ENST00000522951
  CDS Start-End: 136-720
acacagtcaaaggcttgtgagaatctggtggatgctggaccttgctgctgctgctactgctgtttccaggggctgcagagcatggactgttaaatcttgcacttcttctgagtgagctgaattcttgccgccaggatggggaaacagaacagcaagctgcgcccggaggtcatgcaggacttgctggaaagcacagactttacagagcatgagatccaggaatggtataaaggcttcttgagagactgccccagtggacatttgtcaatggaagagtttaagaaaatatatgggaactttttcccttatggggatgcttccaaatttgcagagcatgtcttccgcaccttcgatgcaaatggagatgggacaatagactttagagaattcatcatcgccttgagtgtaacttcgagggggaagctggagcagaagctgaaatgggccttcagcatgtacgacctggacggaaatggctatatcagcaaggcagagatgctagagatcgtgcaggcaatctataagatggtttcctctgtaatgaaaatgcctgaagatgagtcaaccccagagaaaagaacagaaaagatcttccgccagatggacaccaatagagacgcttcttttgtcgtggatgcttcgtgggaatgcccagagccccagtgtgcttgtggagagcatggacagacttcgtggtgttcattgtttgatgatttttaatcgttactattatttttttttattctaatgtctctgttctaaaacgtaagactcgggggttggggcaaaagaagggaaacccatccagtcctgtgattctattgcaagcttcaaggggcttttgtttgaaagacaaaactccccacctgaatctgttgtcacacgtgccgtaggggtgatggatggcaccggatgctggattccccaagaacaagttaccctctggggtgaggctattccagcgagctgggacatttccccatgggggcccactcccctctcttccccagcaggctgtagtttctaagctgtgaacatttcaagataaattaacagaggagaggaaaaagatggctcagctattttttcacaggtttacactagttgagctaatatgcgtgtctttggaaattaaacacaaatggtaacatattccaaaaccagacccatcttgttgcctattgtgataaaataaaaagacggctgtatataacatattgggtaatgcagaccaaattaagtgttttgccttgtttaaatgaaatgcatgtttagtgagcactaatacaatcttattccagaagactgtttttag

SEQ ID NO: 158790 - DNA, 540 bp, Homo sapiens
  Payload ID: 11067
  Gene Symbol: NCALD
  Gene Name: neurocalcin delta
  ENST ID: ENST00000522078
  CDS Start-End: 498-540
acagtttacagaaggctttgggtagagaaagcactagttagacaaaagcagcccccctcccaccttgtgggcatgaagagtccagaggacaccacctgagaagcttttcaactgccttccaaggctcccttgaacttcactgcggtagagcagggaccccagaccccccctcaaatcgaagcttggaaggaggtgctctaggctgaatctgacctcccaggacccgaggaggcaagcagatggcaccccttggaaagtagcagtgcaggctggctagaggcctgggcgagtgatttcttctgacttgagcctgcagtgtgctgtgagagatctaccactagattatctcaactttggtctcctgggaccactcgttgctgacagtcagaaattgcaaggcatctgatctcctggtgttaaaatctgtcgtgataccgaggaaggccccgagatcccaggcactgagtgactgcatactctgaattcttgccgccaggatggggaaacagaacagcaagctgcgcccggaggtcatgcagg

SEQ ID NO: 158791 - DNA, 629 bp, Homo sapiens
  Payload ID: 11067
  Gene Symbol: NCALD
  Gene Name: neurocalcin delta
  ENST ID: ENST00000517531
  CDS Start-End: 315-629
actttgcagagggccgcgcagaggcgcgtggggccggcgggatggggcgcgctgggcagaagggggcgttggtgagcctggcggcccggggacctctggagcatcccgccccgggggccggggccggggccgggggccggggcacccgctggatcccgggcctgcggagtctgcccggaaaggccacaggagagtgatttcttctgacttgagcctgcagtgtgctgtgagagatctaccactagattatctcaactttggtctcctgggaccactcgttgctgacagtcagaaactgaattcttgccgccaggatggggaaacagaacagcaagctgcgcccggaggtcatgcaggacttgctggaaagcacagactttacagagcatgagatccaggaatggtataaaggcttcttgagagactgccccagtggacatttgtcaatggaagagtttaagaaaatatatgggaactttttcccttatggggatgcttccaaatttgcagagcatgtcttccgcaccttcgatgcaaatggagatgggacaatagactttagagaattcatcatcgccttgagtgtaacttcgagggggaagctggagcagaagctgaaatgggccttc

SEQ ID NO: 158792 - DNA, 548 bp, Homo sapiens
  Payload ID: 11067
  Gene Symbol: NCALD
  Gene Name: neurocalcin delta
  ENST ID: ENST00000520690
  CDS Start-End: 140-548
acacactgaagtttgagaagcactgcctttgcagctatggcaaacttctggaacacgaagaaataaagctattatctcaactttggtctcctgggaccactcgttgctgacagtcagaaactgaattcttgccgccaggatggggaaacagaacagcaagctgcgcccggaggtcatgcaggacttgctggaaagcacagactttacagagcatgagatccaggaatggtataaaggcttcttgagagactgccccagtggacatttgtcaatggaagagtttaagaaaatatatgggaactttttcccttatggggatgcttccaaatttgcagagcatgtcttccgcaccttcgatgcaaatggagatgggacaatagactttagagaattcatcatcgccttgagtgtaacttcgagggggaagctggagcagaagctgaaatgggccttcagcatgtacgacctggacggaaatggctatatcagcaaggcagagatgctagagatcgtgcaggcaatctataagatggtttcctctgtaatga

SEQ ID NO: 158793 - DNA, 585 bp, Homo sapiens
  Payload ID: 11067
  Gene Symbol: NCALD
  Gene Name: neurocalcin delta
  ENST ID: ENST00000522206
  CDS Start-End: 429-585
aaaagcagcccccctcccaccttgtgggcatgaagagtccagaggacaccacctgagaagcttttcaactgccttccaaggctcccttgaacttcactgcggtagagcagggaccccagaccccccctcaaatcgaagcttggaaggaggtgctctaggctgaatctgacctcccaggacccgaggagagtctggctctctcacccacgctggagtgcagtggtgccatattggctcactgcagcctccatctcctgggttcaagcaattctggtgcctcagcctcctgagtagctgggattacagagtgatttcttctgacttgagcctgcagtgtgctgtgagagatctaccactagattatctcaactttggtctcctgggaccactcgttgctgacagtcagaaactgaattcttgccgccaggatggggaaacagaacagcaagctgcgcccggaggtcatgcaggacttgctggaaagcacagactttacagagcatgagatccaggaatggtataaaggcttcttgagagactgccccagtggacatttgtcaatggaagagtttaagaaaatatatg

SEQ ID NO: 158794 - DNA, 543 bp, Homo sapiens
  Payload ID: 11067
  Gene Symbol: NCALD
  Gene Name: neurocalcin delta
  ENST ID: ENST00000523645
  CDS Start-End: 535-543
gatgctggaccttgctgctgctgctactgctgtttccaggggctgcagagcatggactgttaaatcttgcacttcttctgagtgagaagaaaaagaactctgaaatgaaattgaggatttgaacttcacacagctgtttgaaggagaaaagggaatttttaaaaggagaatgaaagtgtccttgtctctagaactgaagcaacttggaggaatgagtggagtctttgtttagtgagtgagttctcatgagatctgatggttttgtaaggggcttttaccccttttgctcagcacttctccttcctgccatcatgtgaagaagggcatgtttgcttccccttctaccatgattctctctttctttaaatgagatatggtggtgcgtaatgatcgaagcagagacttggagtctggtgtgcctgtattcaaatctgactgcaccacttactgtctgccagatcttggataaattatttaatctccctaaacctcagtgtcctcatctgtgaagtgagctgaattcttgccgccaggatggggaaa

SEQ ID NO: 158795 - DNA, 583 bp, Homo sapiens
  Payload ID: 11067
  Gene Symbol: NCALD
  Gene Name: neurocalcin delta
  ENST ID: ENST00000522448
  CDS Start-End: 128-583
aaaggcttgtgagaatctggtggatgctggaccttgctgctgctgctactgctgtttccaggggctgcagagcatggactgttaaatcttgcacttcttctgagtgagctgaattcttgccgccaggatggggaaacagaacagcaagctgcgcccggaggtcatgcaggacttgctggaaagcacagactttacagagcatgagatccaggaatggtataaaggcttcttgagagactgccccagtggacatttgtcaatggaagagtttaagaaaatatatgggaactttttcccttatggggatgcttccaaatttgcagagcatgtcttccgcaccttcgatgcaaatggagatgggacaatagactttagagaattcatcatcgccttgagtgtaacttcgagggggaagctggagcagaagctgaaatgggccttcagcatgtacgacctggacggaaatggctatatcagcaaggcagagatgctagagatcgtgcaggagaggaaaaagatggctcagctattttttcacaggtttacactagttgagctaatatgcgtgtctttggaaattaaa

SEQ ID NO: 158796 - DNA, 553 bp, Homo sapiens
  Payload ID: 11067
  Gene Symbol: NCALD
  Gene Name: neurocalcin delta
  ENST ID: ENST00000524209
  CDS Start-End: 238-553
acagacgctgggagcggccgaggcgagtgatttcttctgacttgagcctgcagtgtgctgtgagagatctaccactagattatctcaactttggtctcctgggaccactcgttgctgacagtcagaaaggagaaaagggaatttttaaaaggagaatgaaagtgtccttgtctctagaactgaagcaacttggaggaatgagtggagtctttgtttagctgaattcttgccgccaggatggggaaacagaacagcaagctgcgcccggaggtcatgcaggacttgctggaaagcacagactttacagagcatgagatccaggaatggtataaaggcttcttgagagactgccccagtggacatttgtcaatggaagagtttaagaaaatatatgggaactttttcccttatggggatgcttccaaatttgcagagcatgtcttccgcaccttcgatgcaaatggagatgggacaatagactttagagaattcatcatcgccttgagtgtaacttcgagggggaagctggagcagaagctgaaatgggccttca

SEQ ID NO: 158797 - DNA, 570 bp, Homo sapiens
  Payload ID: 11067
  Gene Symbol: NCALD
  Gene Name: neurocalcin delta
  ENST ID: ENST00000518166
  CDS Start-End: 221-570
gacggtgctgtccagggggaggcgggcggagggaaggcgctgccgctgctgccgccgcctcgcccgaagcgacacagacgctgggagcggccgaggcgagtgatttcttctgacttgagcctgcagtgtgctgtgagagatctaccactagattatctcaactttggtctcctgggaccactcgttgctgacagtcagaaactgaattcttgccgccaggatggggaaacagaacagcaagctgcgcccggaggtcatgcaggacttgctggaaagcacagactttacagagcatgagatccaggaatggtataaaggcttcttgagagactgccccagtggacatttgtcaatggaagagtttaagaaaatatatgggaactttttcccttatggggatgcttccaaatttgcagagcatgtcttccgcaccttcgatgcaaatggagatgggacaatagactttagagaattcatcatcgccttgagtgtaacttcgagggggaagctggagcagaagctgaaatgggccttcagcatgtacgacctggacggaaatggctatatcag

SEQ ID NO: 158798 - DNA, 565 bp, Homo sapiens
  Payload ID: 11067
  Gene Symbol: NCALD
  Gene Name: neurocalcin delta
  ENST ID: ENST00000521964
  CDS Start-End: 305-565
ggtgctgtccagggggaggcgggcggagggaaggcgctgccgctgctgccgccgcctcgcccgaagcgacacagacgctgggagcggccgaggcgagtgatttcttctgacttgagcctgcagtgtgctgtgagagatctaccactagattatctcaactttggtctcctgggaccactcgttgctgacagtcagaaattgcaaggcatctgatctcctggtgttaaaatctgtcgtgataccgaggaaggccccgagatcccaggcactgagtgactgcatactctgaattcttgccgccaggatggggaaacagaacagcaagctgcgcccggaggtcatgcaggacttgctggaaagcacagactttacagagcatgagatccaggaatggtataaaggcttcttgagagactgccccagtggacatttgtcaatggaagagtttaagaaaatatatgggaactttttcccttatggggatgcttccaaatttgcagagcatgtcttccgcaccttcgatgcaaatggagatgggacaatagactttagagaattcatcatc

SEQ ID NO: 158799 - DNA, 488 bp, Homo sapiens
  Payload ID: 11067
  Gene Symbol: NCALD
  Gene Name: neurocalcin delta
  ENST ID: ENST00000520346
  CDS Start-End: 256-488
agaatctggtggatgctggaccttgctgctgctgctactgctgtttccaggggctgcagagcatggactgttaaatcttgcacttcttctgagtgaggaagacgaagcaaccccagtggagactctgcctcaagggcctgactgtgtagcaggagggagacagaaacaaaccccagaatgcgtgaaatcgcaaagaagattggcaatcattaaaatggggatatgctgtctttcagctgaattcttgccgccaggatggggaaacagaacagcaagctgcgcccggaggtcatgcaggacttgctggaaagcacagactttacagagcatgagatccaggaatggtataaaggcttcttgagagactgccccagtggacatttgtcaatggaagagtttaagaaaatatatgggaactttttcccttatggggatgcttccaaatttgcagagcatgtcttccgcaccttcgatgcaaatggagatgg

SEQ ID NO: 158800 - DNA, 1805 bp, Homo sapiens
  Payload ID: 11067
  Gene Symbol: NCALD
  Gene Name: neurocalcin delta
  Uniprot ID: P61601
  ENST ID: ENST00000519508
  CDS Start-End: 20-601
ctgaattcttgccgccaggatggggaaacagaacagcaagctgcgcccggaggtcatgcaggacttgctggaaagcacagactttacagagcatgagatccaggaatggtataaaggcttcttgagagactgccccagtggacatttgtcaatggaagagtttaagaaaatatatgggaactttttcccttatggggatgcttccaaatttgcagagcatgtcttccgcaccttcgatgcaaatggagatgggacaatagactttagagaattcatcatcgccttgagtgtaacttcgagggggaagctggagcagaagctgaaatgggccttcagcatgtacgacctggacggaaatggctatatcagcaaggcagagatgctagagatcgtgcaggcaatctataagatggtttcctctgtaatgaaaatgcctgaagatgagtcaaccccagagaaaagaacagaaaagatcttccgccagatggacaccaatagagacggaaaactctccctggaagagttcatccgaggagccaaaagcgacccgtccattgtgcgcctcctgcagtgcgacccgagcagtgccggccagttctgagccctgcgcccaccaatcgaattgtagagctgcttgtgttcccttttgattcttctttttaacaatttttttttttttttgccaaacaatatcaatggtgatgccgtcccctgtgcggtctgatgcgccttcctccgtgacgccttcagcttcttttgtcgtggatgcttcgtgggaatgcccagagccccagtgtgcttgtggagagcatggacagacttcgtggtgttcattgtttgatgatttttaatcgttactattatttttttttattctaatgtctctgttctaaaacgtaagactcgggggttggggcaaaagaagggaaacccatccagtcctgtgattctattgcaagcttcaaggggcttttgtttgaaagacaaaactccccacctgaatctgttgtcacacgtgccgtaggggtgatggatggcaccggatgctggattccccaagaacaagttaccctctggggtgaggctattccagcgagctgggacatttccccatgggggcccactcccctctcttccccagcaggctgtagtttctaagctgtgaacatttcaagataaattaacagaggagaggaaaaagatggctcagctattttttcacaggtttacactagttgagctaatatgcgtgtctttggaaattaaacacaaatggtaacatattccaaaaccagacccatcttgttgcctattgtgataaaataaaaagacggctgtatataacatattgggtaatgcagaccaaattaagtgttttgccttgtttaaatgaaatgcatgtttagtgagcactaatacaatcttattccagaagactgtttttagtagcttattgtgaagtaagacaactataatgaatgtctgtcttgtttggaagtcatatctgtctttgcacaaatgtaccaatcgacaagtatattttatatattccataaaaatacaaagtaaccctgactagggcccaactttaattttgaatgcatttccagagtggccatgcctagagggcagatgcagagcaggtggtagtgggacaggacaattggagcacaggaatgttaacatgtatgacaggggaccagtagggtggtttccctctcaggcccagcagcccattgacagcattagactggcggcatggtgcttttctgagcagatcaatactctgcagactcgaaaaaaca

SEQ ID NO: 158801 - DNA, 538 bp, Homo sapiens
  Payload ID: 11067
  Gene Symbol: NCALD
  Gene Name: neurocalcin delta
  ENST ID: ENST00000519098
  CDS Start-End: 282-538
acacagtcaaaggcttgtgagaatctggtggatgctggaccttgctgctgctgctactgctgtttccaggggctgcagagcatggactgttaaatcttgcacttcttctgagtgagaagaaaaagaactctgaaatgaaattgaggatttgaacttcacacagctgtttgaaggagaaaagggaatttttaaaaggagaatgaaagtgtccttgtctctagaactgaagcaacttggaggaatgagtggagtctttgtttagctgaattcttgccgccaggatggggaaacagaacagcaagctgcgcccggaggtcatgcaggacttgctggaaagcacagactttacagagcatgagatccaggaatggtataaaggcttcttgagagactgccccagtggacatttgtcaatggaagagtttaagaaaatatatgggaactttttcccttatggggatgcttccaaatttgcagagcatgtcttccgcaccttcgatgcaaatggagatgggacaatagactttagagaattcat

SEQ ID NO: 158802 - DNA, 552 bp, Homo sapiens
  Payload ID: 11067
  Gene Symbol: NCALD
  Gene Name: neurocalcin delta
  ENST ID: ENST00000524137
  CDS Start-End: 506-552
ataattcagcgttgatggcaaaatctcaatgatgaagtttatcactaaaagaaaacaacctatgctgtgaaagcagagatgctctagaatctacaggtcttttcctatgggaaaataagagaaaaaaagactgtcatcagaatcattttacagcattgagactatgttgatttcaaggtcatgtttgttgcagcttcaaaagatgctggcaaggaacgagaagaaaaagaactctgaaatgaaattgaggatttgaacttcacacagctgtttgaaggagaaaagggaatttttaaaaggagaatgaaagtgtccttgtctctagaactgaagcaacttggaggaatgagtggagtctttgtttagtgagtgagttctcatgagatctgatggttttgtaaggggcttttaccccttttgctcagcacttctccttcctgccatcatgtgaagaagggcatgtttgcttccccttctaccatgattctgaattcttgccgccaggatggggaaacagaacagcaagctgcgcccggaggtcatgcaggactt

SEQ ID NO: 158803 - DNA, 574 bp, Homo sapiens
  Payload ID: 11067
  Gene Symbol: NCALD
  Gene Name: neurocalcin delta
  ENST ID: ENST00000518727
  CDS Start-End: 210-574
tgactttgcaagatggctgactgaacaaaagacacagaaatgcctggtcctgctaattcctgagccatttggggattatgcaacgtaaatctggttgcttcttggctttccggctaccgccttaggattcatattttcagattatctcaactttggtctcctgggaccactcgttgctgacagtcagaaactgaattcttgccgccaggatggggaaacagaacagcaagctgcgcccggaggtcatgcaggacttgctggaaagcacagactttacagagcatgagatccaggaatggtataaaggcttcttgagagactgccccagtggacatttgtcaatggaagagtttaagaaaatatatgggaactttttcccttatggggatgcttccaaatttgcagagcatgtcttccgcaccttcgatgcaaatggagatgggacaatagactttagagaattcatcatcgccttgagtgtaacttcgagggggaagctggagcagaagctgaaatgggccttcagcatgtacgacctggacggaaatggctatatcagcaaggcagagatgct

SEQ ID NO: 158804 - DNA, 580 bp, Homo sapiens
  Payload ID: 11067
  Gene Symbol: NCALD
  Gene Name: neurocalcin delta
  ENST ID: ENST00000520425
  CDS Start-End: 221-580
agatgacagctgcaagtgttgagtgctgtacgagtttaaatggagagcgggattgctggcagctgcggtgggcagggattttctcctttttaaaattgagatcaggtttgaacatgactttgcaagatggctgactgaacaaaagacacagattatctcaactttggtctcctgggaccactcgttgctgacagtcagaaactgaattcttgccgccaggatggggaaacagaacagcaagctgcgcccggaggtcatgcaggacttgctggaaagcacagactttacagagcatgagatccaggaatggtataaaggcttcttgagagactgccccagtggacatttgtcaatggaagagtttaagaaaatatatgggaactttttcccttatggggatgcttccaaatttgcagagcatgtcttccgcaccttcgatgcaaatggagatgggacaatagactttagagaattcatcatcgccttgagtgtaacttcgagggggaagctggagcagaagctgaaatgggccttcagcatgtacgacctggacggaaatggctatatcagcaaggcagag

SEQ ID NO: 158805 - DNA, 6387 bp, Homo sapiens
  Payload ID: 11068
  Gene Symbol: NCAN
  Gene Name: neurocan
  Uniprot ID: O14594
  ENST ID: ENST00000252575
  CDS Start-End: 100-4065
ggggctggacccggcgcggagctggctgagtcggagcgcagcgtcctttgtgcccggcggccgccccgggatgcgtccgagctaggagccagatccaggatgggggccccgtttgtctgggccttgggccttttgatgctgcagatgctgctctttgtggctggggaacagggcacacaggatatcaccgatgccagcgaaagggggctccacatgcagaagctggggtctgggtcagtgcaggctgcgctggcggagctggtggccctgccctgtctctttaccctgcagccacggccaagcgcagcccgagatgcccctcggataaagtggaccaaggtgcggactgcgtcgggccagcgacaggacttgcccatcctggtggccaaggacaatgtcgtgagggtggccaaaagctggcagggacgagtgtcactgccttcctacccccggcgccgagccaacgccacgctacttctggggccactgagggccagtgactctgggctgtaccgctgccaggtggtgaggggcatcgaggatgagcaggacctggtgcccttggaggtgacaggtgttgtgttccactaccgatcagcccgggaccgctatgcactgaccttcgctgaggcccaggaggcctgccgtctcagctcagccatcattgcagcccctcggcatctacaggctgcctttgaggatggctttgacaactgtgatgctggctggctctctgaccgcactgttcggtatcctatcacccagtcccgtcctggttgctatggcgaccgtagcagccttccaggggttcggagctatgggaggcgcaacccacaggaactctacgatgtgtattgctttgcccgggagctggggggcgaggtcttctacgtgggcccggcccgccgcctgacactggccggcgcgcgtgcacagtgccgccgccagggtgccgcgctggcctcggtgggacagctgcacctggcctggcatgagggcctggaccagtgcgacccgggctggctggccgacggcagcgtgcgctacccgatccagacgccgcgccggcgctgcgggggcccagccccgggcgtgcgcaccgtctaccgcttcgctaaccggaccggcttcccctcacccgccgagcgcttcgacgcctactgcttccgagctcatcaccccacgtcacaacatggagacctagagaccccatcctctggggatgagggggagattctgtcagcagaggggcccccagttagagaactggagcccaccctggaggaggaagaggtggtcacccctgacttccaggagcctctggtgtccagtggggaagaagaaaccctgattttggaggagaagcaggagtctcaacagaccctcagccctacccctggggaccccatgctggcctcatggcccactggggaagtgtggctaagcacggtggcccccagccctagcgacatgggggcaggcactgcagcaagttcacacacggaggtggccccaactgaccctatgcctaggagaagggggcgcttcaaagggttgaatgggcgctacttccagcagcaggaaccggagccggggctgcaaggggggatggaggccagcgcccagccccccacctcagaggctgcagtgaaccaaatggagcctccgttggccatggcagtcacagagatgttgggcagtggccagagccggagcccctgggctgatctgaccaatgaggtggatatgcctggagctggttctgctggtggcaagagctccccagagccctggctgtggccccctaccatggtcccacccagcatctcaggccacagcagggcccctgtcctggagctagagaaagccgagggccccagtgccaggccagccaccccagacctgttttggtcccccttggaggccactgtctcagctcccagccctgccccctgggaggcattccctgtggccacctccccagatctccctatgatggccatgctgcgtggtcccaaagagtggatgctaccacaccccacccccatctccaccgaggccaatagagttgaggcacatggtgaggccaccgccacggctccaccctcccctgctgcagagaccaaggtgtattccctgcctctctctttgaccccaacaggacagggtggagaggccatgcccacaacacctgagtcccccagggcagacttcagagaaactggggagaccagccctgctcaggtcaacaaagctgagcactccagctccagcccatggccttctgtaaacaggaatgtggctgtaggttttgtccccactgagactgccactgagccaacgggcctcaggggtatcccggggtctgagtctggggtcttcgacacagcagaaagccccacttctggcttgcaggccactgtagatgaggtgcaggacccctggccctcagtgtacagcaaagggctggatgcaagttccccatctgcccccctggggagccctggagtcttcttggtacccaaagtcaccccaaatttggagccttgggttgctacagatgaaggacccactgtgaatcccatggattccacagtcacgccggcccccagtgatgctagtggaatttgggaacctggatcccaggtgtttgaagaagccgaaagcaccaccttgagccctcaggtggccctggatacaagcattgtgacgcccctcacgaccctggagcagggggacaaggttggagttccagccatgtctacactgggctcctcaagctcccaaccccacccagagccagaggatcaggtggagacccagggaacatcaggagcttcagtgcctccgcatcagagcagtcccctagggaaaccggctgttcctcctgggacaccgactgcagccagtgtgggcgagtctgcctcagtttcctcaggggagcctacggtaccgtgggacccctccagcaccctgctgcctgtcaccctgggcatagaggacttcgaactggaggtcctggcagggagcccgggtgtagagagcttctgggaggaggtggcaagtggagaggagccagccctgccagggacccctatgaatgcaggtgcggaggaggtgcactcagatccctgtgagaacaacccttgtcttcatggagggacatgtaatgccaatggcaccatgtatggctgtagctgtgatcagggcttcgccggggagaactgtgagattgacattgatgactgcctctgcagcccctgtgagaatggaggcacctgtattgatgaggtcaatggctttgtctgcctttgcctccccagctatgggggcagcttttgtgagaaagacaccgagggctgtgaccgcggctggcataagttccagggccactgttaccgctattttgcccaccggagggcatgggaagatgccgagaaggactgccgccgccgctccggccacctgaccagcgtccactcaccggaggaacacagcttcattaatagctttgggcatgaaaacacgtggatcggcctgaacgacaggatcgtggagagagatttccagtggacggacaacaccgggctgcaatttgagaactggcgagagaaccagccggacaatttcttcgcgggtggcgaggactgtgtggtgatggtggcgcatgaaagcgggcgctggaacgatgtcccctgcaactacaacctaccctatgtctgcaagaagggcacagtgctctgtggtccccctccggcagtggagaatgcctcactcatcggtgcccgcaaggccaagtacaatgtccatgccactgtaaggtaccagtgcaatgaaggatttgcccagcaccatgtggccaccattcgatgccggagcaatggcaagtgggacaggccccaaattgtctgcaccaaacccagacgttcacatcggatgcggcgacaccaccaccaccaccaacaccaccaccagcatcaccaccacaaatcccgcaaggagcgcagaaaacacaagaaacacccaacggaggactgggagaaggacgaagggaatttctgctgaagaaccagaaaaaagaaagcacaacacctttcccatgcctcctctggagccttcgcctggggagacagaacccagagagaaacaagagagtccagaagtccctgaaccccaaaccacatcccccacacacataatcctttgtacaaagctcctcttttccctttttttacatacacaagatcctcttggcaggtggagccaggtgtctgaaaagttcattctcgtctggctgaactctgggagtgtgtcccagctgagggaagcacaagtagcaaagctcattggtctggtctcttgtttgccaggctgattgaagcaggccttgatgagggtgcatgagtgtatgtttgcattcacatgaaggaattgcttttcacaccagaaattcagacttagtcaatgttggctgaattcctaaatccaggaagaagcctggacgtagggtcattagctttgggaatagaaggctacacagaagcacactgtttttgaacttgacaacagctctccctttaccctggacttcagcccaagttccgtctttggtcttggtggataaacacacagtgtggagatcccacgtactgcattttagggatgtttttaggacaacctccctccatgccttcagagttaggagtgagaatgatcaaagcaatatgtaggtgatggagggagagtgtattgctaacccttccaggtctagtccagcgctgagatttggtggttctgcatgtgtgatgaatctctttcacacaaatagacgagaggatatttagggctagatgagcccagatttcttccccctccatctctcagggagacaaagaacctccttcctggaccaaggaggtgctgccaagttttctagcccagtgcacatacccagtccttaagcagacattggtagtgcccctgccctgggtcccactcctgccccaccccacccttgtccctggccattgcctggtggtctagaaacacttaaaacttgaagtagtgacacctacctgcggtcatattgtagagagatgctcagtgttaaaactgaaacacacaaacacacacacacacacatttttctcttgtagattttaattttttaagtgggaaagaactcaccttgccttcctcccccaaatgtgcaacctgtaaaaggtctctccacaccaggggccaggatccagttccctcatctctggcaggaaagatccacagcttttcctccatgtctgttactcactttcagcagtccgggtaaaatctgtggatcagggttaaaaaagcaccgtggagaatggccctcttcaggaaagaaaaataagcaaatgaatggtccacctaggggttcagtaaagaaagaaatgtgttaactgagcctgaatcccttctgggaagtaataatgaccattgacaactaagaagtagacaccatgctaaagacttacatacaatctccttgaatcttctcaatagcccattgacttagaaactgttactttcccattttacacacagtgaaactgaggctcagatataaaggaaaggtactggcttgaagtcacaaccacgacaggagtaaggatttggaataaggatttggtcctgttttctggaccaaatccttactctggctctgcttacactttctctccatcaccaaatccttactccaaatccagaagtcagagccaactcccatcttggttctgacccaaatcctgctctggactctggagaggagattgaaatataattgcaccctcatacacatttaggaaatggttaagaagtgtaaactgaacccttatccttgtcttcaatcttcctccctgtagacatctatcttattatggttattattcagaaaacccagggatacaggtttgtcttcttactttgataactcttcttagtttaaaataataataataacacatctttggtcatctatgtcacacaaaaattttcctttgtttgcggggggctggggatgcagtgttttttggggggtcttggtttatgctccctgcccttgagcccctcagccgtttgccctgcccccacctcggctccatggtgggagggggctctggtcttttctaaagtgggcggtttgtcttttgatctttcccttttggatgtgcgtgtgtgtctgcgtgtgccatgtgcgtggcacgcatatgagtgtgtgtgcgtgtgaacggctttgggtcctgctggttttgctgtgagctgcagtgttctgtgggtctgtggtatctgacactgtggacattaatgtacttcttggacattttaataaattttttaacagttcaa

SEQ ID NO: 158806 - DNA, 545 bp, Homo sapiens
  Payload ID: 11068
  Gene Symbol: NCAN
  Gene Name: neurocan
  ENST ID: ENST00000588231
  CDS Start-End: 1-527
agggctgtgaccgcggctggcataagttccagggccactgttaccgctattttgcccaccggagggcatgggaagatgccgagaaggactgccgccgccgctccggccacctgaccagcgtccactcaccggaggaacacagcttcattaatagctttgggcatgaaaacacgtggatcggcctgaacgacaggatcgtggagagagatttccagtggacggacaacaccgggctgcaatttgagaactggcgagagaaccagccggacaatttcttcgcgggtggcgaggactgtgtggtgatggtggcgcatgaaagcgggcgctggaacgatgtcccctgcaactacaacctaccctatgtctgcaagaagggcacagccagacgttcacatcggatgcggcgacaccaccaccaccaccaacaccaccaccagcatcaccaccacaaatcccgcaaggagcgcagaaaacacaagaaacacccaacggaggactgggagaaggacgaagggaatttctgctgaagaaccagaaaaaagaaa

SEQ ID NO: 158807 - DNA, 3433 bp, Homo sapiens
  Payload ID: 11069
  Gene Symbol: NCDN
  Gene Name: neurochondrin
  Uniprot ID: Q9UBB6
  ENST ID: ENST00000356090
  CDS Start-End: 128-2317
agccaggagtgggcaacgcggcgtgagcagcggcccgaggctcccggagcatcgcgctgggagaagacttcgccgctcggggccgcagcctgtgtgatctcatcgccgccctgtcgtgacttcatcaatgtcgtgttgtgacctggctgcggcgggacagttgggcaaggcgagcatcatggcctcggattgcgagccagctctgaaccaggcagagggccgaaaccccaccctggagcgctacctgggagccctccgtgaggccaagaatgacagcgagcagtttgcagccctgctgctagtgaccaaggcagtcaaagcaggtgacatagatgccaaaactcggcggcggatcttcgatgctgtcggcttcaccttccccaatcgtctcctgaccaccaaggaggcgccggatggctgccctgaccatgttctgcgggctttgggtgtggccctgctggcctgcttctgcagtgaccctgaactggccgcccatccccaagtcctgaacaagattcccattcttagcaccttcctcacagcccggggggacccggacgatgctgcccgccgctccatgattgatgacacctaccagtgcctgacggctgtagcaggcacacccagagggcctcggcacctcattgctggtggcaccgtgtctgccctatgccaggcatacctggggcacggctatggctttgaccaggccctggcactcctggtggggctgctggctgctgccgagacacagtgctggaaggaggcggagcccgacctgctggccgtgttgcggggcctcagtgaggatttccagaaagctgaggatgccagcaagtttgagctctgccagctgctgcccctctttttgcccccgacaaccgtgccccctgaatgctaccgggatctgcaggccgggctggcacgcatcctgggaagcaagctgagctcctggcagcgcaaccctgcactgaagctggcagcccgcctggcacacgcctgcggctccgactggatcccggcgggcagctccgggagcaagttcctggccctgctggtgaatctggcgtgcgtggaagtgcggctggcactggaggagacgggcacggaggtgaaagaggatgtggtgaccgcctgctatgccctcatggagttggggatccaggaatgcactcgctgtgagcagtcactgcttaaggagccacagaaggtgcagctcgtgagcgtcatgaaggaggccataggggctgttatccactacctgctgcaggtggggtcagagaagcagaaggagccctttgtgtttgcctcggtgcggatcctgggtgcctggctggccgaggagacctcatccttgcgtaaggaggtgtgccagctgctgcccttcctcgtccgctatgccaagaccctctacgaggaggccgaggaggccaatgacctttcccagcaggtggccaacctggccatctcccccaccaccccagggcccacctggccaggagacgctctccggctcctcctgcctggctggtgccacctgaccgttgaagatgggccccgggagatcctgatcaaggaaggggccccctcgcttctgtgcaagtatttcctgcagcagtgggaactcacatcccctggccacgacacctcggtgctgcctgacagcgtggagattggcctgcagacctgctgccacatcttcctcaacctcgtggtcaccgcaccggggctgatcaagcgtgacgcctgcttcacatctctaatgaacaccctcatgacgtcgctaccagcactagtgcagcaacagggaaggctgcttctggctgctaatgtggccaccctggggctcctcatggcccggctccttagcacctctccagctcttcagggaacaccagcatcccgagggttcttcgcagctgccatcctcttcctatcacagtcccacgtggcgcgggccaccccgggctcagaccaggcagtgctagccctgtcccctgagtatgagggcatctgggccgacctgcaggagctctggttcctgggcatgcaggccttcaccggctgtgtgcctctgctgccctggctggcccccgctgccctgcgctcccgctggccgcaggagctgctccagctgctaggcagtgtcagccccaactctgtcaagcccgagatggtggccgcctatcagggtgtcctggtggagctggcgcgggccaaccggctgtgccgggaggccatgaggctgcaggcgggcgaggagacggccagccactaccgcatggctgccttggagcagtgcctgtcagagccctgaggggtgtccaccggggacagacccaggggcgggcagagagggaaggagggaggaggcatcttccctgaagcccccaatctggcccccccctccccagacttcctccccaaaacaccccagctttctggcttttctgagggcaagggcatggtgcccacccctcaagtgtaaggaactgcgttccgcccctcaggcccccatgggggcagggatcggcttggaaatcaacgtggttgtccccgccaggccggggaaggttggagcagcccccagggaggggggcactaggtgtcattgtgcccgatgtctggctcccctgcaggagggaggctccagggtaagacagggctggcaggagcagactgcctcagcccatgtgccctgccggccagggcgtgggctcccctcggctgtggtgcctcctctggccccccaggtccacgtcctttaaattggccctttggctcttgcccttggctcccttgggcagacagcaggcttaggccattgatatcgcagttcttcctatcagcttcagtgacccagggtctgaactgcctccatcctagggcaacctggggcagacaggcctggtggggggtggggaaacctccttccacctgagcttgcttgaagggacccagagtctttgggcccagatctttaaacctttgtgtcgtgttgcagcagagtgacgatgggggttggggggttatttattttgcctgtccttatccctgcttggacacctgagcatctgattcctgtccccctggtgccatctggcctggctggagccaggaacaggagggacacttccccagaatccgcatgtttccccagtgattacactccactgccaccgtggtgcctggctttaactcccacccctgctatgactcctctctgcagagacgcgactggcggctccagcagggactacctttcttataaacccagggggaccacacacacacacacacacacacacacacacacacacacacacacacacactcttgatcccttgcttccctcccccagtgcgttctgtgatcgccaagttcaaagctgtgcacatgtggacactcaataaatgttcattggtgacgagaa

SEQ ID NO: 158808 - DNA, 3683 bp, Homo sapiens
  Payload ID: 11069
  Gene Symbol: NCDN
  Gene Name: neurochondrin
  Uniprot ID: Q9UBB6
  ENST ID: ENST00000373243
  CDS Start-End: 384-2573
cgcggcgtgagcagcggcccgaggctcccggagcatcgcgctgggagaagacttcgccgctcggggccgcagcctggtgagctcagcccccttcgggccctcccctgcatcccagccggggcctctccgagccggcgctgatcgatgccgacacaccccggggaccctatcgcgactccatcgcgccatatcgcgacaccatcgtgccctgtcgagactccattttgtcacagcccttttcaatatatatcttttttttttttaatttgccctgtcatctttgggggctgtctcccatgtcgtgattttgacgtgatctctccgtgacatcaccgcgccatcgtgaagtgtgatctcatcgccgccctgtcgtgacttcatcaatgtcgtgttgtgacctggctgcggcgggacagttgggcaaggcgagcatcatggcctcggattgcgagccagctctgaaccaggcagagggccgaaaccccaccctggagcgctacctgggagccctccgtgaggccaagaatgacagcgagcagtttgcagccctgctgctagtgaccaaggcagtcaaagcaggtgacatagatgccaaaactcggcggcggatcttcgatgctgtcggcttcaccttccccaatcgtctcctgaccaccaaggaggcgccggatggctgccctgaccatgttctgcgggctttgggtgtggccctgctggcctgcttctgcagtgaccctgaactggccgcccatccccaagtcctgaacaagattcccattcttagcaccttcctcacagcccggggggacccggacgatgctgcccgccgctccatgattgatgacacctaccagtgcctgacggctgtagcaggcacacccagagggcctcggcacctcattgctggtggcaccgtgtctgccctatgccaggcatacctggggcacggctatggctttgaccaggccctggcactcctggtggggctgctggctgctgccgagacacagtgctggaaggaggcggagcccgacctgctggccgtgttgcggggcctcagtgaggatttccagaaagctgaggatgccagcaagtttgagctctgccagctgctgcccctctttttgcccccgacaaccgtgccccctgaatgctaccgggatctgcaggccgggctggcacgcatcctgggaagcaagctgagctcctggcagcgcaaccctgcactgaagctggcagcccgcctggcacacgcctgcggctccgactggatcccggcgggcagctccgggagcaagttcctggccctgctggtgaatctggcgtgcgtggaagtgcggctggcactggaggagacgggcacggaggtgaaagaggatgtggtgaccgcctgctatgccctcatggagttggggatccaggaatgcactcgctgtgagcagtcactgcttaaggagccacagaaggtgcagctcgtgagcgtcatgaaggaggccataggggctgttatccactacctgctgcaggtggggtcagagaagcagaaggagccctttgtgtttgcctcggtgcggatcctgggtgcctggctggccgaggagacctcatccttgcgtaaggaggtgtgccagctgctgcccttcctcgtccgctatgccaagaccctctacgaggaggccgaggaggccaatgacctttcccagcaggtggccaacctggccatctcccccaccaccccagggcccacctggccaggagacgctctccggctcctcctgcctggctggtgccacctgaccgttgaagatgggccccgggagatcctgatcaaggaaggggccccctcgcttctgtgcaagtatttcctgcagcagtgggaactcacatcccctggccacgacacctcggtgctgcctgacagcgtggagattggcctgcagacctgctgccacatcttcctcaacctcgtggtcaccgcaccggggctgatcaagcgtgacgcctgcttcacatctctaatgaacaccctcatgacgtcgctaccagcactagtgcagcaacagggaaggctgcttctggctgctaatgtggccaccctggggctcctcatggcccggctccttagcacctctccagctcttcagggaacaccagcatcccgagggttcttcgcagctgccatcctcttcctatcacagtcccacgtggcgcgggccaccccgggctcagaccaggcagtgctagccctgtcccctgagtatgagggcatctgggccgacctgcaggagctctggttcctgggcatgcaggccttcaccggctgtgtgcctctgctgccctggctggcccccgctgccctgcgctcccgctggccgcaggagctgctccagctgctaggcagtgtcagccccaactctgtcaagcccgagatggtggccgcctatcagggtgtcctggtggagctggcgcgggccaaccggctgtgccgggaggccatgaggctgcaggcgggcgaggagacggccagccactaccgcatggctgccttggagcagtgcctgtcagagccctgaggggtgtccaccggggacagacccaggggcgggcagagagggaaggagggaggaggcatcttccctgaagcccccaatctggcccccccctccccagacttcctccccaaaacaccccagctttctggcttttctgagggcaagggcatggtgcccacccctcaagtgtaaggaactgcgttccgcccctcaggcccccatgggggcagggatcggcttggaaatcaacgtggttgtccccgccaggccggggaaggttggagcagcccccagggaggggggcactaggtgtcattgtgcccgatgtctggctcccctgcaggagggaggctccagggtaagacagggctggcaggagcagactgcctcagcccatgtgccctgccggccagggcgtgggctcccctcggctgtggtgcctcctctggccccccaggtccacgtcctttaaattggccctttggctcttgcccttggctcccttgggcagacagcaggcttaggccattgatatcgcagttcttcctatcagcttcagtgacccagggtctgaactgcctccatcctagggcaacctggggcagacaggcctggtggggggtggggaaacctccttccacctgagcttgcttgaagggacccagagtctttgggcccagatctttaaacctttgtgtcgtgttgcagcagagtgacgatgggggttggggggttatttattttgcctgtccttatccctgcttggacacctgagcatctgattcctgtccccctggtgccatctggcctggctggagccaggaacaggagggacacttccccagaatccgcatgtttccccagtgattacactccactgccaccgtggtgcctggctttaactcccacccctgctatgactcctctctgcagagacgcgactggcggctccagcagggactacctttcttataaacccagggggaccacacacacacacacacacacacacacacacacacacacacacacacacactcttgatcccttgcttccctcccccagtgcgttctgtgatcgccaagttcaaagctgtgcacatgtggacactcaataaatgttcattggtga

SEQ ID NO: 158809 - DNA, 3677 bp, Homo sapiens
  Payload ID: 11069
  Gene Symbol: NCDN
  Gene Name: neurochondrin
  Uniprot ID: Q9UBB6
  ENST ID: ENST00000373253
  CDS Start-End: 430-2568
cctcccccgggaagggcaatgccggccgcgagaccaagggggaggaggggcagtgctgggcgggtaaaactacgcacaagcgaaggaatctgggcccccagcctctcgccgcccgctctccagaggcagtctgcaccttgcctccttcgctcgagccccagcccccagactcgggcaatacccacaagcaagatggcggcaacggcggcaccccctactgcttagcaccctgacttgccattggccagagcccggagtgaagcagccgcggattcgtcaagagcggtgcgggggtgggggtggagctgcagcagcctggagccaggagtgggcaacgcggcgtgagcagcggcccgaggctcccggagcatcgcgctgggagaagacttcgccgctcggggccgcagcctgttgggcaaggcgagcatcatggcctcggattgcgagccagctctgaaccaggcagagggccgaaaccccaccctggagcgctacctgggagccctccgtgaggccaagaatgacagcgagcagtttgcagccctgctgctagtgaccaaggcagtcaaagcaggtgacatagatgccaaaactcggcggcggatcttcgatgctgtcggcttcaccttccccaatcgtctcctgaccaccaaggaggcgccggatggctgccctgaccatgttctgcgggctttgggtgtggccctgctggcctgcttctgcagtgaccctgaactggccgcccatccccaagtcctgaacaagattcccattcttagcaccttcctcacagcccggggggacccggacgatgctgcccgccgctccatgattgatgacacctaccagtgcctgacggctgtagcaggcacacccagagggcctcggcacctcattgctggtggcaccgtgtctgccctatgccaggcatacctggggcacggctatggctttgaccaggccctggcactcctggtggggctgctggctgctgccgagacacagtgctggaaggaggcggagcccgacctgctggccgtgttgcggggcctcagtgaggatttccagaaagctgaggatgccagcaagtttgagctctgccagctgctgcccctctttttgcccccgacaaccgtgccccctgaatgctaccgggatctgcaggccgggctggcacgcatcctgggaagcaagctgagctcctggcagcgcaaccctgcactgaagctggcagcccgcctggcacacgcctgcggctccgactggatcccggcgggcagctccgggagcaagttcctggccctgctggtgaatctggcgtgcgtggaagtgcggctggcactggaggagacgggcacggaggtgaaagaggatgtggtgaccgcctgctatgccctcatggagttggggatccaggaatgcactcgctgtgagcagtcactgcttaaggagccacagaaggtgcagctcgtgagcgtcatgaaggaggccataggggctgttatccactacctgctgcaggtggggtcagagaagcagaaggagccctttgtgtttgcctcggtgcggatcctgggtgcctggctggccgaggagacctcatccttgcgtaaggaggtgtgccagctgctgcccttcctcgtccgctatgccaagaccctctacgaggaggccgaggaggccaatgacctttcccagcaggtggccaacctggccatctcccccaccaccccagggcccacctggccaggagacgctctccggctcctcctgcctggctggtgccacctgaccgttgaagatgggccccgggagatcctgatcaaggaaggggccccctcgcttctgtgcaagtatttcctgcagcagtgggaactcacatcccctggccacgacacctcggtgctgcctgacagcgtggagattggcctgcagacctgctgccacatcttcctcaacctcgtggtcaccgcaccggggctgatcaagcgtgacgcctgcttcacatctctaatgaacaccctcatgacgtcgctaccagcactagtgcagcaacagggaaggctgcttctggctgctaatgtggccaccctggggctcctcatggcccggctccttagcacctctccagctcttcagggaacaccagcatcccgagggttcttcgcagctgccatcctcttcctatcacagtcccacgtggcgcgggccaccccgggctcagaccaggcagtgctagccctgtcccctgagtatgagggcatctgggccgacctgcaggagctctggttcctgggcatgcaggccttcaccggctgtgtgcctctgctgccctggctggcccccgctgccctgcgctcccgctggccgcaggagctgctccagctgctaggcagtgtcagccccaactctgtcaagcccgagatggtggccgcctatcagggtgtcctggtggagctggcgcgggccaaccggctgtgccgggaggccatgaggctgcaggcgggcgaggagacggccagccactaccgcatggctgccttggagcagtgcctgtcagagccctgaggggtgtccaccggggacagacccaggggcgggcagagagggaaggagggaggaggcatcttccctgaagcccccaatctggcccccccctccccagacttcctccccaaaacaccccagctttctggcttttctgagggcaagggcatggtgcccacccctcaagtgtaaggaactgcgttccgcccctcaggcccccatgggggcagggatcggcttggaaatcaacgtggttgtccccgccaggccggggaaggttggagcagcccccagggaggggggcactaggtgtcattgtgcccgatgtctggctcccctgcaggagggaggctccagggtaagacagggctggcaggagcagactgcctcagcccatgtgccctgccggccagggcgtgggctcccctcggctgtggtgcctcctctggccccccaggtccacgtcctttaaattggccctttggctcttgcccttggctcccttgggcagacagcaggcttaggccattgatatcgcagttcttcctatcagcttcagtgacccagggtctgaactgcctccatcctagggcaacctggggcagacaggcctggtggggggtggggaaacctccttccacctgagcttgcttgaagggacccagagtctttgggcccagatctttaaacctttgtgtcgtgttgcagcagagtgacgatgggggttggggggttatttattttgcctgtccttatccctgcttggacacctgagcatctgattcctgtccccctggtgccatctggcctggctggagccaggaacaggagggacacttccccagaatccgcatgtttccccagtgattacactccactgccaccgtggtgcctggctttaactcccacccctgctatgactcctctctgcagagacgcgactggcggctccagcagggactacctttcttataaacccagggggaccacacacacacacacacacacacacacacacacacacacacacacacacactcttgatcccttgcttccctcccccagtgcgttctgtgatcgccaagttcaaagctgtgcacatgtggacactcaataaatgttcattggtg

SEQ ID NO: 158810 - DNA, 930 bp, Homo sapiens
  Payload ID: 11069
  Gene Symbol: NCDN
  Gene Name: neurochondrin
  ENST ID: ENST00000437806
  CDS Start-End: 199-930
ctgagagccctggctggaggggtggggtccccaaaggggcctccaagccttccctgttgagcgtcttgtattctcacttctgaagcgtatctctgcctctgaagaagggaggggaaaggaagcctggggtgtccttttctcccatgtcagcctgagtccggataatcgaacttcacccatttgggcaaggcgagcatcatggcctcggattgcgagccagctctgaaccaggcagagggccgaaaccccaccctggagcgctacctgggagccctccgtgaggccaagaatgacagcgagcagtttgcagccctgctgctagtgaccaaggcagtcaaagcaggtgacatagatgccaaaactcggcggcggatcttcgatgctgtcggcttcaccttccccaatcgtctcctgaccaccaaggaggcgccggatggctgccctgaccatgttctgcgggctttgggtgtggccctgctggcctgcttctgcagtgaccctgaactggccgcccatccccaagtcctgaacaagattcccattcttagcaccttcctcacagcccggggggacccggacgatgctgcccgccgctccatgattgatgacacctaccagtgcctgacggctgtagcaggcacacccagagggcctcggcacctcattgctggtggcaccgtgtctgccctatgccaggcatacctggggcacggctatggctttgaccaggccctggcactcctggtggggctgctggctgctgccgagacacagtgctggaaggaggcggagcccgacctgctggccgtgttgcggggcctcagtgaggatttccagaaagctgaggatgccagcaagtttgagctctgccagctgctgcccctctttttgcccccgacaaccgtgccccctgaatgctaccgggatctg

SEQ ID NO: 158811 - DNA, 986 bp, Homo sapiens
  Payload ID: 11069
  Gene Symbol: NCDN
  Gene Name: neurochondrin
  ENST ID: ENST00000423723
  CDS Start-End: 1-581
cctcatccttgcgtaaggaggtgtgccagctgctgcccttcctcgtccgctatgccaagaccctctacgaggaggccgaggaggccaatgacctttcccagcaggtggccaacctggccatctcccccaccaccccagggcccacctggccaggagacgctctccggctcctcctgcctggctggtgccacctgaccgttgaagatgggccccgggagatcctgatcaaggaaggggccccctcgcttctgtgcaagtatttcctgcagcagtgggaactcacatcccctggccacgacacctcggtgctgcctgacagcgtggagattggcctgcagacctgctgccacatcttcctcaacctcgtggtcaccgcaccggggctgatcaagcgtgacgcctgcttcacatctctaatgaacaccctcatgacgtcgctaccagcactagtgcagcaacagggaaggctgcttctggctgctaatgtggccaccctggggctcctcatggcccggctccttagcacctctccaggctccatcagttcacagctaccaggtgctgaacacatgccctgctaaacacatcatgagacctcattcagcccttccaagaatcctctgaagggttctgattttacagacaaagcaactttggcatggataagtgattggctcaaggtgttgccgctagtcagtgccagagccaggactccacacaggccatccgactccccagcccacatctttcacttgtacagcagattgccaaactcatgttgatgtggccaggccttgtgggggctctggtgctctcaagtacagatgaaacactgcacccccgcccccatgtcactgggttgctgccaagtggccctgccatatcctcccatttttaaagaagtcaggaatcctaatttgtatgtgaaacccaacttttgaatgtcagtaactatctttaattaaataactactgatccaacaaaa

SEQ ID NO: 158812 - DNA, 3402 bp, Homo sapiens
  Payload ID: 11070
  Gene Symbol: NET1
  Gene Name: neuroepithelial cell transforming 1
  Uniprot ID: Q7Z628
  ENST ID: ENST00000355029
  CDS Start-End: 143-1933
attttcaaatccccggatgacggcggtggcggctgcagtccgctgacaggcgctttctgcctggcagaggctggcgggcatcgtgcccgtccctgccggtctcccgggcacccggccaccgccccaccccctcctccgtgccatggagcccgagctggcggctcagaagcagcctcgaccgcggaggcgaagccgccgggcctctgggctcagcacggagggagcgacggggccttcggccgacacctccgggtcggagctggacgggagatgttcccttcggagaggcagctccttcacattcttaacacctggccccaactgggacttcactttgaaaagaaaacgcagagagaaagatgatgatgttgtaagccttagcagccttgatctgaaggagccaagcaataaaagagttcgacctctggctcgtgtcacgtccttggcaaatttaatctctcctgtaagaaatggagctgtcagacgttttggtcaaacaatacagtcatttacccttcgtggtgaccacagatccccagcctctgcccagaagttttctagcaggtcaacagtcccaacacccgccaagagaaggagcagtgcactgtggtcagagatgctggacatcaccatgaaggagtctctcaccaccagggagatcagacggcaggaggcaatatatgaaatgtcccgaggtgaacaggatttaattgaggatctcaaacttgcaagaaaggcctatcatgaccccatgttaaagttgtccatcatgtcagaagaggaactcacacatatatttggtgatctggactcttacatacctctgcatgaagatttgttgacaagaataggagaagcaaccaagcctgatggaacagtggagcagattggtcacattctcgtgagctggttaccgcgcttgaatgcctacagaggttactgtagtaaccagctggcagccaaagctcttcttgatcaaaagaaacaggatccaagagtccaagacttcctccagcgatgtctcgagtctcccttcagtcgaaaactagatctttggagtttcctagatatccctcgaagtcgcctagtcaaataccctttactgttaaaagaaattcttaaacacactccaaaagagcaccctgatgttcagcttctggaggatgctatattgataatacagggagtcctctctgatatcaacttgaagaaaggtgaatccgagtgccagtattacatcgacaagctggagtacctggatgaaaagcagagggaccccagaatcgaagcgagcaaagtgctgctgtgccatggggagctgcggagcaagagtggacataaactttacattttcctgtttcaagacatcttggttctgactcggcccgtcacacggaacgaacggcactcttaccaggtttaccggcagccaatcccagtccaagagctagtcctagaagacctgcaggatggagatgtgagaatgggaggctcctttcgaggagctttcagtaactcagagaaagctaaaaatatctttagaattcgcttccatgacccctctccagcccagtctcacactctgcaagccaatgacgtgttccacaagcagcagtggttcaactgtattcgagcggccattgcccccttccagtcggcaggcagtccacctgagctgcagggcctgccggagctgcacgaagagtgtgaggggaaccacccctctgcgaggaaactcacagcccagaggagggcatccacagtttccagtgttactcaggtagaagttgatgaaaacgcttacagatgtggctctggcatgcagatggcagaggacagcaagagcttaaagacacaccagacacagcccggcatccgaagagcgagggacaaagccctttctggtggcaaacggaaagagactttggtgtagagaaggctctgtgtgttaactgatgggagagactgtttgtttataaatgtgtacagttttgttttctcgtaaggggagcatcatagggttactttataccagttgtaacattttcattgtttttggttgttcttttttctttttttaatggcagctaaagatatacagattactgttaaattgcagtccttttttttttaaagatattttcttgaattatttagaacatggtaagcctggtattttttaatcaaacaaaatatttatgaaatgggttttctcttaattctggattcatcatggctttctaataccaattgtaatatttacaatattcaccaaaacttagaattttgcaaatgctggaattctgccagtgtttctttgctaagccttgcatgcaaaatttgaaattttaacattggcacccaaaacctacatggaatgtatgtctggagtatttcaaactttacattgaaacataatttccttggaaaacaaaccataagcctgaggaggtttttatcaactggaatgctttatattagtttgtttttcactgtacattcctcattttacattcatttaacctgccgattatttaatttttttattgtaaagtagtttttagcatttgcttttatttttttactttgatgccttttcaaattggcatgtctttaaagtatttttcttcctgattaaaaatgtgtgtgtatgtgtgtgtgtgtgtgtatatatatatatatttttaaatcacattaattttaccaagtgaaaccaagccatactgtttttgagccaattaagaaaattgccatttttaaagtgtagcatttcagggtaaagacccatgaaatggcttgatgtattctagactactgaaagaaaaccacttcaaagattttgttgaaagttttagtgttgtctgaaatgcaagagggaaggtgattggtagtgagttaaaagaaaaagagaggaaaagagagtagttttgtcttcaagtaaaatgtctggttgtgccagacatttcacaagtgtgaaaggagataggagaagctcaacttgagggcgtgtagtaagttgtagaaggctcgaggggacgtggacttatttgccttggtttgcaatacctgcaaataatgagtttgaaaagaaacaatgaaatgtgttaaaaatttgaccatattagataaattttcgtggatttagtcataagatggaaaaagactggtgaatcttttattacaaaatgtttctgttaaaatgggatcatcatctttgaaaggggggaggaggagtaaaagcccgattataatggtgatcaattcaagtcagtgttgactattctgtgaaatatatttggccagtggaaatgataatcagaaaagactgtaaatagatccatccaaatgatttctctgtacaaatgaatgatactattaaaaaaaaaaaaagcacacacataa

SEQ ID NO: 158813 - DNA, 3253 bp, Homo sapiens
  Payload ID: 11070
  Gene Symbol: NET1
  Gene Name: neuroepithelial cell transforming 1
  Uniprot ID: Q7Z628
  ENST ID: ENST00000380359
  CDS Start-End: 156-1784
aagcctctgctccaccgcggcgagaggcatgggcacgtggctgccgagggtggccgagctctgggaagaaaagcccgtgtgcctctgcatagcgtcgctacagcgctgactcggtgtggattgattggaaaggtttgagggagtacttgggaagcatggtggcacatgatgagactggaggtctcctacctattaaaaggaccatacgagtcctagatgtcaataaccagtccttcagagaacaagaggagccaagcaataaaagagttcgacctctggctcgtgtcacgtccttggcaaatttaatctctcctgtaagaaatggagctgtcagacgttttggtcaaacaatacagtcatttacccttcgtggtgaccacagatccccagcctctgcccagaagttttctagcaggtcaacagtcccaacacccgccaagagaaggagcagtgcactgtggtcagagatgctggacatcaccatgaaggagtctctcaccaccagggagatcagacggcaggaggcaatatatgaaatgtcccgaggtgaacaggatttaattgaggatctcaaacttgcaagaaaggcctatcatgaccccatgttaaagttgtccatcatgtcagaagaggaactcacacatatatttggtgatctggactcttacatacctctgcatgaagatttgttgacaagaataggagaagcaaccaagcctgatggaacagtggagcagattggtcacattctcgtgagctggttaccgcgcttgaatgcctacagaggttactgtagtaaccagctggcagccaaagctcttcttgatcaaaagaaacaggatccaagagtccaagacttcctccagcgatgtctcgagtctcccttcagtcgaaaactagatctttggagtttcctagatatccctcgaagtcgcctagtcaaataccctttactgttaaaagaaattcttaaacacactccaaaagagcaccctgatgttcagcttctggaggatgctatattgataatacagggagtcctctctgatatcaacttgaagaaaggtgaatccgagtgccagtattacatcgacaagctggagtacctggatgaaaagcagagggaccccagaatcgaagcgagcaaagtgctgctgtgccatggggagctgcggagcaagagtggacataaactttacattttcctgtttcaagacatcttggttctgactcggcccgtcacacggaacgaacggcactcttaccaggtttaccggcagccaatcccagtccaagagctagtcctagaagacctgcaggatggagatgtgagaatgggaggctcctttcgaggagctttcagtaactcagagaaagctaaaaatatctttagaattcgcttccatgacccctctccagcccagtctcacactctgcaagccaatgacgtgttccacaagcagcagtggttcaactgtattcgagcggccattgcccccttccagtcggcaggcagtccacctgagctgcagggcctgccggagctgcacgaagagtgtgaggggaaccacccctctgcgaggaaactcacagcccagaggagggcatccacagtttccagtgttactcaggtagaagttgatgaaaacgcttacagatgtggctctggcatgcagatggcagaggacagcaagagcttaaagacacaccagacacagcccggcatccgaagagcgagggacaaagccctttctggtggcaaacggaaagagactttggtgtagagaaggctctgtgtgttaactgatgggagagactgtttgtttataaatgtgtacagttttgttttctcgtaaggggagcatcatagggttactttataccagttgtaacattttcattgtttttggttgttcttttttctttttttaatggcagctaaagatatacagattactgttaaattgcagtccttttttttttaaagatattttcttgaattatttagaacatggtaagcctggtattttttaatcaaacaaaatatttatgaaatgggttttctcttaattctggattcatcatggctttctaataccaattgtaatatttacaatattcaccaaaacttagaattttgcaaatgctggaattctgccagtgtttctttgctaagccttgcatgcaaaatttgaaattttaacattggcacccaaaacctacatggaatgtatgtctggagtatttcaaactttacattgaaacataatttccttggaaaacaaaccataagcctgaggaggtttttatcaactggaatgctttatattagtttgtttttcactgtacattcctcattttacattcatttaacctgccgattatttaatttttttattgtaaagtagtttttagcatttgcttttatttttttactttgatgccttttcaaattggcatgtctttaaagtatttttcttcctgattaaaaatgtgtgtgtatgtgtgtgtgtgtgtgtatatatatatatatttttaaatcacattaattttaccaagtgaaaccaagccatactgtttttgagccaattaagaaaattgccatttttaaagtgtagcatttcagggtaaagacccatgaaatggcttgatgtattctagactactgaaagaaaaccacttcaaagattttgttgaaagttttagtgttgtctgaaatgcaagagggaaggtgattggtagtgagttaaaagaaaaagagaggaaaagagagtagttttgtcttcaagtaaaatgtctggttgtgccagacatttcacaagtgtgaaaggagataggagaagctcaacttgagggcgtgtagtaagttgtagaaggctcgaggggacgtggacttatttgccttggtttgcaatacctgcaaataatgagtttgaaaagaaacaatgaaatgtgttaaaaatttgaccatattagataaattttcgtggatttagtcataagatggaaaaagactggtgaatcttttattacaaaatgtttctgttaaaatgggatcatcatctttgaaaggggggaggaggagtaaaagcccgattataatggtgatcaattcaagtcagtgttgactattctgtgaaatatatttggccagtggaaatgataatcagaaaagactgtaaatagatccatccaaatgatttctctgtacaaatgaatgatactattaaaaaaaaaaaaagcacacacataa

SEQ ID NO: 158814 - DNA, 637 bp, Homo sapiens
  Payload ID: 11070
  Gene Symbol: NET1
  Gene Name: neuroepithelial cell transforming 1
  ENST ID: ENST00000449083
  CDS Start-End: 158-637
agaagcctctgctccaccgcggcgagaggcatgggcacgtggctgccgagggtggccgagctctgggaagaaaagcccgtgtgcctctgcatagcgtcgctacagcgctgactcggtgtggattgattggaaaggtttgagggagtacttgggaagcatggtggcacatgatgagactggaggtctcctacctattaaaaggaccatacgagtcctagatgtcaataaccagtccttcagagaacaagaggaactcacacatatatttggtgatctggactcttacatacctctgcatgaagatttgttgacaagaataggagaagcaaccaagcctgatggaacagtggagcagattggtcacattctcgtgagctggttaccgcgcttgaatgcctacagaggttactgtagtaaccagctggcagccaaagctcttcttgatcaaaagaaacaggatccaagagtccaagacttcctccagcgatgtctcgagtctcccttcagtcgaaaactagatctttggagtttcctagatatccctcgaagtcgcctagtcaaataccctttactgttaaaagaaattcttaaacacactccaaaagagcaccctgatgttcagcttctggaggatgct

SEQ ID NO: 158815 - DNA, 10333 bp, Homo sapiens
  Payload ID: 11071
  Gene Symbol: NFASC
  Gene Name: neurofascin
  Uniprot ID: O94856
  ENST ID: ENST00000339876
  CDS Start-End: 329-4051
gcacgggctggtctctgccctaatgcggcggctggcggcgagaggcgctgcaggggacgcgggggaagtggcggcgccggcagcggacagctcggacagcgcccagggccggagcccgagcccttggaggttgattgacttatgtgcaatttgggacgctggagtttaccttccctccgcagcctggaacagagcctcctctggtgttgcaaggaagaggctgaatgaggcagagaagctgagtgctgtccaggaggcccagttaaagcggctcgaggtgacaagaccccgagtgctggggagcagggagcagggccaggtgccgaggatggccaggcagccaccgccgccctgggtccatgcagccttcctcctctgcctcctcagtcttggcggagccatcgaaattcctatggatccaagcattcagaatgagctgacgcagccgccaaccatcaccaagcagtcagcgaaggatcacatcgtggacccccgtgataacatcctgattgagtgtgaagcaaaagggaaccctgcccccagcttccactggacacgaaacagcagattcttcaacatcgccaaggacccccgggtgtccatgaggaggaggtctgggaccctggtgattgacttccgcagtggcgggcggccggaggaatatgagggggaatatcagtgcttcgcccgcaacaaatttggcacggccctgtccaataggatccgcctgcaggtgtctaaatctcctctgtggcccaaggaaaacctagaccctgtcgtggtccaagagggcgctcctttgacgctccagtgcaaccccccgcctggacttccatccccggtcatcttctggatgagcagctccatggagcccatcacccaagacaaacgtgtctctcagggccataacggagacctatacttctccaacgtgatgctgcaggacatgcagaccgactacagttgtaacgcccgcttccacttcacccacaccatccagcagaagaaccctttcaccctcaaggtcctcaccacccgaggagttgcagaaagaacaccaagcttcatgtatccccagggcaccgcgagcagccagatggtgcttcgtggcatggacctcctgctggaatgcatcgcctccggggtcccaacaccagacatcgcatggtacaagaaaggtggggacctcccatctgataaggccaagtttgagaactttaataaggccctgcgtatcacaaatgtctctgaggaagactccggggagtatttctgcctggcctccaacaagatgggcagcatccggcacacgatctcggtgagagtaaaggctgctccctactggctggacgaacccaagaaccttattctggctcctggcgaggatgggagactggtgtgtcgagccaatggaaaccccaaacccactgtccagtggatggtgaatggggaacctttgcaatcggcaccacctaacccaaaccgtgaggtggccggagacaccatcatcttccgggacacccagatcagcagcagggctgtgtaccagtgcaacacctccaacgagcatggctacctgctggccaacgcctttgtcagtgtgctggatgtgccgcctcggatgctgtcgccccggaaccagctcattcgagtgattctttacaaccggacgcggctggactgccctttctttgggtctcccatccccacactgcgatggtttaagaatgggcaaggaagcaacctggatggtggcaactaccatgtttatgagaacggcagtctggaaattaagatgatccgcaaagaggaccagggcatctacacctgtgtcgccaccaacatcctgggcaaagctgaaaaccaagtccgcctggaggtcaaagaccccaccaggatctaccggatgcccgaggaccaggtggccagaaggggcaccacggtgcagctggagtgtcgggtgaagcacgacccctccctgaaactcaccgtctcctggctgaaggatgacgagccgctctatattggaaacaggatgaagaaggaagacgactccctgaccatctttggggtggcagagcgggaccagggcagttacacgtgtgtcgccagcaccgagctagaccaagacctggccaaggcctacctcaccgtgctagctgatcaggccactccaactaaccgtttggctgccctgcccaaaggacggccagaccggccccgggacctggagctgaccgacctggccgagaggagcgtgcggctgacctggatccccggggatgctaacaacagccccatcacagactacgtcgtccagtttgaagaagaccagttccaacctggggtctggcatgaccattccaagtaccccggcagcgttaactcagccgtcctccggctgtccccgtatgtcaactaccagttccgtgtcattgccatcaacgaggttgggagcagccaccccagcctcccatccgagcgctaccgaaccagtggagcaccccccgagtccaatcctggtgacgtgaagggagaggggaccagaaagaacaacatggagatcacgtggacgcccatgaatgccacctcggcctttggccccaacctgcgctacattgtcaagtggaggcggagagagactcgagaggcctggaacaacgtcacagtgtggggctctcgctacgtggtggggcagaccccagtctacgtgccctatgagatccgagtccaggctgaaaatgacttcgggaagggccctgagccagagtccgtcatcggttactccggagaagatttacccagtgcccctaggcgtttccgagtccggcagcccaacctggagacaatcaacctggaatgggatcatcctgagcatccaaatgggatcatgattggatacactctcaaatatgtggcctttaacgggaccaaagtaggaaagcagatagtggaaaacttctctcccaatcagaccaagttcacggtgcaaagaacggaccccgtgtcacgctaccgctttaccctcagcgccaggacgcaggtgggctctggggaagccgtcacagaggagtcaccagcacccccgaatgaagctactccaaccgcagctcctcccacattgcccccgactaccgtgggtgcgacgggcgctgtgagcagtaccgatgctactgccattgctgccaccaccgaagccacaacagtccccatcatcccaactgtcgcacctaccaccatcgccaccaccaccaccgtcgccacaactactacaaccactgctgccgccaccaccaccacggagagtcctcccaccaccacctccgggactaagatacacgaatccgcccctgatgagcagtccatatggaacgtcacggtgctccccaacagtaaatgggccaacatcacctggaagcacaatttcgggcccggaactgactttgtggttgagtacatcgacagcaaccatacgaaaaaaactgtcccagttaaggcccaggctcagcctatacagctgacagacctctatcccgggatgacatacacgttgcgggtttattcccgggacaacgagggcatcagcagtaccgtcatcacctttatgaccagtacagcttacaccaacaaccaagcggacatcgccacccagggctggttcattgggcttatgtgcgccatcgccctcctggtgctgatcctgctcatcgtctgtttcatcaagaggagtcgcggcggcaagtacccagtacgagaaaagaaggatgttccccttggccctgaagaccccaaggaagaggatggctcatttgactatagtgatgaggacaacaagcccctgcagggcagtcagacatctctggacggcaccatcaagcagcaggagagtgacgacagcctggtggactatggcgagggtggcgagggtcagttcaatgaagacggctccttcatcggccagtacacggtcaaaaaggacaaggaggaaacagagggcaacgaaagctcagaggccacgtcacctgtcaatgctatctactctctggcctaacggagcccacccaggcacagccaccactttgcaagtgggaggaggggagaaggggagacaaaaccactgcagacctaccacgaagccaccaccaccttcagtaacaagggtacgatatgggggtctgccaagctgtgaggaccagtagccaccaagccacccacaagccccctcccaatgaccccccttcagccccgggtgccaccagtgtgggagagctggagccgtggctgagctcagctggagggagcctggccccttgcccggtctcgcagccaccccgagcgttccaccacactgtccgcccttggcctcggcacacgctcaccttttctgttggttacgggacttctcattgtcttaatttcgctttgtgcatcttcccctccagacccaatgtctctgttttcttttccttttgaaaaagagtccctggaaaagaaagaataagtggattctcccccaggagaatcctttttgcaaagataggcaaaaaggattgaatccataccagaacacgtagacaggctgtaatattcaaaccacctctgggccaatgcatttccaaaggatgcctttctcgccatatgcctcccctggcccccagcccctctgcctcggccttgtcagttgctgagctgggcttggctcctttctggaaaatgacagtatttttggcagggagaaggtgcgcaggcctccttgctgctctctggtttggttgggaggtgtgtttacctcttgctcctcattcctcccctgcccttttctctggaatatctaagatgtgagctgcattgactctgaagacgtttgaggaacaggagtgggcactgatagaaaggacttcaacgccagtgactgtgtacctccagcagaagaaaatcaggtgtctggtcttgggggcactgtgctcacttctagagagaagaaaaaggctgggtttggacttcatgcctcctcactggtgaaacccaggatgtagatagagggccacacccaccctgtccagagtagagggcacctgtccacgtggccagggcccatgctgccaccctcgaggagatggaaccctgtgatgcaaaagctttgctggtgtgtttggggcataaggcactgctccccttccatctctagcagatatcatcttctcagccaattctgtaggacactgaggctcttgtttgacatggtgtgtggatggggacttgccccaagactgagcaggtctgccctttcattggggtgtatacatatcaggggaccctgaggtggcaccgtactcagtgttgtgatgcccccacctagggaggactcaatgctctttgtatgccttatgcagcgctgatctgtccctggagttcccaggttcccagctccccccctgcaagccttgaagcctccagcaacgtctatctccaggagagcagggcagcctatgcaagtgttccggcaggaccagaagtggccactcaacacacgtcctcaccagtcaccccaaatggagacactcgcagacctgcagttctcagaccgaaggtgctgccttcatcctccccacctaatgcatttttgaaaccaaaggtacctagcctcagagacagagaaggagagggggagatcttgagtctaagaggaaccctttagctgtttctgcagctgaggtcagtttcaggagggtgaagctgatccccaggaatggatcagctgccatgggcacagcctccgatttgagcctctccggctgccagccagggggcctgggccagaccagggctctgtccttccgtgactttattaaagcaacatttgccacatgtttaagccgcaaaggtattagcaatgcttgcatcattaataatcattcagttgaaggtcaagcccatagacacacactctctgctggtaagaaaccatagcccagaactgagccaataaggttgtttgaacctgagagtgtgtaatggtcatttgggccaagcctcagctagggctgctgcctggacgcctgaggggcagcttatcacagtgcaaggggacagggtaaacagcagggggtggggtgtgagcttggagggcccctcccctggatttcctccaacacctgcttggatactaggcccactgtccctgaagggaatgtcagggaagtgtgcctgtgagctgaattaaaggactggcctttccagaaaacgctttggatctgagcagagtagtcagtttctcagacactcattccatactgcaccgtacatgccagcgtacccattgcaccgaaagcaggcccttagggcaggaagggacgatgagcaagtctgccacaccacctggtgactgggaagggctgcttctctcgtaagggtcttggggagaagtaagcccgcagcctgcctctgcacctcgttccagtgtcctgccaggctctgtactgtcctttgtgtatgaagaaaatgctgttagccctctctcaggctgctgttctgtgggtgctgagagctgccccccatcaccacgccatcacacccctctgagcagaagcaaatctgaggctgaagaattaagttttccccaagcaaggaaggcaggtggtcagagagatcaaacgctgaggcgtggggattgcaggattcaggaggcagcccctttggggaagaggagggtgcattttccatggagcccatgtcagagtccactccagctcagcaggaaagtggaattgcccagtactgcctgccagctgggtctcccaagcaactaccccaagacataccaacagtgaagccaggacagcaccatgccatcggcgctccagtctgtctggctgggaggaaagtgctgggcatcttacagtaactctagaagttcctttgactaggctgcaatcccacctatatgctcagccctaagagctgtggtttcctgtgctctcatttgtccattcattcattcattcattcattcagcaaataatctgaaatccagtctgaactaaggcctgagctgtggataccatggcgcgtgagttagatgtggtccctgccctcatggggctgacagtcctaaaatcaagtgctaggacacagtggccattgagctgggagcattcttccctctaccgcttaagccactgatggctgcgagcttgaagagagggattctgagggagagcttggtccatctggtcaccaaggctgggcgggacagagcagtcaagaaccacggtgtggcttgagaaacagtcctgcttcctgagcctctttgctctgcctcttggggcaagctccttaacctgtctgtatttttatgcctctgtctcccattcagttcctccttgaatacctctttctacagagaggcacgggctcccctgaaggattgtcgaggccagggttcgggaagtacactgccatcggtcaggggacagctgcctcccaccttgcctgggtgatggtgaatgggactcatcttttcctgccttgcttttgaggagatggttgaatttaagctaacaggaaagccaaaccagcaccctcctttgtgctctgagaggttggagacatctggtccaccccattgcccctgcccctggcaagccctgaagtcgggagaggtgaccacaggtctgaaaatcagccagtgccaacattgcttgccctgcaaggtgcaactgagcccacatagcgcattcatagtttccctgaccacagccttgggaagacggtggaaacccgaggatgtgtgggtttcccagctaacggacaagctcccctgccacacccagtgcccacgcatgctcacatacatacagcagaccacaaccctgttgccaagcagtgcttccaagggatagcgatccagattccaacattgtcttggagagggttagtccacatccaagttgcgtgagataagatgcaaagggctctgtgtggatgaggaacgcaccttagaggagtgggaaaggccaccagggttgggccctgtttaggtaattcctgttggcagcacctagagagagcatctgagctgaaggagtgggaaactttgcccaagcaatggcacgggcagcgggctctttctggcgccctgtgctggagcagggccaagtcttagggcatcacaaacagcccatttgatggagggagcagggacatagcacatttttgtctgtctttgtgaggctgctttgctaactctctgaggagaggaagcctctcgggctttccgtcggctggggctagtgccagagaatcccttctcagtggccagcaggttcctgggaggccggcacaaggcaccgctccccactcatgacaccttggtgcagagtgacctcctgcccagtcaccactccggccagccccagccaaacacacaaaagcccatggttgcggttgcatctacaccgttagttggcaaaggatcctgcttgagctctgcgtggtggccaaggagtagcatggaggagggccctgattttaaaaaggaaaaatagagaggcctcaaaacaatgaaacaaagagcttgatatgtcaagaggagaccaaggccctgggaggcataggcaagccgggcagagtcagaccagtgccctcccttgaccatctcctagcattccttaacctagacaggggctaccccatgtgagtccaagccagactttgtggctgtccccagcctgcacagcccaagcccagggaagtgtcctttctttcccttccttactaataatgggccttcctgagacacattcagagaaggatcagagagaaaggagaaccatccaggagagccacaagcgtccaccaaacagtgtctcaggcctcacctgaagctgctgttcctcctatcagcacactagtattaaatgggtgttccataatgaggagaatggaaataggtacaaggcatctagcttaggacagaatcggatttcggcatgtgaaggaatcccagagctgatctcattgaaatgatctatcgtacagacaaggatatgcaaatccacagaagtgaagggatttttgctcaagatcacatagctggtaaactaaggtaaggttagggcttgaacttgggccttctgactccttgtccagtcagtgttctttcatctcaccacagctgcctcctttgaaacagaggtattaagatctgtccttctggttcaccctctcatacctctttactgcgtctcccacatcccccacatgcctcccaaaatgaaagacaaacaggattgtttctgagaccaagatcagtctgtctgtgatcagcctgtgtgtggttcacccagtcatgcaattaagggcagatctgggccagtggaataggatagctgattggtgtttgttactgtgaaccctagaccgtaccccgtagaatggtgtctcttgctttgtaacacatcgggccttcagtgtgctgtattcctcagaagtgagggcatctcggtccattctgcccatggccacagggtgcagagaggcagcagggcccatgcaagctgccaccctgggatttgctgggctggagttcaacagatgtaaagacttcagtgaagcaataaacacaaaactctgggagaagatatccagaattttgtacattactctgtttctttttcaaaaatgaggcagatcagatgcccctgagctgcccctttttttctgattcccaactgcaatgtcctcagtcagtgttgtccctctgcccggctccccagctctttgccaacctcttcacactccccttgagctgagcatcagtcgcctgtgacgtggccaccttctgtcctgctcccactcccgacccatgctggaccccggaggacctcctgccccgcccccaccacacacccatatcccccaccattccaatttgttctttcccgtggggaattttttttcccagcgtctccatcccttcctacatatccacacacacacaaattggtctgatcttttttccattggttaaacatttaactccatgccagaccttgttttaacccctctcacatcatgttctttccttttttgcgagttattttgcattaaccaactttgtcagtgacagatgcgtatctgagggtgtcacacacgaccttcagcagggaagacttctgggccatggagggccgtctaatacatggacttataaactgactgcatgagcaatgaaaaggccaaattattctgaattttttttgaatcactgtaaaaaaactgatttcttttgtatagagaacactaaacgtataataaaagttgttcaaaatgg

SEQ ID NO: 158816 - DNA, 10120 bp, Homo sapiens
  Payload ID: 11071
  Gene Symbol: NFASC
  Gene Name: neurofascin
  Uniprot ID: O94856
  ENST ID: ENST00000360049
  CDS Start-End: 329-3838
gcacgggctggtctctgccctaatgcggcggctggcggcgagaggcgctgcaggggacgcgggggaagtggcggcgccggcagcggacagctcggacagcgcccagggccggagcccgagcccttggaggttgattgacttatgtgcaatttgggacgctggagtttaccttccctccgcagcctggaacagagcctcctctggtgttgcaaggaagaggctgaatgaggcagagaagctgagtgctgtccaggaggcccagttaaagcggctcgaggtgacaagaccccgagtgctggggagcagggagcagggccaggtgccgaggatggccaggcagccaccgccgccctgggtccatgcagccttcctcctctgcctcctcagtcttggcggagccatcgaaattcctatggatctgacgcagccgccaaccatcaccaagcagtcagcgaaggatcacatcgtggacccccgtgataacatcctgattgagtgtgaagcaaaagggaaccctgcccccagcttccactggacacgaaacagcagattcttcaacatcgccaaggacccccgggtgtccatgaggaggaggtctgggaccctggtgattgacttccgcagtggcgggcggccggaggaatatgagggggaatatcagtgcttcgcccgcaacaaatttggcacggccctgtccaataggatccgcctgcaggtgtctaaatctcctctgtggcccaaggaaaacctagaccctgtcgtggtccaagagggcgctcctttgacgctccagtgcaaccccccgcctggacttccatccccggtcatcttctggatgagcagctccatggagcccatcacccaagacaaacgtgtctctcagggccataacggagacctatacttctccaacgtgatgctgcaggacatgcagaccgactacagttgtaacgcccgcttccacttcacccacaccatccagcagaagaaccctttcaccctcaaggtcctcaccaaccacccttataatgactcgtccttaagaaaccaccctgacatgtacagtgcccgaggagttgcagaaagaacaccaagcttcatgtatccccagggcaccgcgagcagccagatggtgcttcgtggcatggacctcctgctggaatgcatcgcctccggggtcccaacaccagacatcgcatggtacaagaaaggtggggacctcccatctgataaggccaagtttgagaactttaataaggccctgcgtatcacaaatgtctctgaggaagactccggggagtatttctgcctggcctccaacaagatgggcagcatccggcacacgatctcggtgagagtaaaggctgctccctactggctggacgaacccaagaaccttattctggctcctggcgaggatgggagactggtgtgtcgagccaatggaaaccccaaacccactgtccagtggatggtgaatggggaacctttgcaatcggcaccacctaacccaaaccgtgaggtggccggagacaccatcatcttccgggacacccagatcagcagcagggctgtgtaccagtgcaacacctccaacgagcatggctacctgctggccaacgcctttgtcagtgtgctggatgtgccgcctcggatgctgtcgccccggaaccagctcattcgagtgattctttacaaccggacgcggctggactgccctttctttgggtctcccatccccacactgcgatggtttaagaatgggcaaggaagcaacctggatggtggcaactaccatgtttatgagaacggcagtctggaaattaagatgatccgcaaagaggaccagggcatctacacctgtgtcgccaccaacatcctgggcaaagctgaaaaccaagtccgcctggaggtcaaagaccccaccaggatctaccggatgcccgaggaccaggtggccagaaggggcaccacggtgcagctggagtgtcgggtgaagcacgacccctccctgaaactcaccgtctcctggctgaaggatgacgagccgctctatattggaaacaggatgaagaaggaagacgactccctgaccatctttggggtggcagagcgggaccagggcagttacacgtgtgtcgccagcaccgagctagaccaagacctggccaaggcctacctcaccgtgctaggacggccagaccggccccgggacctggagctgaccgacctggccgagaggagcgtgcggctgacctggatccccggggatgctaacaacagccccatcacagactacgtcgtccagtttgaagaagaccagttccaacctggggtctggcatgaccattccaagtaccccggcagcgttaactcagccgtcctccggctgtccccgtatgtcaactaccagttccgtgtcattgccatcaacgaggttgggagcagccaccccagcctcccatccgagcgctaccgaaccagtggagcaccccccgagtccaatcctggtgacgtgaagggagaggggaccagaaagaacaacatggagatcacgtggacgcccatgaatgccacctcggcctttggccccaacctgcgctacattgtcaagtggaggcggagagagactcgagaggcctggaacaacgtcacagtgtggggctctcgctacgtggtggggcagaccccagtctacgtgccctatgagatccgagtccaggctgaaaatgacttcgggaagggccctgagccagagtccgtcatcggttactccggagaagattatcccagggctgcgcccactgaagttaaagtccgagtcatgaacagcacagccatcagccttcagtggaaccgcgtctactccgacacggtccagggccagctcagagagtaccgagcctactactggagggagagcagcttgctgaagaacctgtgggtgtctcagaagagacagcaagccagcttccctggtgaccgcctccgtggcgtggtgtcccgcctcttcccctacagtaactacaagctggagatggttgtggtcaatgggagaggtgatgggcctcgcagtgagaccaaggagttcaccaccccggaaggagtacccagtgcccctaggcgtttccgagtccggcagcccaacctggagacaatcaacctggaatgggatcatcctgagcatccaaatgggatcatgattggatacactctcaaatatgtggcctttaacgggaccaaagtaggaaagcagatagtggaaaacttctctcccaatcagaccaagttcacggtgcaaagaacggaccccgtgtcacgctaccgctttaccctcagcgccaggacgcaggtgggctctggggaagccgtcacagaggagtcaccagcacccccgaatgaagcttacaccaacaaccaagcggacatcgccacccagggctggttcattgggcttatgtgcgccatcgccctcctggtgctgatcctgctcatcgtctgtttcatcaagaggagtcgcggcggcaagtacccagtacgagaaaagaaggatgttccccttggccctgaagaccccaaggaagaggatggctcatttgactatagtgatgaggacaacaagcccctgcagggcagtcagacatctctggacggcaccatcaagcagcaggagagtgacgacagcctggtggactatggcgagggtggcgagggtcagttcaatgaagacggctccttcatcggccagtacacggtcaaaaaggacaaggaggaaacagagggcaacgaaagctcagaggccacgtcacctgtcaatgctatctactctctggcctaacggagcccacccaggcacagccaccactttgcaagtgggaggaggggagaaggggagacaaaaccactgcagacctaccacgaagccaccaccaccttcagtaacaagggtacgatatgggggtctgccaagctgtgaggaccagtagccaccaagccacccacaagccccctcccaatgaccccccttcagccccgggtgccaccagtgtgggagagctggagccgtggctgagctcagctggagggagcctggccccttgcccggtctcgcagccaccccgagcgttccaccacactgtccgcccttggcctcggcacacgctcaccttttctgttggttacgggacttctcattgtcttaatttcgctttgtgcatcttcccctccagacccaatgtctctgttttcttttccttttgaaaaagagtccctggaaaagaaagaataagtggattctcccccaggagaatcctttttgcaaagataggcaaaaaggattgaatccataccagaacacgtagacaggctgtaatattcaaaccacctctgggccaatgcatttccaaaggatgcctttctcgccatatgcctcccctggcccccagcccctctgcctcggccttgtcagttgctgagctgggcttggctcctttctggaaaatgacagtatttttggcagggagaaggtgcgcaggcctccttgctgctctctggtttggttgggaggtgtgtttacctcttgctcctcattcctcccctgcccttttctctggaatatctaagatgtgagctgcattgactctgaagacgtttgaggaacaggagtgggcactgatagaaaggacttcaacgccagtgactgtgtacctccagcagaagaaaatcaggtgtctggtcttgggggcactgtgctcacttctagagagaagaaaaaggctgggtttggacttcatgcctcctcactggtgaaacccaggatgtagatagagggccacacccaccctgtccagagtagagggcacctgtccacgtggccagggcccatgctgccaccctcgaggagatggaaccctgtgatgcaaaagctttgctggtgtgtttggggcataaggcactgctccccttccatctctagcagatatcatcttctcagccaattctgtaggacactgaggctcttgtttgacatggtgtgtggatggggacttgccccaagactgagcaggtctgccctttcattggggtgtatacatatcaggggaccctgaggtggcaccgtactcagtgttgtgatgcccccacctagggaggactcaatgctctttgtatgccttatgcagcgctgatctgtccctggagttcccaggttcccagctccccccctgcaagccttgaagcctccagcaacgtctatctccaggagagcagggcagcctatgcaagtgttccggcaggaccagaagtggccactcaacacacgtcctcaccagtcaccccaaatggagacactcgcagacctgcagttctcagaccgaaggtgctgccttcatcctccccacctaatgcatttttgaaaccaaaggtacctagcctcagagacagagaaggagagggggagatcttgagtctaagaggaaccctttagctgtttctgcagctgaggtcagtttcaggagggtgaagctgatccccaggaatggatcagctgccatgggcacagcctccgatttgagcctctccggctgccagccagggggcctgggccagaccagggctctgtccttccgtgactttattaaagcaacatttgccacatgtttaagccgcaaaggtattagcaatgcttgcatcattaataatcattcagttgaaggtcaagcccatagacacacactctctgctggtaagaaaccatagcccagaactgagccaataaggttgtttgaacctgagagtgtgtaatggtcatttgggccaagcctcagctagggctgctgcctggacgcctgaggggcagcttatcacagtgcaaggggacagggtaaacagcagggggtggggtgtgagcttggagggcccctcccctggatttcctccaacacctgcttggatactaggcccactgtccctgaagggaatgtcagggaagtgtgcctgtgagctgaattaaaggactggcctttccagaaaacgctttggatctgagcagagtagtcagtttctcagacactcattccatactgcaccgtacatgccagcgtacccattgcaccgaaagcaggcccttagggcaggaagggacgatgagcaagtctgccacaccacctggtgactgggaagggctgcttctctcgtaagggtcttggggagaagtaagcccgcagcctgcctctgcacctcgttccagtgtcctgccaggctctgtactgtcctttgtgtatgaagaaaatgctgttagccctctctcaggctgctgttctgtgggtgctgagagctgccccccatcaccacgccatcacacccctctgagcagaagcaaatctgaggctgaagaattaagttttccccaagcaaggaaggcaggtggtcagagagatcaaacgctgaggcgtggggattgcaggattcaggaggcagcccctttggggaagaggagggtgcattttccatggagcccatgtcagagtccactccagctcagcaggaaagtggaattgcccagtactgcctgccagctgggtctcccaagcaactaccccaagacataccaacagtgaagccaggacagcaccatgccatcggcgctccagtctgtctggctgggaggaaagtgctgggcatcttacagtaactctagaagttcctttgactaggctgcaatcccacctatatgctcagccctaagagctgtggtttcctgtgctctcatttgtccattcattcattcattcattcattcagcaaataatctgaaatccagtctgaactaaggcctgagctgtggataccatggcgcgtgagttagatgtggtccctgccctcatggggctgacagtcctaaaatcaagtgctaggacacagtggccattgagctgggagcattcttccctctaccgcttaagccactgatggctgcgagcttgaagagagggattctgagggagagcttggtccatctggtcaccaaggctgggcgggacagagcagtcaagaaccacggtgtggcttgagaaacagtcctgcttcctgagcctctttgctctgcctcttggggcaagctccttaacctgtctgtatttttatgcctctgtctcccattcagttcctccttgaatacctctttctacagagaggcacgggctcccctgaaggattgtcgaggccagggttcgggaagtacactgccatcggtcaggggacagctgcctcccaccttgcctgggtgatggtgaatgggactcatcttttcctgccttgcttttgaggagatggttgaatttaagctaacaggaaagccaaaccagcaccctcctttgtgctctgagaggttggagacatctggtccaccccattgcccctgcccctggcaagccctgaagtcgggagaggtgaccacaggtctgaaaatcagccagtgccaacattgcttgccctgcaaggtgcaactgagcccacatagcgcattcatagtttccctgaccacagccttgggaagacggtggaaacccgaggatgtgtgggtttcccagctaacggacaagctcccctgccacacccagtgcccacgcatgctcacatacatacagcagaccacaaccctgttgccaagcagtgcttccaagggatagcgatccagattccaacattgtcttggagagggttagtccacatccaagttgcgtgagataagatgcaaagggctctgtgtggatgaggaacgcaccttagaggagtgggaaaggccaccagggttgggccctgtttaggtaattcctgttggcagcacctagagagagcatctgagctgaaggagtgggaaactttgcccaagcaatggcacgggcagcgggctctttctggcgccctgtgctggagcagggccaagtcttagggcatcacaaacagcccatttgatggagggagcagggacatagcacatttttgtctgtctttgtgaggctgctttgctaactctctgaggagaggaagcctctcgggctttccgtcggctggggctagtgccagagaatcccttctcagtggccagcaggttcctgggaggccggcacaaggcaccgctccccactcatgacaccttggtgcagagtgacctcctgcccagtcaccactccggccagccccagccaaacacacaaaagcccatggttgcggttgcatctacaccgttagttggcaaaggatcctgcttgagctctgcgtggtggccaaggagtagcatggaggagggccctgattttaaaaaggaaaaatagagaggcctcaaaacaatgaaacaaagagcttgatatgtcaagaggagaccaaggccctgggaggcataggcaagccgggcagagtcagaccagtgccctcccttgaccatctcctagcattccttaacctagacaggggctaccccatgtgagtccaagccagactttgtggctgtccccagcctgcacagcccaagcccagggaagtgtcctttctttcccttccttactaataatgggccttcctgagacacattcagagaaggatcagagagaaaggagaaccatccaggagagccacaagcgtccaccaaacagtgtctcaggcctcacctgaagctgctgttcctcctatcagcacactagtattaaatgggtgttccataatgaggagaatggaaataggtacaaggcatctagcttaggacagaatcggatttcggcatgtgaaggaatcccagagctgatctcattgaaatgatctatcgtacagacaaggatatgcaaatccacagaagtgaagggatttttgctcaagatcacatagctggtaaactaaggtaaggttagggcttgaacttgggccttctgactccttgtccagtcagtgttctttcatctcaccacagctgcctcctttgaaacagaggtattaagatctgtccttctggttcaccctctcatacctctttactgcgtctcccacatcccccacatgcctcccaaaatgaaagacaaacaggattgtttctgagaccaagatcagtctgtctgtgatcagcctgtgtgtggttcacccagtcatgcaattaagggcagatctgggccagtggaataggatagctgattggtgtttgttactgtgaaccctagaccgtaccccgtagaatggtgtctcttgctttgtaacacatcgggccttcagtgtgctgtattcctcagaagtgagggcatctcggtccattctgcccatggccacagggtgcagagaggcagcagggcccatgcaagctgccaccctgggatttgctgggctggagttcaacagatgtaaagacttcagtgaagcaataaacacaaaactctgggagaagatatccagaattttgtacattactctgtttctttttcaaaaatgaggcagatcagatgcccctgagctgcccctttttttctgattcccaactgcaatgtcctcagtcagtgttgtccctctgcccggctccccagctctttgccaacctcttcacactccccttgagctgagcatcagtcgcctgtgacgtggccaccttctgtcctgctcccactcccgacccatgctggaccccggaggacctcctgccccgcccccaccacacacccatatcccccaccattccaatttgttctttcccgtggggaattttttttcccagcgtctccatcccttcctacatatccacacacacacaaattggtctgatcttttttccattggttaaacatttaactccatgccagaccttgttttaacccctctcacatcatgttctttccttttttgcgagttattttgcattaaccaactttgtcagtgacagatgcgtatctgagggtgtcacacacgaccttcagcagggaagacttctgggccatggagggccgtctaatacatggacttataaactgactgcatgagcaatgaaaaggccaaattattctgaattttttttgaatcactgtaaaaaaactgatttcttttgtatagagaacactaaacgtataataaaagttgttcaaaatgg

SEQ ID NO: 158817 - DNA, 4957 bp, Homo sapiens
  Payload ID: 11071
  Gene Symbol: NFASC
  Gene Name: neurofascin
  ENST ID: ENST00000367173
  CDS Start-End: 1-3125
caagcattcagaatgagctgacgcagccgccaaccatcaccaagcagtcagcgaaggatcacatcgtggacccccgtgataacatcctgattgagtgtgaagcaaaagggaaccctgcccccagcttccactggacacgaaacagcagattcttcaacatcgccaaggacccccgggtgtccatgaggaggaggtctgggaccctggtgattgacttccgcagtggcgggcggccggaggaatatgagggggaatatcagtgcttcgcccgcaacaaatttggcacggccctgtccaataggatccgcctgcaggtgtctaaatctcctctgtggcccaaggaaaacctagaccctgtcgtggtccaagagggcgctcctttgacgctccagtgcaaccccccgcctggacttccatccccggtcatcttctggatgagcagctccatggagcccatcacccaagacaaacgtgtctctcagggccataacggagacctatacttctccaacgtgatgctgcaggacatgcagaccgactacagttgtaacgcccgcttccacttcacccacaccatccagcagaagaaccctttcaccctcaaggtcctcaccacccgaggagttgcagaaagaacaccaagcttcatgtatccccagggcaccgcgagcagccagatggtgcttcgtggcatggacctcctgctggaatgcatcgcctccggggtcccaacaccagacatcgcatggtacaagaaaggtggggacctcccatctgataaggccaagtttgagaactttaataaggccctgcgtatcacaaatgtctctgaggaagactccggggagtatttctgcctggcctccaacaagatgggcagcatccggcacacgatctcggtgagagtaaaggctgctccctactggctggacgaacccaagaaccttattctggctcctggcgaggatgggagactggtgtgtcgagccaatggaaaccccaaacccactgtccagtggatggtgaatggggaacctttgcaatcggcaccacctaacccaaaccgtgaggtggccggagacaccatcatcttccgggacacccagatcagcagcagggctgtgtaccagtgcaacacctccaacgagcatggctacctgctggccaacgcctttgtcagtgtgctggatgtgccgcctcggatgctgtcgccccggaaccagctcattcgagtgattctttacaaccggacgcggctggactgccctttctttgggtctcccatccccacactgcgatggtttaagaatgggcaaggaagcaacctggatggtggcaactaccatgtttatgagaacggcagtctggaaattaagatgatccgcaaagaggaccagggcatctacacctgtgtcgccaccaacatcctgggcaaagctgaaaaccaagtccgcctggaggtcaaagaccccaccaggatctaccggatgcccgaggaccaggtggccagaaggggcaccacggtgcagctggagtgtcgggtgaagcacgacccctccctgaaactcaccgtctcctggctgaaggatgacgagccgctctatattggaaacaggatgaagaaggaagacgactccctgaccatctttggggtggcagagcgggaccagggcagttacacgtgtgtcgccagcaccgagctagaccaagacctggccaaggcctacctcaccgtgctagctgatcaggccactccaactaaccgtttggctgccctgcccaaaggacggccagaccggccccgggacctggagctgaccgacctggccgagaggagcgtgcggctgacctggatccccggggatgctaacaacagccccatcacagactacgtcgtccagtttgaagaagaccagttccaacctggggtctggcatgaccattccaagtaccccggcagcgttaactcagccgtcctccggctgtccccgtatgtcaactaccagttccgtgtcattgccatcaacgaggttgggagcagccaccccagcctcccatccgagcgctaccgaaccagtggagcaccccccgagtccaatcctggtgacgtgaagggagaggggaccagaaagaacaacatggagatcacgtggacgcccatgaatgccacctcggcctttggccccaacctgcgctacattgtcaagtggaggcggagagagactcgagaggcctggaacaacgtcacagtgtggggctctcgctacgtggtggggcagaccccagtctacgtgccctatgagatccgagtccaggctgaaaatgacttcgggaagggccctgagccagagtccgtcatcggttactccggagaagatttacccagtgcccctaggcgtttccgagtccggcagcccaacctggagacaatcaacctggaatgggatcatcctgagcatccaaatgggatcatgattggatacactctcaaatatgtggcctttaacgggaccaaagtaggaaagcagatagtggaaaacttctctcccaatcagaccaagttcacggtgcaaagaacggaccccgtgtcacgctaccgctttaccctcagcgccaggacgcaggtgggctctggggaagccgtcacagaggagtcaccagcacccccgaatgaagctactccaaccgcagcttacaccaacaaccaagcggacatcgccacccagggctggttcattgggcttatgtgcgccatcgccctcctggtgctgatcctgctcatcgtctgtttcatcaagaggagtcgcggcggcaagtacccagtacgagaaaagaaggatgttccccttggccctgaagaccccaaggaagaggatggctcatttgactatagtgatgaggacaacaagcccctgcagggcagtcagacatctctggacggcaccatcaagcagcaggagagtgacgacagcctggtggactatggcgagggtggcgagggtcagttcaatgaagacggctccttcatcggccagtacacggtcaaaaaggacaaggaggaaacagagggcaacgaaagctcagaggccacgtcacctgtcaatgctatctactctctggcctaacggagcccacccaggcacagccaccactttgcaagtgggaggaggggagaaggggagacaaaaccactgcagacctaccacgaagccaccaccaccttcagtaacaagggtacgatatgggggtctgccaagctgtgaggaccagtagccaccaagccacccacaagccccctcccaatgaccccccttcagccccgggtgccaccagtgtgggagagctggagccgtggctgagctcagctggagggagcctggccccttgcccggtctcgcagccaccccgagcgttccaccacactgtccgcccttggcctcggcacacgctcaccttttctgttggttacgggacttctcattgtcttaatttcgctttgtgcatcttcccctccagacccaatgtctctgttttcttttccttttgaaaaagagtccctggaaaagaaagaataagtggattctcccccaggagaatcctttttgcaaagataggcaaaaaggattgaatccataccagaacacgtagacaggctgtaatattcaaaccacctctgggccaatgcatttccaaaggatgcctttctcgccatatgcctcccctggcccccagcccctctgcctcggccttgtcagttgctgagctgggcttggctcctttctggaaaatgacagtatttttggcagggagaaggtgcgcaggcctccttgctgctctctggtttggttgggaggtgtgtttacctcttgctcctcattcctcccctgcccttttctctggaatatctaagatgtgagctgcattgactctgaagacgtttgaggaacaggagtgggcactgatagaaaggacttcaacgccagtgactgtgtacctccagcagaagaaaatcaggtgtctggtcttgggggcactgtgctcacttctagagagaagaaaaaggctgggtttggacttcatgcctcctcactggtgaaacccaggatgtagatagagggccacacccaccctgtccagagtagagggcacctgtccacgtggccagggcccatgctgccaccctcgaggagatggaaccctgtgatgcaaaagctttgctggtgtgtttggggcataaggcactgctccccttccatctctagcagatatcatcttctcagccaattctgtaggacactgaggctcttgtttgacatggtgtgtggatggggacttgccccaagactgagcaggtctgccctttcattggggtgtatacatatcaggggaccctgaggtggcaccgtactcagtgttgtgatgcccccacctagggaggactcaatgctctttgtatgccttatgcagcgctgatctgtccctggagttcccaggttcccagctccccccctgcaagccttgaagcctccagcaacgtctatctccaggagagcagggcagcctatgcaagtgttccggcaggaccagaagtggccactcaacacacgtcctcaccagtcaccccaaatggagacactcgcagacctgcagttctcagaccgaaggtgctgccttcatcctccccacctaatgcatttttgaaaccaaaggtacctagcctcagagacagagaaggagagggggagatcttgagtctaagaggaaccctttagctgtttctgcagctgaggtcagtttcaggagggtgaagctgatccccaggaatggatcagctgccatgggcacagcctccgatttgagcctctccggctgccagccagggggcctgggccagaccagggctctgtccttccgtgactttattaaagcaacatttgccacatgtttaagccgcaaa

SEQ ID NO: 158818 - DNA, 5447 bp, Homo sapiens
  Payload ID: 11071
  Gene Symbol: NFASC
  Gene Name: neurofascin
  Uniprot ID: O94856
  ENST ID: ENST00000404907
  CDS Start-End: 91-3615
ctgagtgctgtccaggaggcccagttaaagcggctcgaggtgacaagaccccgagtgctggggagcagggagcagggccaggtgccgaggatggccaggcagccaccgccgccctgggtccatgcagccttcctcctctgcctcctcagtcttggcggagccatcgaaattcctatggatctgacgcagccgccaaccatcaccaagcagtcagcgaaggatcacatcgtggacccccgtgataacatcctgattgagtgtgaagcaaaagggaaccctgcccccagcttccactggacacgaaacagcagattcttcaacatcgccaaggacccccgggtgtccatgaggaggaggtctgggaccctggtgattgacttccgcagtggcgggcggccggaggaatatgagggggaatatcagtgcttcgcccgcaacaaatttggcacggccctgtccaataggatccgcctgcaggtgtctaaatctcctctgtggcccaaggaaaacctagaccctgtcgtggtccaagagggcgctcctttgacgctccagtgcaaccccccgcctggacttccatccccggtcatcttctggatgagcagctccatggagcccatcacccaagacaaacgtgtctctcagggccataacggagacctatacttctccaacgtgatgctgcaggacatgcagaccgactacagttgtaacgcccgcttccacttcacccacaccatccagcagaagaaccctttcaccctcaaggtcctcaccaaccacccttataatgactcgtccttaagaaaccaccctgacatgtacagtgcccgaggagttgcagaaagaacaccaagcttcatgtatccccagggcaccgcgagcagccagatggtgcttcgtggcatggacctcctgctggaatgcatcgcctccggggtcccaacaccagacatcgcatggtacaagaaaggtggggacctcccatctgataaggccaagtttgagaactttaataaggccctgcgtatcacaaatgtctctgaggaagactccggggagtatttctgcctggcctccaacaagatgggcagcatccggcacacgatctcggtgagagtaaaggctgctccctactggctggacgaacccaagaaccttattctggctcctggcgaggatgggagactggtgtgtcgagccaatggaaaccccaaacccactgtccagtggatggtgaatggggaacctttgcaatcggcaccacctaacccaaaccgtgaggtggccggagacaccatcatcttccgggacacccagatcagcagcagggctgtgtaccagtgcaacacctccaacgagcatggctacctgctggccaacgcctttgtcagtgtgctggatgtgccgcctcggatgctgtcgccccggaaccagctcattcgagtgattctttacaaccggacgcggctggactgccctttctttgggtctcccatccccacactgcgatggtttaagaatgggcaaggaagcaacctggatggtggcaactaccatgtttatgagaacggcagtctggaaattaagatgatccgcaaagaggaccagggcatctacacctgtgtcgccaccaacatcctgggcaaagctgaaaaccaagtccgcctggaggtcaaagaccccaccaggatctaccggatgcccgaggaccaggtggccagaaggggcaccacggtgcagctggagtgtcgggtgaagcacgacccctccctgaaactcaccgtctcctggctgaaggatgacgagccgctctatattggaaacaggatgaagaaggaagacgactccctgaccatctttggggtggcagagcgggaccagggcagttacacgtgtgtcgccagcaccgagctagaccaagacctggccaaggcctacctcaccgtgctaggacggccagaccggccccgggacctggagctgaccgacctggccgagaggagcgtgcggctgacctggatccccggggatgctaacaacagccccatcacagactacgtcgtccagtttgaagaagaccagttccaacctggggtctggcatgaccattccaagtaccccggcagcgttaactcagccgtcctccggctgtccccgtatgtcaactaccagttccgtgtcattgccatcaacgaggttgggagcagccaccccagcctcccatccgagcgctaccgaaccagtggagcaccccccgagtccaatcctggtgacgtgaagggagaggggaccagaaagaacaacatggagatcacgtggacgcccatgaatgccacctcggcctttggccccaacctgcgctacattgtcaagtggaggcggagagagactcgagaggcctggaacaacgtcacagtgtggggctctcgctacgtggtggggcagaccccagtctacgtgccctatgagatccgagtccaggctgaaaatgacttcgggaagggccctgagccagagtccgtcatcggttactccggagaagattatcccagggctgcgcccactgaagttaaagtccgagtcatgaacagcacagccatcagccttcagtggaaccgcgtctactccgacacggtccagggccagctcagagagtaccgagcctactactggagggagagcagcttgctgaagaacctgtgggtgtctcagaagagacagcaagccagcttccctggtgaccgcctccgtggcgtggtgtcccgcctcttcccctacagtaactacaagctggagatggttgtggtcaatgggagaggtgatgggcctcgcagtgagaccaaggagttcaccaccccggaaggagtacccagtgcccctaggcgtttccgagtccggcagcccaacctggagacaatcaacctggaatgggatcatcctgagcatccaaatgggatcatgattggatacactctcaaatatgtggcctttaacgggaccaaagtaggaaagcagatagtggaaaacttctctcccaatcagaccaagttcacggtgcaaagaacggaccccgtgtcacgctaccgctttaccctcagcgccaggacgcaggtgggctctggggaagccgtcacagaggagtcaccagcacccccgaatgaagctactccaaccgcagcttacaccaacaaccaagcggacatcgccacccagggctggttcattgggcttatgtgcgccatcgccctcctggtgctgatcctgctcatcgtctgtttcatcaagaggagtcgcggcggcaagtacccagtacgagaaaagaaggatgttccccttggccctgaagaccccaaggaagaggatggctcatttgactatagtgatgaggacaacaagcccctgcagggcagtcagacatctctggacggcaccatcaagcagcaggagagtgacgacagcctggtggactatggcgagggtggcgagggtcagttcaatgaagacggctccttcatcggccagtacacggtcaaaaaggacaaggaggaaacagagggcaacgaaagctcagaggccacgtcacctgtcaatgctatctactctctggcctaacggagcccacccaggcacagccaccactttgcaagtgggaggaggggagaaggggagacaaaaccactgcagacctaccacgaagccaccaccaccttcagtaacaagggtacgatatgggggtctgccaagctgtgaggaccagtagccaccaagccacccacaagccccctcccaatgaccccccttcagccccgggtgccaccagtgtgggagagctggagccgtggctgagctcagctggagggagcctggccccttgcccggtctcgcagccaccccgagcgttccaccacactgtccgcccttggcctcggcacacgctcaccttttctgttggttacgggacttctcattgtcttaatttcgctttgtgcatcttcccctccagacccaatgtctctgttttcttttccttttgaaaaagagtccctggaaaagaaagaataagtggattctcccccaggagaatcctttttgcaaagataggcaaaaaggattgaatccataccagaacacgtagacaggctgtaatattcaaaccacctctgggccaatgcatttccaaaggatgcctttctcgccatatgcctcccctggcccccagcccctctgcctcggccttgtcagttgctgagctgggcttggctcctttctggaaaatgacagtatttttggcagggagaaggtgcgcaggcctccttgctgctctctggtttggttgggaggtgtgtttacctcttgctcctcattcctcccctgcccttttctctggaatatctaagatgtgagctgcattgactctgaagacgtttgaggaacaggagtgggcactgatagaaaggacttcaacgccagtgactgtgtacctccagcagaagaaaatcaggtgtctggtcttgggggcactgtgctcacttctagagagaagaaaaaggctgggtttggacttcatgcctcctcactggtgaaacccaggatgtagatagagggccacacccaccctgtccagagtagagggcacctgtccacgtggccagggcccatgctgccaccctcgaggagatggaaccctgtgatgcaaaagctttgctggtgtgtttggggcataaggcactgctccccttccatctctagcagatatcatcttctcagccaattctgtaggacactgaggctcttgtttgacatggtgtgtggatggggacttgccccaagactgagcaggtctgccctttcattggggtgtatacatatcaggggaccctgaggtggcaccgtactcagtgttgtgatgcccccacctagggaggactcaatgctctttgtatgccttatgcagcgctgatctgtccctggagttcccaggttcccagctccccccctgcaagccttgaagcctccagcaacgtctatctccaggagagcagggcagcctatgcaagtgttccggcaggaccagaagtggccactcaacacacgtcctcaccagtcaccccaaatggagacactcgcagacctgcagttctcagaccgaaggtgctgccttcatcctccccacctaatgcatttttgaaaccaaaggtacctagcctcagagacagagaaggagagggggagatcttgagtctaagaggaaccctttagctgtttctgcagctgaggtcagtttcaggagggtgaagctgatccccaggaatggatcagctgccatgggcacagcctccgatttgagcctctccggctgccagccagggggcctgggccagaccagggctctgtccttccgtgactttattaaagcaacatttgccacatgtttaagccgcaaa

SEQ ID NO: 158819 - DNA, 2462 bp, Homo sapiens
  Payload ID: 11071
  Gene Symbol: NFASC
  Gene Name: neurofascin
  Uniprot ID: O94856
  ENST ID: ENST00000403080
  CDS Start-End: 288-2147
gaggcgctgcaggggacgcgggggaagtggcggcgccggcagcggacagctcggacagcgcccagggccggagcccgagcccttggaggttgattgacttatgtgcaatttgggacgctggagtttaccttccctccgcagcctggaacagagcctcctctggtgttgcaaggaagaggctgaatgaggcagagaagctgagtgctgtccaggaggcccagttaaagcggctcgaggtgacaagaccccgagtgctggggagcagggagcagggccaggtgccgaggatggccaggcagccaccgccgccctgggtccatgcagccttcctcctctgcctcctcagtcttggcggagccatcgaaattcctatggatccaagcattcagaatgagctgacgcagccgccaaccatcaccaagcagtcagcgaaggatcacatcgtggacccccgtgataacatcctgattgagtgtgaagcaaaagggaaccctgcccccagcttccactggacacgaaacagcagattcttcaacatcgccaaggacccccgggtgtccatgaggaggaggtctgggaccctggtgattgacttccgcagtggcgggcggccggaggaatatgagggggaatatcagtgcttcgcccgcaacaaatttggcacggccctgtccaataggatccgcctgcaggtgtctaaatctcctctgtggcccaaggaaaacctagaccctgtcgtggtccaagagggcgctcctttgacgctccagtgcaaccccccgcctggacttccatccccggtcatcttctggatgagcagctccatggagcccatcacccaagacaaacgtgtctctcagggccataacggagacctatacttctccaacgtgatgctgcaggacatgcagaccgactacagttgtaacgcccgcttccacttcacccacaccatccagcagaagaaccctttcaccctcaaggtcctcaccacccgaggagttgcagaaagaacaccaagcttcatgtatccccagggcaccgcgagcagccagatggtgcttcgtggcatggacctcctgctggaatgcatcgcctccggggtcccaacaccagacatcgcatggtacaagaaaggtggggacctcccatctgataaggccaagtttgagaactttaataaggccctgcgtatcacaaatgtctctgaggaagactccggggagtatttctgcctggcctccaacaagatgggcagcatccggcacacgatctcggtgagagtaaaggctgctccctactggctggacgaacccaagaaccttattctggctcctggcgaggatgggagactggtgtgtcgagccaatggaaaccccaaacccactgtccagtggatggtgaatggggaacctttgcaatcggcaccacctaacccaaaccgtgaggtggccggagacaccatcatcttccgggacacccagatcagcagcagggctgtgtaccagtgcaacacctccaacgagcatggctacctgctggccaacgcctttgtcagtgtgctggatgtgccgcctcggatgctgtcgccccggaaccagctcattcgagtgattctttacaaccggacgcggctggactgccctttctttgggtctcccatccccacactgcgatggtttaagaatgggcaaggaagcaacctggatggtggcaactaccatgtttatgagaacggcagtctggaaattaagatgatccgcaaagaggaccagggcatctacacctgtgtcgccaccaacatcctgggcaaagctgaaaaccaagtccgcctggaggtcaaagaccccaccaggatctaccggatgcccgaggaccaggtggccagaaggggcaccacggtgcagctggagtgtcgggtgaagcacgacccctccctgaaactcaccgtctcctggctgaaggatgacgagccgctctatattggaaacaggatgaagaaggaagacgactccctgaccatctttggggtggcagagcgggaccagggcagttacacgtgtgtcgccagcaccgagctagaccaagacctggccaaggcctacctcaccgtgctaggtaactgcccatgctcaccctggcactgaccagccccaccccctccccagcagccagagaagcagtggcccggggcagttccgagggcagtgcctgcagtcaagtggccgggtcaggcgtggtgatctcttcttgcctcgtgatgtcagggttagggagctgccagtttcagaacaagctgtgctggacaggttacctcctgagtggagtcattaacttccccacgtctcaactgaaaggggcctgagtgatatagagaaagtggagaggggtttctcgttgtgatcattttacctttcttacagctaactccaccactaagtcaattaaaacaatccatcctt

SEQ ID NO: 158820 - DNA, 10205 bp, Homo sapiens
  Payload ID: 11071
  Gene Symbol: NFASC
  Gene Name: neurofascin
  Uniprot ID: O94856
  ENST ID: ENST00000401399
  CDS Start-End: 200-3922
gttgattgacttatgtgcaatttgggacgctggagtttaccttccctccgcagcctggaacagagcctcctctggtgttgcaaggaagaggctgaatgaggcagagaagctgagtgctgtccaggaggcccagttaaagcggctcgaggtgacaagaccccgagtgctggggagcagggagcagggccaggtgccgaggatggccaggcagccaccgccgccctgggtccatgcagccttcctcctctgcctcctcagtcttggcggagccatcgaaattcctatggatccaagcattcagaatgagctgacgcagccgccaaccatcaccaagcagtcagcgaaggatcacatcgtggacccccgtgataacatcctgattgagtgtgaagcaaaagggaaccctgcccccagcttccactggacacgaaacagcagattcttcaacatcgccaaggacccccgggtgtccatgaggaggaggtctgggaccctggtgattgacttccgcagtggcgggcggccggaggaatatgagggggaatatcagtgcttcgcccgcaacaaatttggcacggccctgtccaataggatccgcctgcaggtgtctaaatctcctctgtggcccaaggaaaacctagaccctgtcgtggtccaagagggcgctcctttgacgctccagtgcaaccccccgcctggacttccatccccggtcatcttctggatgagcagctccatggagcccatcacccaagacaaacgtgtctctcagggccataacggagacctatacttctccaacgtgatgctgcaggacatgcagaccgactacagttgtaacgcccgcttccacttcacccacaccatccagcagaagaaccctttcaccctcaaggtcctcaccacccgaggagttgcagaaagaacaccaagcttcatgtatccccagggcaccgcgagcagccagatggtgcttcgtggcatggacctcctgctggaatgcatcgcctccggggtcccaacaccagacatcgcatggtacaagaaaggtggggacctcccatctgataaggccaagtttgagaactttaataaggccctgcgtatcacaaatgtctctgaggaagactccggggagtatttctgcctggcctccaacaagatgggcagcatccggcacacgatctcggtgagagtaaaggctgctccctactggctggacgaacccaagaaccttattctggctcctggcgaggatgggagactggtgtgtcgagccaatggaaaccccaaacccactgtccagtggatggtgaatggggaacctttgcaatcggcaccacctaacccaaaccgtgaggtggccggagacaccatcatcttccgggacacccagatcagcagcagggctgtgtaccagtgcaacacctccaacgagcatggctacctgctggccaacgcctttgtcagtgtgctggatgtgccgcctcggatgctgtcgccccggaaccagctcattcgagtgattctttacaaccggacgcggctggactgccctttctttgggtctcccatccccacactgcgatggtttaagaatgggcaaggaagcaacctggatggtggcaactaccatgtttatgagaacggcagtctggaaattaagatgatccgcaaagaggaccagggcatctacacctgtgtcgccaccaacatcctgggcaaagctgaaaaccaagtccgcctggaggtcaaagaccccaccaggatctaccggatgcccgaggaccaggtggccagaaggggcaccacggtgcagctggagtgtcgggtgaagcacgacccctccctgaaactcaccgtctcctggctgaaggatgacgagccgctctatattggaaacaggatgaagaaggaagacgactccctgaccatctttggggtggcagagcgggaccagggcagttacacgtgtgtcgccagcaccgagctagaccaagacctggccaaggcctacctcaccgtgctagctgatcaggccactccaactaaccgtttggctgccctgcccaaaggacggccagaccggccccgggacctggagctgaccgacctggccgagaggagcgtgcggctgacctggatccccggggatgctaacaacagccccatcacagactacgtcgtccagtttgaagaagaccagttccaacctggggtctggcatgaccattccaagtaccccggcagcgttaactcagccgtcctccggctgtccccgtatgtcaactaccagttccgtgtcattgccatcaacgaggttgggagcagccaccccagcctcccatccgagcgctaccgaaccagtggagcaccccccgagtccaatcctggtgacgtgaagggagaggggaccagaaagaacaacatggagatcacgtggacgcccatgaatgccacctcggcctttggccccaacctgcgctacattgtcaagtggaggcggagagagactcgagaggcctggaacaacgtcacagtgtggggctctcgctacgtggtggggcagaccccagtctacgtgccctatgagatccgagtccaggctgaaaatgacttcgggaagggccctgagccagagtccgtcatcggttactccggagaagatttacccagtgcccctaggcgtttccgagtccggcagcccaacctggagacaatcaacctggaatgggatcatcctgagcatccaaatgggatcatgattggatacactctcaaatatgtggcctttaacgggaccaaagtaggaaagcagatagtggaaaacttctctcccaatcagaccaagttcacggtgcaaagaacggaccccgtgtcacgctaccgctttaccctcagcgccaggacgcaggtgggctctggggaagccgtcacagaggagtcaccagcacccccgaatgaagctactccaaccgcagctcctcccacattgcccccgactaccgtgggtgcgacgggcgctgtgagcagtaccgatgctactgccattgctgccaccaccgaagccacaacagtccccatcatcccaactgtcgcacctaccaccatcgccaccaccaccaccgtcgccacaactactacaaccactgctgccgccaccaccaccacggagagtcctcccaccaccacctccgggactaagatacacgaatccgcccctgatgagcagtccatatggaacgtcacggtgctccccaacagtaaatgggccaacatcacctggaagcacaatttcgggcccggaactgactttgtggttgagtacatcgacagcaaccatacgaaaaaaactgtcccagttaaggcccaggctcagcctatacagctgacagacctctatcccgggatgacatacacgttgcgggtttattcccgggacaacgagggcatcagcagtaccgtcatcacctttatgaccagtacagcttacaccaacaaccaagcggacatcgccacccagggctggttcattgggcttatgtgcgccatcgccctcctggtgctgatcctgctcatcgtctgtttcatcaagaggagtcgcggcggcaagtacccagtacgagaaaagaaggatgttccccttggccctgaagaccccaaggaagaggatggctcatttgactatagtgatgaggacaacaagcccctgcagggcagtcagacatctctggacggcaccatcaagcagcaggagagtgacgacagcctggtggactatggcgagggtggcgagggtcagttcaatgaagacggctccttcatcggccagtacacggtcaaaaaggacaaggaggaaacagagggcaacgaaagctcagaggccacgtcacctgtcaatgctatctactctctggcctaacggagcccacccaggcacagccaccactttgcaagtgggaggaggggagaaggggagacaaaaccactgcagacctaccacgaagccaccaccaccttcagtaacaagggtacgatatgggggtctgccaagctgtgaggaccagtagccaccaagccacccacaagccccctcccaatgaccccccttcagccccgggtgccaccagtgtgggagagctggagccgtggctgagctcagctggagggagcctggccccttgcccggtctcgcagccaccccgagcgttccaccacactgtccgcccttggcctcggcacacgctcaccttttctgttggttacgggacttctcattgtcttaatttcgctttgtgcatcttcccctccagacccaatgtctctgttttcttttccttttgaaaaagagtccctggaaaagaaagaataagtggattctcccccaggagaatcctttttgcaaagataggcaaaaaggattgaatccataccagaacacgtagacaggctgtaatattcaaaccacctctgggccaatgcatttccaaaggatgcctttctcgccatatgcctcccctggcccccagcccctctgcctcggccttgtcagttgctgagctgggcttggctcctttctggaaaatgacagtatttttggcagggagaaggtgcgcaggcctccttgctgctctctggtttggttgggaggtgtgtttacctcttgctcctcattcctcccctgcccttttctctggaatatctaagatgtgagctgcattgactctgaagacgtttgaggaacaggagtgggcactgatagaaaggacttcaacgccagtgactgtgtacctccagcagaagaaaatcaggtgtctggtcttgggggcactgtgctcacttctagagagaagaaaaaggctgggtttggacttcatgcctcctcactggtgaaacccaggatgtagatagagggccacacccaccctgtccagagtagagggcacctgtccacgtggccagggcccatgctgccaccctcgaggagatggaaccctgtgatgcaaaagctttgctggtgtgtttggggcataaggcactgctccccttccatctctagcagatatcatcttctcagccaattctgtaggacactgaggctcttgtttgacatggtgtgtggatggggacttgccccaagactgagcaggtctgccctttcattggggtgtatacatatcaggggaccctgaggtggcaccgtactcagtgttgtgatgcccccacctagggaggactcaatgctctttgtatgccttatgcagcgctgatctgtccctggagttcccaggttcccagctccccccctgcaagccttgaagcctccagcaacgtctatctccaggagagcagggcagcctatgcaagtgttccggcaggaccagaagtggccactcaacacacgtcctcaccagtcaccccaaatggagacactcgcagacctgcagttctcagaccgaaggtgctgccttcatcctccccacctaatgcatttttgaaaccaaaggtacctagcctcagagacagagaaggagagggggagatcttgagtctaagaggaaccctttagctgtttctgcagctgaggtcagtttcaggagggtgaagctgatccccaggaatggatcagctgccatgggcacagcctccgatttgagcctctccggctgccagccagggggcctgggccagaccagggctctgtccttccgtgactttattaaagcaacatttgccacatgtttaagccgcaaaggtattagcaatgcttgcatcattaataatcattcagttgaaggtcaagcccatagacacacactctctgctggtaagaaaccatagcccagaactgagccaataaggttgtttgaacctgagagtgtgtaatggtcatttgggccaagcctcagctagggctgctgcctggacgcctgaggggcagcttatcacagtgcaaggggacagggtaaacagcagggggtggggtgtgagcttggagggcccctcccctggatttcctccaacacctgcttggatactaggcccactgtccctgaagggaatgtcagggaagtgtgcctgtgagctgaattaaaggactggcctttccagaaaacgctttggatctgagcagagtagtcagtttctcagacactcattccatactgcaccgtacatgccagcgtacccattgcaccgaaagcaggcccttagggcaggaagggacgatgagcaagtctgccacaccacctggtgactgggaagggctgcttctctcgtaagggtcttggggagaagtaagcccgcagcctgcctctgcacctcgttccagtgtcctgccaggctctgtactgtcctttgtgtatgaagaaaatgctgttagccctctctcaggctgctgttctgtgggtgctgagagctgccccccatcaccacgccatcacacccctctgagcagaagcaaatctgaggctgaagaattaagttttccccaagcaaggaaggcaggtggtcagagagatcaaacgctgaggcgtggggattgcaggattcaggaggcagcccctttggggaagaggagggtgcattttccatggagcccatgtcagagtccactccagctcagcaggaaagtggaattgcccagtactgcctgccagctgggtctcccaagcaactaccccaagacataccaacagtgaagccaggacagcaccatgccatcggcgctccagtctgtctggctgggaggaaagtgctgggcatcttacagtaactctagaagttcctttgactaggctgcaatcccacctatatgctcagccctaagagctgtggtttcctgtgctctcatttgtccattcattcattcattcattcattcagcaaataatctgaaatccagtctgaactaaggcctgagctgtggataccatggcgcgtgagttagatgtggtccctgccctcatggggctgacagtcctaaaatcaagtgctaggacacagtggccattgagctgggagcattcttccctctaccgcttaagccactgatggctgcgagcttgaagagagggattctgagggagagcttggtccatctggtcaccaaggctgggcgggacagagcagtcaagaaccacggtgtggcttgagaaacagtcctgcttcctgagcctctttgctctgcctcttggggcaagctccttaacctgtctgtatttttatgcctctgtctcccattcagttcctccttgaatacctctttctacagagaggcacgggctcccctgaaggattgtcgaggccagggttcgggaagtacactgccatcggtcaggggacagctgcctcccaccttgcctgggtgatggtgaatgggactcatcttttcctgccttgcttttgaggagatggttgaatttaagctaacaggaaagccaaaccagcaccctcctttgtgctctgagaggttggagacatctggtccaccccattgcccctgcccctggcaagccctgaagtcgggagaggtgaccacaggtctgaaaatcagccagtgccaacattgcttgccctgcaaggtgcaactgagcccacatagcgcattcatagtttccctgaccacagccttgggaagacggtggaaacccgaggatgtgtgggtttcccagctaacggacaagctcccctgccacacccagtgcccacgcatgctcacatacatacagcagaccacaaccctgttgccaagcagtgcttccaagggatagcgatccagattccaacattgtcttggagagggttagtccacatccaagttgcgtgagataagatgcaaagggctctgtgtggatgaggaacgcaccttagaggagtgggaaaggccaccagggttgggccctgtttaggtaattcctgttggcagcacctagagagagcatctgagctgaaggagtgggaaactttgcccaagcaatggcacgggcagcgggctctttctggcgccctgtgctggagcagggccaagtcttagggcatcacaaacagcccatttgatggagggagcagggacatagcacatttttgtctgtctttgtgaggctgctttgctaactctctgaggagaggaagcctctcgggctttccgtcggctggggctagtgccagagaatcccttctcagtggccagcaggttcctgggaggccggcacaaggcaccgctccccactcatgacaccttggtgcagagtgacctcctgcccagtcaccactccggccagccccagccaaacacacaaaagcccatggttgcggttgcatctacaccgttagttggcaaaggatcctgcttgagctctgcgtggtggccaaggagtagcatggaggagggccctgattttaaaaaggaaaaatagagaggcctcaaaacaatgaaacaaagagcttgatatgtcaagaggagaccaaggccctgggaggcataggcaagccgggcagagtcagaccagtgccctcccttgaccatctcctagcattccttaacctagacaggggctaccccatgtgagtccaagccagactttgtggctgtccccagcctgcacagcccaagcccagggaagtgtcctttctttcccttccttactaataatgggccttcctgagacacattcagagaaggatcagagagaaaggagaaccatccaggagagccacaagcgtccaccaaacagtgtctcaggcctcacctgaagctgctgttcctcctatcagcacactagtattaaatgggtgttccataatgaggagaatggaaataggtacaaggcatctagcttaggacagaatcggatttcggcatgtgaaggaatcccagagctgatctcattgaaatgatctatcgtacagacaaggatatgcaaatccacagaagtgaagggatttttgctcaagatcacatagctggtaaactaaggtaaggttagggcttgaacttgggccttctgactccttgtccagtcagtgttctttcatctcaccacagctgcctcctttgaaacagaggtattaagatctgtccttctggttcaccctctcatacctctttactgcgtctcccacatcccccacatgcctcccaaaatgaaagacaaacaggattgtttctgagaccaagatcagtctgtctgtgatcagcctgtgtgtggttcacccagtcatgcaattaagggcagatctgggccagtggaataggatagctgattggtgtttgttactgtgaaccctagaccgtaccccgtagaatggtgtctcttgctttgtaacacatcgggccttcagtgtgctgtattcctcagaagtgagggcatctcggtccattctgcccatggccacagggtgcagagaggcagcagggcccatgcaagctgccaccctgggatttgctgggctggagttcaacagatgtaaagacttcagtgaagcaataaacacaaaactctgggagaagatatccagaattttgtacattactctgtttctttttcaaaaatgaggcagatcagatgcccctgagctgcccctttttttctgattcccaactgcaatgtcctcagtcagtgttgtccctctgcccggctccccagctctttgccaacctcttcacactccccttgagctgagcatcagtcgcctgtgacgtggccaccttctgtcctgctcccactcccgacccatgctggaccccggaggacctcctgccccgcccccaccacacacccatatcccccaccattccaatttgttctttcccgtggggaattttttttcccagcgtctccatcccttcctacatatccacacacacacaaattggtctgatcttttttccattggttaaacatttaactccatgccagaccttgttttaacccctctcacatcatgttctttccttttttgcgagttattttgcattaaccaactttgtcagtgacagatgcgtatctgagggtgtcacacacgaccttcagcagggaagacttctgggccatggagggccgtctaatacatggacttataaactgactgcatgagcaatgaaaaggccaaattattctgaattttttttgaatcactgtaaaaaaactgatttcttttgtatagagaacactaaacgtataataaaagttgttcaaaatgga

SEQ ID NO: 158821 - DNA, 5728 bp, Homo sapiens
  Payload ID: 11071
  Gene Symbol: NFASC
  Gene Name: neurofascin
  Uniprot ID: O94856
  ENST ID: ENST00000404076
  CDS Start-End: 423-3896
gacaaggagcagggaagccaggaattattttgattccacccagggcagggctgctgtgttttctctgaggccaactttcagggaaaagaaggatcttgctgggattttgctcaggcctaagtctgccagctgggatggcctggggcctaagaaatgcctagcttccctccccacctgtccccatggagggagactgagaagacgctggatgaaccagaccatggttgattgacttatgtgcaatttgggacgctggagtttaccttccctccgcagcctggaacagagcctcctctggtgttgcaaggaagaggctgaatgaggcagagaagctgagtgctgtccaggaggcccagttaaagcggctcgaggtgacaagaccccgagtgctggggagcagggagcagggccaggtgccgaggatggccaggcagccaccgccgccctgggtccatgcagccttcctcctctgcctcctcagtcttggcggagccatcgaaattcctatggatctgacgcagccgccaaccatcaccaagcagtcagcgaaggatcacatcgtggacccccgtgataacatcctgattgagtgtgaagcaaaagggaaccctgcccccagcttccactggacacgaaacagcagattcttcaacatcgccaaggacccccgggtgtccatgaggaggaggtctgggaccctggtgattgacttccgcagtggcgggcggccggaggaatatgagggggaatatcagtgcttcgcccgcaacaaatttggcacggccctgtccaataggatccgcctgcaggtgtctaaatctcctctgtggcccaaggaaaacctagaccctgtcgtggtccaagagggcgctcctttgacgctccagtgcaaccccccgcctggacttccatccccggtcatcttctggatgagcagctccatggagcccatcacccaagacaaacgtgtctctcagggccataacggagacctatacttctccaacgtgatgctgcaggacatgcagaccgactacagttgtaacgcccgcttccacttcacccacaccatccagcagaagaaccctttcaccctcaaggtcctcaccacccgaggagttgcagaaagaacaccaagcttcatgtatccccagggcaccgcgagcagccagatggtgcttcgtggcatggacctcctgctggaatgcatcgcctccggggtcccaacaccagacatcgcatggtacaagaaaggtggggacctcccatctgataaggccaagtttgagaactttaataaggccctgcgtatcacaaatgtctctgaggaagactccggggagtatttctgcctggcctccaacaagatgggcagcatccggcacacgatctcggtgagagtaaaggctgctccctactggctggacgaacccaagaaccttattctggctcctggcgaggatgggagactggtgtgtcgagccaatggaaaccccaaacccactgtccagtggatggtgaatggggaacctttgcaatcggcaccacctaacccaaaccgtgaggtggccggagacaccatcatcttccgggacacccagatcagcagcagggctgtgtaccagtgcaacacctccaacgagcatggctacctgctggccaacgcctttgtcagtgtgctggatgtgccgcctcggatgctgtcgccccggaaccagctcattcgagtgattctttacaaccggacgcggctggactgccctttctttgggtctcccatccccacactgcgatggtttaagaatgggcaaggaagcaacctggatggtggcaactaccatgtttatgagaacggcagtctggaaattaagatgatccgcaaagaggaccagggcatctacacctgtgtcgccaccaacatcctgggcaaagctgaaaaccaagtccgcctggaggtcaaagaccccaccaggatctaccggatgcccgaggaccaggtggccagaaggggcaccacggtgcagctggagtgtcgggtgaagcacgacccctccctgaaactcaccgtctcctggctgaaggatgacgagccgctctatattggaaacaggatgaagaaggaagacgactccctgaccatctttggggtggcagagcgggaccagggcagttacacgtgtgtcgccagcaccgagctagaccaagacctggccaaggcctacctcaccgtgctaggacggccagaccggccccgggacctggagctgaccgacctggccgagaggagcgtgcggctgacctggatccccggggatgctaacaacagccccatcacagactacgtcgtccagtttgaagaagaccagttccaacctggggtctggcatgaccattccaagtaccccggcagcgttaactcagccgtcctccggctgtccccgtatgtcaactaccagttccgtgtcattgccatcaacgaggttgggagcagccaccccagcctcccatccgagcgctaccgaaccagtggagcaccccccgagtccaatcctggtgacgtgaagggagaggggaccagaaagaacaacatggagatcacgtggacgcccatgaatgccacctcggcctttggccccaacctgcgctacattgtcaagtggaggcggagagagactcgagaggcctggaacaacgtcacagtgtggggctctcgctacgtggtggggcagaccccagtctacgtgccctatgagatccgagtccaggctgaaaatgacttcgggaagggccctgagccagagtccgtcatcggttactccggagaagattatcccagggctgcgcccactgaagttaaagtccgagtcatgaacagcacagccatcagccttcagtggaaccgcgtctactccgacacggtccagggccagctcagagagtaccgagcctactactggagggagagcagcttgctgaagaacctgtgggtgtctcagaagagacagcaagccagcttccctggtgaccgcctccgtggcgtggtgtcccgcctcttcccctacagtaactacaagctggagatggttgtggtcaatgggagaggtgatgggcctcgcagtgagaccaaggagttcaccaccccggaaggagtacccagtgcccctaggcgtttccgagtccggcagcccaacctggagacaatcaacctggaatgggatcatcctgagcatccaaatgggatcatgattggatacactctcaaatatgtggcctttaacgggaccaaagtaggaaagcagatagtggaaaacttctctcccaatcagaccaagttcacggtgcaaagaacggaccccgtgtcacgctaccgctttaccctcagcgccaggacgcaggtgggctctggggaagccgtcacagaggagtcaccagcacccccgaatgaagctactccaaccgcagcttacaccaacaaccaagcggacatcgccacccagggctggttcattgggcttatgtgcgccatcgccctcctggtgctgatcctgctcatcgtctgtttcatcaagaggagtcgcggcggcaagtacccagtacgagaaaagaaggatgttccccttggccctgaagaccccaaggaagaggatggctcatttgactatagtgatgaggacaacaagcccctgcagggcagtcagacatctctggacggcaccatcaagcagcaggagagtgacgacagcctggtggactatggcgagggtggcgagggtcagttcaatgaagacggctccttcatcggccagtacacggtcaaaaaggacaaggaggaaacagagggcaacgaaagctcagaggccacgtcacctgtcaatgctatctactctctggcctaacggagcccacccaggcacagccaccactttgcaagtgggaggaggggagaaggggagacaaaaccactgcagacctaccacgaagccaccaccaccttcagtaacaagggtacgatatgggggtctgccaagctgtgaggaccagtagccaccaagccacccacaagccccctcccaatgaccccccttcagccccgggtgccaccagtgtgggagagctggagccgtggctgagctcagctggagggagcctggccccttgcccggtctcgcagccaccccgagcgttccaccacactgtccgcccttggcctcggcacacgctcaccttttctgttggttacgggacttctcattgtcttaatttcgctttgtgcatcttcccctccagacccaatgtctctgttttcttttccttttgaaaaagagtccctggaaaagaaagaataagtggattctcccccaggagaatcctttttgcaaagataggcaaaaaggattgaatccataccagaacacgtagacaggctgtaatattcaaaccacctctgggccaatgcatttccaaaggatgcctttctcgccatatgcctcccctggcccccagcccctctgcctcggccttgtcagttgctgagctgggcttggctcctttctggaaaatgacagtatttttggcagggagaaggtgcgcaggcctccttgctgctctctggtttggttgggaggtgtgtttacctcttgctcctcattcctcccctgcccttttctctggaatatctaagatgtgagctgcattgactctgaagacgtttgaggaacaggagtgggcactgatagaaaggacttcaacgccagtgactgtgtacctccagcagaagaaaatcaggtgtctggtcttgggggcactgtgctcacttctagagagaagaaaaaggctgggtttggacttcatgcctcctcactggtgaaacccaggatgtagatagagggccacacccaccctgtccagagtagagggcacctgtccacgtggccagggcccatgctgccaccctcgaggagatggaaccctgtgatgcaaaagctttgctggtgtgtttggggcataaggcactgctccccttccatctctagcagatatcatcttctcagccaattctgtaggacactgaggctcttgtttgacatggtgtgtggatggggacttgccccaagactgagcaggtctgccctttcattggggtgtatacatatcaggggaccctgaggtggcaccgtactcagtgttgtgatgcccccacctagggaggactcaatgctctttgtatgccttatgcagcgctgatctgtccctggagttcccaggttcccagctccccccctgcaagccttgaagcctccagcaacgtctatctccaggagagcagggcagcctatgcaagtgttccggcaggaccagaagtggccactcaacacacgtcctcaccagtcaccccaaatggagacactcgcagacctgcagttctcagaccgaaggtgctgccttcatcctccccacctaatgcatttttgaaaccaaaggtacctagcctcagagacagagaaggagagggggagatcttgagtctaagaggaaccctttagctgtttctgcagctgaggtcagtttcaggagggtgaagctgatccccaggaatggatcagctgccatgggcacagcctccgatttgagcctctccggctgccagccagggggcctgggccagaccagggctctgtccttccgtgactttattaaagcaacatttgccacatgtttaagccgcaaa

SEQ ID NO: 158822 - DNA, 709 bp, Homo sapiens
  Payload ID: 11071
  Gene Symbol: NFASC
  Gene Name: neurofascin
  ENST ID: ENST00000413225
  CDS Start-End: 1-709
ggaaaacttctctcccaatcagaccaagttcacggtgcaaagaacggaccccgtgtcacgctaccgctttaccctcagcgccaggacgcaggtgggctctggggaagccgtcacagaggagtcaccagcacccccgaatgaagctactccaaccgcagcccctgatgagcagtccatatggaacgtcacggtgctccccaacagtaaatgggccaacatcacctggaagcacaatttcgggcccggaactgactttgtggttgagtacatcgacagcaaccatacgaaaaaaactgtcccagttaaggcccaggctcagcctatacagctgacagacctctatcccgggatgacatacacgttgcgggtttattcccgggacaacgagggcatcagcagtaccgtcatcacctttatgaccagtacagcttacaccaacaaccaagcggacatcgccacccagggctggttcattgggcttatgtgcgccatcgccctcctggtgctgatcctgctcatcgtctgtttcatcaagaggagtcgcggcggcaagtacccagtacgagaaaagaaggatgttccccttggccctgaagaccccaaggaagaggatggctcatttgactatagtgatgaggacaacaagcccctgcagggcagtcagacatctctggacggcaccatcaagcagcaggagagtgacgacagc

SEQ ID NO: 158823 - DNA, 2728 bp, Homo sapiens
  Payload ID: 11071
  Gene Symbol: NFASC
  Gene Name: neurofascin
  ENST ID: ENST00000425360
  CDS Start-End: 1-896
ggagagagactcgagaggcctggaacaacgtcacagtgtggggctctcgctacgtggtggggcagaccccagtctacgtgccctatgagatccgagtccaggctgaaaatgacttcgggaagggccctgagccagagtccgtcatcggttactccggagaagatttacccagtgcccctaggcgtttccgagtccggcagcccaacctggagacaatcaacctggaatgggatcatcctgagcatccaaatgggatcatgattggatacactctcaaatatgtggcctttaacgggaccaaagtaggaaagcagatagtggaaaacttctctcccaatcagaccaagttcacggtgcaaagaacggaccccgtgtcacgctaccgctttaccctcagcgccaggacgcaggtgggctctggggaagccgtcacagaggagtcaccagcacccccgaatgaagcttacaccaacaaccaagcggacatcgccacccagggctggttcattgggcttatgtgcgccatcgccctcctggtgctgatcctgctcatcgtctgtttcatcaagaggagtcgcggcggcaagtacccagtacgagaaaagaaggatgttccccttggccctgaagaccccaaggaagaggatggctcatttgactatagtgatgaggacaacaagcccctgcagggcagtcagacatctctggacggcaccatcaagcagcaggagagtgacgacagcctggtggactatggcgagggtggcgagggtcagttcaatgaagacggctccttcatcggccagtacacggtcaaaaaggacaaggaggaaacagagggcaacgaaagctcagaggccacgtcacctgtcaatgctatctactctctggcctaacggagcccacccaggcacagccaccactttgcaagtgggaggaggggagaaggggagacaaaaccactgcagacctaccacgaagccaccaccaccttcagtaacaagggtacgatatgggggtctgccaagctgtgaggaccagtagccaccaagccacccacaagccccctcccaatgaccccccttcagccccgggtgccaccagtgtgggagagctggagccgtggctgagctcagctggagggagcctggccccttgcccggtctcgcagccaccccgagcgttccaccacactgtccgcccttggcctcggcacacgctcaccttttctgttggttacgggacttctcattgtcttaatttcgctttgtgcatcttcccctccagacccaatgtctctgttttcttttccttttgaaaaagagtccctggaaaagaaagaataagtggattctcccccaggagaatcctttttgcaaagataggcaaaaaggattgaatccataccagaacacgtagacaggctgtaatattcaaaccacctctgggccaatgcatttccaaaggatgcctttctcgccatatgcctcccctggcccccagcccctctgcctcggccttgtcagttgctgagctgggcttggctcctttctggaaaatgacagtatttttggcagggagaaggtgcgcaggcctccttgctgctctctggtttggttgggaggtgtgtttacctcttgctcctcattcctcccctgcccttttctctggaatatctaagatgtgagctgcattgactctgaagacgtttgaggaacaggagtgggcactgatagaaaggacttcaacgccagtgactgtgtacctccagcagaagaaaatcaggtgtctggtcttgggggcactgtgctcacttctagagagaagaaaaaggctgggtttggacttcatgcctcctcactggtgaaacccaggatgtagatagagggccacacccaccctgtccagagtagagggcacctgtccacgtggccagggcccatgctgccaccctcgaggagatggaaccctgtgatgcaaaagctttgctggtgtgtttggggcataaggcactgctccccttccatctctagcagatatcatcttctcagccaattctgtaggacactgaggctcttgtttgacatggtgtgtggatggggacttgccccaagactgagcaggtctgccctttcattggggtgtatacatatcaggggaccctgaggtggcaccgtactcagtgttgtgatgcccccacctagggaggactcaatgctctttgtatgccttatgcagcgctgatctgtccctggagttcccaggttcccagctccccccctgcaagccttgaagcctccagcaacgtctatctccaggagagcagggcagcctatgcaagtgttccggcaggaccagaagtggccactcaacacacgtcctcaccagtcaccccaaatggagacactcgcagacctgcagttctcagaccgaaggtgctgccttcatcctccccacctaatgcatttttgaaaccaaaggtacctagcctcagagacagagaaggagagggggagatcttgagtctaagaggaaccctttagctgtttctgcagctgaggtcagtttcaggagggtgaagctgatccccaggaatggatcagctgccatgggcacagcctccgatttgagcctctccggctgccagccagggggcctgggccagaccagggctctgtccttccgtgactttattaaagcaacatttgccacatgtttaagccgcaaa

SEQ ID NO: 158824 - DNA, 5330 bp, Homo sapiens
  Payload ID: 11071
  Gene Symbol: NFASC
  Gene Name: neurofascin
  ENST ID: ENST00000430393
  CDS Start-End: 1-3498
atcgaaattcctatggatctgacgcagccgccaaccatcaccaagcagtcagcgaaggatcacatcgtggacccccgtgataacatcctgattgagtgtgaagcaaaagggaaccctgcccccagcttccactggacacgaaacagcagattcttcaacatcgccaaggacccccgggtgtccatgaggaggaggtctgggaccctggtgattgacttccgcagtggcgggcggccggaggaatatgagggggaatatcagtgcttcgcccgcaacaaatttggcacggccctgtccaataggatccgcctgcaggtgtctaaatctcctctgtggcccaaggaaaacctagaccctgtcgtggtccaagagggcgctcctttgacgctccagtgcaaccccccgcctggacttccatccccggtcatcttctggatgagcagctccatggagcccatcacccaagacaaacgtgtctctcagggccataacggagacctatacttctccaacgtgatgctgcaggacatgcagaccgactacagttgtaacgcccgcttccacttcacccacaccatccagcagaagaaccctttcaccctcaaggtcctcaccaaccacccttataatgactcgtccttaagaaaccaccctgacatgtacagtgcccgaggagttgcagaaagaacaccaagcttcatgtatccccagggcaccgcgagcagccagatggtgcttcgtggcatggacctcctgctggaatgcatcgcctccggggtcccaacaccagacatcgcatggtacaagaaaggtggggacctcccatctgataaggccaagtttgagaactttaataaggccctgcgtatcacaaatgtctctgaggaagactccggggagtatttctgcctggcctccaacaagatgggcagcatccggcacacgatctcggtgagagtaaaggctgctccctactggctggacgaacccaagaaccttattctggctcctggcgaggatgggagactggtgtgtcgagccaatggaaaccccaaacccactgtccagtggatggtgaatggggaacctttgcaatcggcaccacctaacccaaaccgtgaggtggccggagacaccatcatcttccgggacacccagatcagcagcagggctgtgtaccagtgcaacacctccaacgagcatggctacctgctggccaacgcctttgtcagtgtgctggatgtgccgcctcggatgctgtcgccccggaaccagctcattcgagtgattctttacaaccggacgcggctggactgccctttctttgggtctcccatccccacactgcgatggtttaagaatgggcaaggaagcaacctggatggtggcaactaccatgtttatgagaacggcagtctggaaattaagatgatccgcaaagaggaccagggcatctacacctgtgtcgccaccaacatcctgggcaaagctgaaaaccaagtccgcctggaggtcaaagaccccaccaggatctaccggatgcccgaggaccaggtggccagaaggggcaccacggtgcagctggagtgtcgggtgaagcacgacccctccctgaaactcaccgtctcctggctgaaggatgacgagccgctctatattggaaacaggatgaagaaggaagacgactccctgaccatctttggggtggcagagcgggaccagggcagttacacgtgtgtcgccagcaccgagctagaccaagacctggccaaggcctacctcaccgtgctagctgatcaggccactccaactaaccgtttggctgccctgcccaaaggacggccagaccggccccgggacctggagctgaccgacctggccgagaggagcgtgcggctgacctggatccccggggatgctaacaacagccccatcacagactacgtcgtccagtttgaagaagaccagttccaacctggggtctggcatgaccattccaagtaccccggcagcgttaactcagccgtcctccggctgtccccgtatgtcaactaccagttccgtgtcattgccatcaacgaggttgggagcagccaccccagcctcccatccgagcgctaccgaaccagtggagcaccccccgagtccaatcctggtgacgtgaagggagaggggaccagaaagaacaacatggagatcacgtggacgcccatgaatgccacctcggcctttggccccaacctgcgctacattgtcaagtggaggcggagagagactcgagaggcctggaacaacgtcacagtgtggggctctcgctacgtggtggggcagaccccagtctacgtgccctatgagatccgagtccaggctgaaaatgacttcgggaagggccctgagccagagtccgtcatcggttactccggagaagattatcccagggctgcgcccactgaagttaaagtccgagtcatgaacagcacagccatcagccttcagtggaaccgcgtctactccgacacggtccagggccagctcagagagtaccgagcctactactggagggagagcagcttgctgaagaacctgtgggtgtctcagaagagacagcaagccagcttccctggtgaccgcctccgtggcgtggtgtcccgcctcttcccctacagtaactacaagctggagatggttgtggtcaatgggagaggtgatgggcctcgcagtgagaccaaggagttcaccaccccggaaggagtacccagtgcccctaggcgtttccgagtccggcagcccaacctggagacaatcaacctggaatgggatcatcctgagcatccaaatgggatcatgattggatacactctcaaatatgtggcctttaacgggaccaaagtaggaaagcagatagtggaaaacttctctcccaatcagaccaagttcacggtgcaaagaacggaccccgtgtcacgctaccgctttaccctcagcgccaggacgcaggtgggctctggggaagccgtcacagaggagtcaccagcacccccgaatgaagctactccaaccgcagcttacaccaacaaccaagcggacatcgccacccagggctggttcattgggcttatgtgcgccatcgccctcctggtgctgatcctgctcatcgtctgtttcatcaagaggagtcgcggcggcaagtacccagtacgagaaaagaaggatgttccccttggccctgaagaccccaaggaagaggatggctcatttgactatagtgatgaggacaacaagcccctgcagggcagtcagacatctctggacggcaccatcaagcagcaggagagtgacgacagcctggtggactatggcgagggtggcgagggtcagttcaatgaagacggctccttcatcggccagtacacggtcaaaaaggacaaggaggaaacagagggcaacgaaagctcagaggccacgtcacctgtcaatgctatctactctctggcctaacggagcccacccaggcacagccaccactttgcaagtgggaggaggggagaaggggagacaaaaccactgcagacctaccacgaagccaccaccaccttcagtaacaagggtacgatatgggggtctgccaagctgtgaggaccagtagccaccaagccacccacaagccccctcccaatgaccccccttcagccccgggtgccaccagtgtgggagagctggagccgtggctgagctcagctggagggagcctggccccttgcccggtctcgcagccaccccgagcgttccaccacactgtccgcccttggcctcggcacacgctcaccttttctgttggttacgggacttctcattgtcttaatttcgctttgtgcatcttcccctccagacccaatgtctctgttttcttttccttttgaaaaagagtccctggaaaagaaagaataagtggattctcccccaggagaatcctttttgcaaagataggcaaaaaggattgaatccataccagaacacgtagacaggctgtaatattcaaaccacctctgggccaatgcatttccaaaggatgcctttctcgccatatgcctcccctggcccccagcccctctgcctcggccttgtcagttgctgagctgggcttggctcctttctggaaaatgacagtatttttggcagggagaaggtgcgcaggcctccttgctgctctctggtttggttgggaggtgtgtttacctcttgctcctcattcctcccctgcccttttctctggaatatctaagatgtgagctgcattgactctgaagacgtttgaggaacaggagtgggcactgatagaaaggacttcaacgccagtgactgtgtacctccagcagaagaaaatcaggtgtctggtcttgggggcactgtgctcacttctagagagaagaaaaaggctgggtttggacttcatgcctcctcactggtgaaacccaggatgtagatagagggccacacccaccctgtccagagtagagggcacctgtccacgtggccagggcccatgctgccaccctcgaggagatggaaccctgtgatgcaaaagctttgctggtgtgtttggggcataaggcactgctccccttccatctctagcagatatcatcttctcagccaattctgtaggacactgaggctcttgtttgacatggtgtgtggatggggacttgccccaagactgagcaggtctgccctttcattggggtgtatacatatcaggggaccctgaggtggcaccgtactcagtgttgtgatgcccccacctagggaggactcaatgctctttgtatgccttatgcagcgctgatctgtccctggagttcccaggttcccagctccccccctgcaagccttgaagcctccagcaacgtctatctccaggagagcagggcagcctatgcaagtgttccggcaggaccagaagtggccactcaacacacgtcctcaccagtcaccccaaatggagacactcgcagacctgcagttctcagaccgaaggtgctgccttcatcctccccacctaatgcatttttgaaaccaaaggtacctagcctcagagacagagaaggagagggggagatcttgagtctaagaggaaccctttagctgtttctgcagctgaggtcagtttcaggagggtgaagctgatccccaggaatggatcagctgccatgggcacagcctccgatttgagcctctccggctgccagccagggggcctgggccagaccagggctctgtccttccgtgactttattaaagcaacatttgccacatgtttaagccgcaaa

SEQ ID NO: 158825 - DNA, 2857 bp, Homo sapiens
  Payload ID: 11071
  Gene Symbol: NFASC
  Gene Name: neurofascin
  ENST ID: ENST00000447819
  CDS Start-End: 1-657
cccccgactaccgtgggtgcgacgggcgctgtgagcagtaccgatgctactgccattgctgccaccaccgaagccacaacagtccccatcatcccaactgtcgcacctaccaccatcgccaccaccaccaccgtcgccacaactactacaaccactgctgccgccaccaccaccacggagagtcctcccaccaccacctccgggactaagatacacgaatccgcttacaccaacaaccaagcggacatcgccacccagggctggttcattgggcttatgtgcgccatcgccctcctggtgctgatcctgctcatcgtctgtttcatcaagaggagtcgcggcggcaagtacccagtacgagaaaagaaggatgttccccttggccctgaagaccccaaggaagaggatggctcatttgactatagtgatgaggacaacaagcccctgcagggcagtcagacatctctggacggcaccatcaagcagcaggagagtgacgacagcctggtggactatggcgagggtggcgagggtcagttcaatgaagacggctccttcatcggccagtacacggtcaaaaaggacaaggaggaaacagagggcaacgaaagctcagaggccacgtcacctgtcaatgctatctactctctggcctaacggagcccacccaggcacagccaccactttgcaagtgggaggaggggagaaggggagacaaaaccactgcagacctaccacgaagccaccaccaccttcagtaacaagggtacgatatgggggtctgccaagctgtgaggaccagtagccaccaagccacccacaagccccctcccaatgaccccccttcagccccgggtgccaccagtgtgggagagctggagccgtggctgagctcagctggagggagcctggccccttgcccggtctcgcagccaccccgagcgttccaccacactgtccgcccttggcctcggcacacgctcaccttttctgttggttacgggacttctcattgtcttaatttcgctttgtgcatcttcccctccagacccaatgtctctgttttcttttccttttgaaaaagagtccctggaaaagaaagaataagtggattctcccccaggagaatcctttttgcaaagataggcaaaaaggattgaatccataccagaacacgtagacaggctgtaatattcaaaccacctctgggccaatgcatttccaaaggatgcctttctcgccatatgcctcccctggcccccagcccctctgcctcggccttgtcagttgctgagctgggcttggctcctttctggaaaatgacagtatttttggcagggagaaggtgcgcaggcctccttgctgctctctggtttggttgggaggtgtgtttacctcttgctcctcattcctcccctgcccttttctctggaatatctaagatgtgagctgcattgactctgaagacgtttgaggaacaggagtgggcactgatagaaaggacttcaacgccagtgactgtgtacctccagcagaagaaaatcaggtgtctggtcttgggggcactgtgctcacttctagagagaagaaaaaggctgggtttggacttcatgcctcctcactggtgaaacccaggatgtagatagagggccacacccaccctgtccagagtagagggcacctgtccacgtggccagggcccatgctgccaccctcgaggagatggaaccctgtgatgcaaaagctttgctggtgtgtttggggcataaggcactgctccccttccatctctagcagatatcatcttctcagccaattctgtaggacactgaggctcttgtttgacatggtgtgtggatggggacttgccccaagactgagcaggtctgccctttcattggggtgtatacatatcaggggaccctgaggtggcaccgtactcagtgttgtgatgcccccacctagggaggactcaatgctctttgtatgccttatgcagcgctgatctgtccctggagttcccaggttcccagctccccccctgcaagccttgaagcctccagcaacgtctatctccaggagagcagggcagcctatgcaagtgttccggcaggaccagaagtggccactcaacacacgtcctcaccagtcaccccaaatggagacactcgcagacctgcagttctcagaccgaaggtgctgccttcatcctccccacctaatgcatttttgaaaccaaaggtacctagcctcagagacagagaaggagagggggagatcttgagtctaagaggaaccctttagctgtttctgcagctgaggtcagtttcaggagggtgaagctgatccccaggaatggatcagctgccatgggcacagcctccgatttgagcctctccggctgccagccagggggcctgggccagaccagggctctgtccttccgtgactttattaaagcaacatttgccacatgtttaagccgcaaaggtattagcaatgcttgcatcattaataatcattcagttgaaggtcaagcccatagacacacactctctgctggtaagaaaccatagcccagaactgagccaataaggttgtttgaacctgagagtgtgtaatggtcatttgggccaagcctcagctagggctgctgcctggacgcctgaggggcagcttatcacagtgcaaggggacagggtaaacagcagggggtggggtgtgagcttggagggcccctcccctggatttcctccaacacctgcttggatactaggcccactgtccctgaagggaatgtcagggaagtgtgcctgtgagctgaattaaaggactggcctttccagaaaacgctttg

SEQ ID NO: 158826 - DNA, 4126 bp, Homo sapiens
  Payload ID: 11071
  Gene Symbol: NFASC
  Gene Name: neurofascin
  ENST ID: ENST00000504476
  CDS Start-End: 66-1526
taaagcggctcgaggtgacaagaccccgagtgctggggagcagggagcagggccaggtgccgaggatggccaggcagccaccgccgccctgggtccatgcagccttcctcctctgcctcctcagtcttggcggagccatcgaaattcctatggatccaagcattcagaatgagctgacgcagccgccaaccatcaccaagcagtcagcgaaggatcacatcgtggacccccgtgataacatcctgattgagtgtgaagcaaaagggaaccctgcccccagcttccactggacacgaaacagcagattcttcaacatcgccaaggacccccgggtgtccatgaggaggaggtctgggaccctggtgattgacttccgcagtggcgggcggccggaggaatatgagggggaatatcagtgcttcgcccgcaacaaatttggcacggccctgtccaataggatccgcctgcaggtgtctaaatctcctctgtggcccaaggaaaacctagaccctgtcgtggtccaagagggcgctcctttgacgctccagtgcaaccccccgcctggacttccatccccggtcatcttctggatgagcagctccatggagcccatcacccaagacaaacgtgtctctcagggccataacggagacctatacttctccaacgtgatgctgcaggacatgcagaccgactacagttgtaacgcccgcttccacttcacccacaccatccagcagaagaaccctttcaccctcaaggtcctcaccaaccacccttataatgactcgtccttaagaaaccaccctgacatgtacagtgcccgaggagttgcagaaagaacaccaagcttcatgtatccccagggcaccgcgagcagccagatggtgcttcgtggcatggacctcctgctggaatgcatcgcctccggggtcccaacaccagacatcgcatggtacaagaaaggtggggacctcccatctgataaggccaagtttgagaactttaataaggccctgcgtatcacaaatgtctctgaggaagactccggggagtatttctgcctggcctccaacaagatgggcagcatccggcacacgatctcggtgagagtaaaggctgctccctactggctggacgaacccaagaaccttattctggctcctggcgaggatgggagactggtgtgtcgagccaatggaaaccccaaacccactgtccagtggatggtgaatggggaacctttgcaatcggcaccacctaacccaaaccgtgaggtggccggagacaccatcatcttccgggacacccagatcagcagcagggctgtgtaccagtgcaacacctccaacgagcatggctacctgctggccaacgcctttgtcagtgtgctggatgtgccgcctcggatgctgtcgccccggaaccagctcattcgagtgattctttacaaccggacgcggctggactgccctttctttgggtctcccatccccacactgcgatgcccccatggtctctcttgattggctgctgcccctgcccttgggctggtcctgtctcaggatgctgtgtgttctgctgctctgttgtgaggtttaagaatgggcaaggaagcaacctggatggtggcaactaccatgtttatgagaacggcagtctggaaattaagatgatccgcaaagaggaccagggcatctacacctgtgtcgccaccaacatcctgggcaaagctgaaaaccaagtccgcctggaggtcaaagaccccaccaggatctaccggatgcccgaggaccaggtggccagaaggggcaccacggtgcagctggagtgtcgggtgaagcacgacccctccctgaaactcaccgtctcctggctgaaggatgacgagccgctctatattggaaacaggatgaagaaggaagacgactccctgaccatctttggggtggcagagcgggaccagggcagttacacgtgtgtcgccagcaccgagctagaccaagacctggccaaggcctacctcaccgtgctagctgatcaggccactccaactaaccgtttggctgccctgcccaaaggacggccagaccggccccgggacctggagctgaccgacctggccgagaggagcgtgcggctgacctggatccccggggatgctaacaacagccccatcacagactacgtcgtccagtttgaagaagaccagttccaacctggggtctggcatgaccattccaagtaccccggcagcgttaactcagccgtcctccggctgtccccgtatgtcaactaccagttccgtgtcattgccatcaacgaggttgggagcagccaccccagcctcccatccgagcgctaccgaaccagtggagcaccccccgagtccaatcctggtgacgtgaagggagaggggaccagaaagaacaacatggagatcacgtggacgcccatgaatgccacctcggcctttggccccaacctgcgctacattgtcaagtggaggcggagagagactcgagaggcctggaacaacgtcacagtgtggggctctcgctacgtggtggggcagaccccagtctacgtgccctatgagatccgagtccaggctgaaaatgacttcgggaagggccctgagccagagtccgtcatcggttactccggagaagattatcccagggctgcgcccactgaagttaaagtccgagtcatgaacagcacagccatcagccttcagtggaaccgcgtctactccgacacggtccagggccagctcagagagtaccgagcctactactggagggagagcagcttgctgaagaacctgtgggtgtctcagaagagacagcaagccagcttccctggtgaccgcctccgtggcgtggtgtcccgcctcttcccctacagtaactacaagctggagatggttgtggtcaatgggagaggtgatgggcctcgcagtgagaccaaggagttcaccaccccggaaggagtacccagtgcccctaggcgtttccgagtccggcagcccaacctggagacaatcaacctggaatgggatcatcctgagcatccaaatgggatcatgattggatacactctcaaatatgtggcctttaacgggaccaaagtaggaaagcagatagtggaaaacttctctcccaatcagaccaagttcacggtgcaaagaacggaccccgtgtcacgctaccgctttaccctcagcgccaggacgcaggtgggctctggggaagccgtcacagaggagtcaccagcacccccgaatgaagcttacaccaacaaccaagcggacatcgccacccagggctggttcattgggcttatgtgcgccatcgccctcctggtgctgatcctgctcatcgtctgtttcatcaagaggagtcgcggcggcaagtacccagtacgagaaaagaaggatgttccccttggccctgaagaccccaaggaagaggatggctcatttgactatagtgatgaggacaacaagcccctgcagggcagtcagacatctctggacggcaccatcaagcagcaggagagtgacgacagcctggtggactatggcgagggtggcgagggtcagttcaatgaagacggctccttcatcggccagtacacggtcaaaaaggacaaggaggaaacagagggcaacgaaagctcagaggccacgtcacctgtcaatgctatctactctctggcctaacggagcccacccaggcacagccaccactttgcaagtgggaggaggggagaaggggagacaaaaccactgcagacctaccacgaagccaccaccaccttcagtaacaagggtacgatatgggggtctgccaagctgtgaggaccagtagccaccaagccacccacaagccccctcccaatgaccccccttcagccccgggtgccaccagtgtgggagagctggagccgtggctgagctcagctggagggagcctggccccttgcccggtctcgcagccaccccgagcgttccaccacactgtccgcccttggcctcggcacacgctcaccttttctgttggttacgggacttctcattgtcttaatttcgctttgtgcatcttcccctccagacccaatg

SEQ ID NO: 158827 - DNA, 3974 bp, Homo sapiens
  Payload ID: 11071
  Gene Symbol: NFASC
  Gene Name: neurofascin
  Uniprot ID: O94856
  ENST ID: ENST00000513543
  CDS Start-End: 66-3575
taaagcggctcgaggtgacaagaccccgagtgctggggagcagggagcagggccaggtgccgaggatggccaggcagccaccgccgccctgggtccatgcagccttcctcctctgcctcctcagtcttggcggagccatcgaaattcctatggatctgacgcagccgccaaccatcaccaagcagtcagcgaaggatcacatcgtggacccccgtgataacatcctgattgagtgtgaagcaaaagggaaccctgcccccagcttccactggacacgaaacagcagattcttcaacatcgccaaggacccccgggtgtccatgaggaggaggtctgggaccctggtgattgacttccgcagtggcgggcggccggaggaatatgagggggaatatcagtgcttcgcccgcaacaaatttggcacggccctgtccaataggatccgcctgcaggtgtctaaatctcctctgtggcccaaggaaaacctagaccctgtcgtggtccaagagggcgctcctttgacgctccagtgcaaccccccgcctggacttccatccccggtcatcttctggatgagcagctccatggagcccatcacccaagacaaacgtgtctctcagggccataacggagacctatacttctccaacgtgatgctgcaggacatgcagaccgactacagttgtaacgcccgcttccacttcacccacaccatccagcagaagaaccctttcaccctcaaggtcctcaccaaccacccttataatgactcgtccttaagaaaccaccctgacatgtacagtgcccgaggagttgcagaaagaacaccaagcttcatgtatccccagggcaccgcgagcagccagatggtgcttcgtggcatggacctcctgctggaatgcatcgcctccggggtcccaacaccagacatcgcatggtacaagaaaggtggggacctcccatctgataaggccaagtttgagaactttaataaggccctgcgtatcacaaatgtctctgaggaagactccggggagtatttctgcctggcctccaacaagatgggcagcatccggcacacgatctcggtgagagtaaaggctgctccctactggctggacgaacccaagaaccttattctggctcctggcgaggatgggagactggtgtgtcgagccaatggaaaccccaaacccactgtccagtggatggtgaatggggaacctttgcaatcggcaccacctaacccaaaccgtgaggtggccggagacaccatcatcttccgggacacccagatcagcagcagggctgtgtaccagtgcaacacctccaacgagcatggctacctgctggccaacgcctttgtcagtgtgctggatgtgccgcctcggatgctgtcgccccggaaccagctcattcgagtgattctttacaaccggacgcggctggactgccctttctttgggtctcccatccccacactgcgatggtttaagaatgggcaaggaagcaacctggatggtggcaactaccatgtttatgagaacggcagtctggaaattaagatgatccgcaaagaggaccagggcatctacacctgtgtcgccaccaacatcctgggcaaagctgaaaaccaagtccgcctggaggtcaaagaccccaccaggatctaccggatgcccgaggaccaggtggccagaaggggcaccacggtgcagctggagtgtcgggtgaagcacgacccctccctgaaactcaccgtctcctggctgaaggatgacgagccgctctatattggaaacaggatgaagaaggaagacgactccctgaccatctttggggtggcagagcgggaccagggcagttacacgtgtgtcgccagcaccgagctagaccaagacctggccaaggcctacctcaccgtgctaggacggccagaccggccccgggacctggagctgaccgacctggccgagaggagcgtgcggctgacctggatccccggggatgctaacaacagccccatcacagactacgtcgtccagtttgaagaagaccagttccaacctggggtctggcatgaccattccaagtaccccggcagcgttaactcagccgtcctccggctgtccccgtatgtcaactaccagttccgtgtcattgccatcaacgaggttgggagcagccaccccagcctcccatccgagcgctaccgaaccagtggagcaccccccgagtccaatcctggtgacgtgaagggagaggggaccagaaagaacaacatggagatcacgtggacgcccatgaatgccacctcggcctttggccccaacctgcgctacattgtcaagtggaggcggagagagactcgagaggcctggaacaacgtcacagtgtggggctctcgctacgtggtggggcagaccccagtctacgtgccctatgagatccgagtccaggctgaaaatgacttcgggaagggccctgagccagagtccgtcatcggttactccggagaagattatcccagggctgcgcccactgaagttaaagtccgagtcatgaacagcacagccatcagccttcagtggaaccgcgtctactccgacacggtccagggccagctcagagagtaccgagcctactactggagggagagcagcttgctgaagaacctgtgggtgtctcagaagagacagcaagccagcttccctggtgaccgcctccgtggcgtggtgtcccgcctcttcccctacagtaactacaagctggagatggttgtggtcaatgggagaggtgatgggcctcgcagtgagaccaaggagttcaccaccccggaaggagtacccagtgcccctaggcgtttccgagtccggcagcccaacctggagacaatcaacctggaatgggatcatcctgagcatccaaatgggatcatgattggatacactctcaaatatgtggcctttaacgggaccaaagtaggaaagcagatagtggaaaacttctctcccaatcagaccaagttcacggtgcaaagaacggaccccgtgtcacgctaccgctttaccctcagcgccaggacgcaggtgggctctggggaagccgtcacagaggagtcaccagcacccccgaatgaagcttacaccaacaaccaagcggacatcgccacccagggctggttcattgggcttatgtgcgccatcgccctcctggtgctgatcctgctcatcgtctgtttcatcaagaggagtcgcggcggcaagtacccagtacgagaaaagaaggatgttccccttggccctgaagaccccaaggaagaggatggctcatttgactatagtgatgaggacaacaagcccctgcagggcagtcagacatctctggacggcaccatcaagcagcaggagagtgacgacagcctggtggactatggcgagggtggcgagggtcagttcaatgaagacggctccttcatcggccagtacacggtcaaaaaggacaaggaggaaacagagggcaacgaaagctcagaggccacgtcacctgtcaatgctatctactctctggcctaacggagcccacccaggcacagccaccactttgcaagtgggaggaggggagaaggggagacaaaaccactgcagacctaccacgaagccaccaccaccttcagtaacaagggtacgatatgggggtctgccaagctgtgaggaccagtagccaccaagccacccacaagccccctcccaatgaccccccttcagccccgggtgccaccagtgtgggagagctggagccgtggctgagctcagctggagggagcctggccccttgcccggtctcgcagccaccccgagcgttccaccacactgtccgcccttggcctcggcacacgctcaccttttctgttggttacgggacttctcattgtcttaatttcgctttgtgcatcttcccctccagacccaatg

SEQ ID NO: 158828 - DNA, 573 bp, Homo sapiens
  Payload ID: 11071
  Gene Symbol: NFASC
  Gene Name: neurofascin
  ENST ID: ENST00000505079
  CDS Start-End: 185-573
ttctagaagacaatgactggttgaccccacaccggccaggaagctgggtttctctccctgagtgtgggggaggccgaggtcctgaagcaggctgctgagtgctgtccaggaggcccagttaaagcggctcgaggtgacaagaccccgagtgctggggagcagggagcagggccaggtgccgaggatggccaggcagccaccgccgccctgggtccatgcagccttcctcctctgcctcctcagtcttggcggagccatcgaaattcctatggatccaagcattcagaatgagctgacgcagccgccaaccatcaccaagcagtcagcgaaggatcacatcgtggacccccgtgataacatcctgattgagtgtgaagcaaaagggaaccctgcccccagcttccactggacacgaaacagcagattcttcaacatcgccaaggacccccgggtgtccatgaggaggaggtctgggaccctggtgattgacttccgcagtggcgggcggccggaggaatatgagggggaatatcagtgcttcgcccgcaacaaatttggcacggccctgtccaa

SEQ ID NO: 158829 - DNA, 10135 bp, Homo sapiens
  Payload ID: 11071
  Gene Symbol: NFASC
  Gene Name: neurofascin
  Uniprot ID: O94856
  ENST ID: ENST00000539706
  CDS Start-End: 329-3853
gcacgggctggtctctgccctaatgcggcggctggcggcgagaggcgctgcaggggacgcgggggaagtggcggcgccggcagcggacagctcggacagcgcccagggccggagcccgagcccttggaggttgattgacttatgtgcaatttgggacgctggagtttaccttccctccgcagcctggaacagagcctcctctggtgttgcaaggaagaggctgaatgaggcagagaagctgagtgctgtccaggaggcccagttaaagcggctcgaggtgacaagaccccgagtgctggggagcagggagcagggccaggtgccgaggatggccaggcagccaccgccgccctgggtccatgcagccttcctcctctgcctcctcagtcttggcggagccatcgaaattcctatggatctgacgcagccgccaaccatcaccaagcagtcagcgaaggatcacatcgtggacccccgtgataacatcctgattgagtgtgaagcaaaagggaaccctgcccccagcttccactggacacgaaacagcagattcttcaacatcgccaaggacccccgggtgtccatgaggaggaggtctgggaccctggtgattgacttccgcagtggcgggcggccggaggaatatgagggggaatatcagtgcttcgcccgcaacaaatttggcacggccctgtccaataggatccgcctgcaggtgtctaaatctcctctgtggcccaaggaaaacctagaccctgtcgtggtccaagagggcgctcctttgacgctccagtgcaaccccccgcctggacttccatccccggtcatcttctggatgagcagctccatggagcccatcacccaagacaaacgtgtctctcagggccataacggagacctatacttctccaacgtgatgctgcaggacatgcagaccgactacagttgtaacgcccgcttccacttcacccacaccatccagcagaagaaccctttcaccctcaaggtcctcaccaaccacccttataatgactcgtccttaagaaaccaccctgacatgtacagtgcccgaggagttgcagaaagaacaccaagcttcatgtatccccagggcaccgcgagcagccagatggtgcttcgtggcatggacctcctgctggaatgcatcgcctccggggtcccaacaccagacatcgcatggtacaagaaaggtggggacctcccatctgataaggccaagtttgagaactttaataaggccctgcgtatcacaaatgtctctgaggaagactccggggagtatttctgcctggcctccaacaagatgggcagcatccggcacacgatctcggtgagagtaaaggctgctccctactggctggacgaacccaagaaccttattctggctcctggcgaggatgggagactggtgtgtcgagccaatggaaaccccaaacccactgtccagtggatggtgaatggggaacctttgcaatcggcaccacctaacccaaaccgtgaggtggccggagacaccatcatcttccgggacacccagatcagcagcagggctgtgtaccagtgcaacacctccaacgagcatggctacctgctggccaacgcctttgtcagtgtgctggatgtgccgcctcggatgctgtcgccccggaaccagctcattcgagtgattctttacaaccggacgcggctggactgccctttctttgggtctcccatccccacactgcgatggtttaagaatgggcaaggaagcaacctggatggtggcaactaccatgtttatgagaacggcagtctggaaattaagatgatccgcaaagaggaccagggcatctacacctgtgtcgccaccaacatcctgggcaaagctgaaaaccaagtccgcctggaggtcaaagaccccaccaggatctaccggatgcccgaggaccaggtggccagaaggggcaccacggtgcagctggagtgtcgggtgaagcacgacccctccctgaaactcaccgtctcctggctgaaggatgacgagccgctctatattggaaacaggatgaagaaggaagacgactccctgaccatctttggggtggcagagcgggaccagggcagttacacgtgtgtcgccagcaccgagctagaccaagacctggccaaggcctacctcaccgtgctaggacggccagaccggccccgggacctggagctgaccgacctggccgagaggagcgtgcggctgacctggatccccggggatgctaacaacagccccatcacagactacgtcgtccagtttgaagaagaccagttccaacctggggtctggcatgaccattccaagtaccccggcagcgttaactcagccgtcctccggctgtccccgtatgtcaactaccagttccgtgtcattgccatcaacgaggttgggagcagccaccccagcctcccatccgagcgctaccgaaccagtggagcaccccccgagtccaatcctggtgacgtgaagggagaggggaccagaaagaacaacatggagatcacgtggacgcccatgaatgccacctcggcctttggccccaacctgcgctacattgtcaagtggaggcggagagagactcgagaggcctggaacaacgtcacagtgtggggctctcgctacgtggtggggcagaccccagtctacgtgccctatgagatccgagtccaggctgaaaatgacttcgggaagggccctgagccagagtccgtcatcggttactccggagaagattatcccagggctgcgcccactgaagttaaagtccgagtcatgaacagcacagccatcagccttcagtggaaccgcgtctactccgacacggtccagggccagctcagagagtaccgagcctactactggagggagagcagcttgctgaagaacctgtgggtgtctcagaagagacagcaagccagcttccctggtgaccgcctccgtggcgtggtgtcccgcctcttcccctacagtaactacaagctggagatggttgtggtcaatgggagaggtgatgggcctcgcagtgagaccaaggagttcaccaccccggaaggagtacccagtgcccctaggcgtttccgagtccggcagcccaacctggagacaatcaacctggaatgggatcatcctgagcatccaaatgggatcatgattggatacactctcaaatatgtggcctttaacgggaccaaagtaggaaagcagatagtggaaaacttctctcccaatcagaccaagttcacggtgcaaagaacggaccccgtgtcacgctaccgctttaccctcagcgccaggacgcaggtgggctctggggaagccgtcacagaggagtcaccagcacccccgaatgaagctactccaaccgcagcttacaccaacaaccaagcggacatcgccacccagggctggttcattgggcttatgtgcgccatcgccctcctggtgctgatcctgctcatcgtctgtttcatcaagaggagtcgcggcggcaagtacccagtacgagaaaagaaggatgttccccttggccctgaagaccccaaggaagaggatggctcatttgactatagtgatgaggacaacaagcccctgcagggcagtcagacatctctggacggcaccatcaagcagcaggagagtgacgacagcctggtggactatggcgagggtggcgagggtcagttcaatgaagacggctccttcatcggccagtacacggtcaaaaaggacaaggaggaaacagagggcaacgaaagctcagaggccacgtcacctgtcaatgctatctactctctggcctaacggagcccacccaggcacagccaccactttgcaagtgggaggaggggagaaggggagacaaaaccactgcagacctaccacgaagccaccaccaccttcagtaacaagggtacgatatgggggtctgccaagctgtgaggaccagtagccaccaagccacccacaagccccctcccaatgaccccccttcagccccgggtgccaccagtgtgggagagctggagccgtggctgagctcagctggagggagcctggccccttgcccggtctcgcagccaccccgagcgttccaccacactgtccgcccttggcctcggcacacgctcaccttttctgttggttacgggacttctcattgtcttaatttcgctttgtgcatcttcccctccagacccaatgtctctgttttcttttccttttgaaaaagagtccctggaaaagaaagaataagtggattctcccccaggagaatcctttttgcaaagataggcaaaaaggattgaatccataccagaacacgtagacaggctgtaatattcaaaccacctctgggccaatgcatttccaaaggatgcctttctcgccatatgcctcccctggcccccagcccctctgcctcggccttgtcagttgctgagctgggcttggctcctttctggaaaatgacagtatttttggcagggagaaggtgcgcaggcctccttgctgctctctggtttggttgggaggtgtgtttacctcttgctcctcattcctcccctgcccttttctctggaatatctaagatgtgagctgcattgactctgaagacgtttgaggaacaggagtgggcactgatagaaaggacttcaacgccagtgactgtgtacctccagcagaagaaaatcaggtgtctggtcttgggggcactgtgctcacttctagagagaagaaaaaggctgggtttggacttcatgcctcctcactggtgaaacccaggatgtagatagagggccacacccaccctgtccagagtagagggcacctgtccacgtggccagggcccatgctgccaccctcgaggagatggaaccctgtgatgcaaaagctttgctggtgtgtttggggcataaggcactgctccccttccatctctagcagatatcatcttctcagccaattctgtaggacactgaggctcttgtttgacatggtgtgtggatggggacttgccccaagactgagcaggtctgccctttcattggggtgtatacatatcaggggaccctgaggtggcaccgtactcagtgttgtgatgcccccacctagggaggactcaatgctctttgtatgccttatgcagcgctgatctgtccctggagttcccaggttcccagctccccccctgcaagccttgaagcctccagcaacgtctatctccaggagagcagggcagcctatgcaagtgttccggcaggaccagaagtggccactcaacacacgtcctcaccagtcaccccaaatggagacactcgcagacctgcagttctcagaccgaaggtgctgccttcatcctccccacctaatgcatttttgaaaccaaaggtacctagcctcagagacagagaaggagagggggagatcttgagtctaagaggaaccctttagctgtttctgcagctgaggtcagtttcaggagggtgaagctgatccccaggaatggatcagctgccatgggcacagcctccgatttgagcctctccggctgccagccagggggcctgggccagaccagggctctgtccttccgtgactttattaaagcaacatttgccacatgtttaagccgcaaaggtattagcaatgcttgcatcattaataatcattcagttgaaggtcaagcccatagacacacactctctgctggtaagaaaccatagcccagaactgagccaataaggttgtttgaacctgagagtgtgtaatggtcatttgggccaagcctcagctagggctgctgcctggacgcctgaggggcagcttatcacagtgcaaggggacagggtaaacagcagggggtggggtgtgagcttggagggcccctcccctggatttcctccaacacctgcttggatactaggcccactgtccctgaagggaatgtcagggaagtgtgcctgtgagctgaattaaaggactggcctttccagaaaacgctttggatctgagcagagtagtcagtttctcagacactcattccatactgcaccgtacatgccagcgtacccattgcaccgaaagcaggcccttagggcaggaagggacgatgagcaagtctgccacaccacctggtgactgggaagggctgcttctctcgtaagggtcttggggagaagtaagcccgcagcctgcctctgcacctcgttccagtgtcctgccaggctctgtactgtcctttgtgtatgaagaaaatgctgttagccctctctcaggctgctgttctgtgggtgctgagagctgccccccatcaccacgccatcacacccctctgagcagaagcaaatctgaggctgaagaattaagttttccccaagcaaggaaggcaggtggtcagagagatcaaacgctgaggcgtggggattgcaggattcaggaggcagcccctttggggaagaggagggtgcattttccatggagcccatgtcagagtccactccagctcagcaggaaagtggaattgcccagtactgcctgccagctgggtctcccaagcaactaccccaagacataccaacagtgaagccaggacagcaccatgccatcggcgctccagtctgtctggctgggaggaaagtgctgggcatcttacagtaactctagaagttcctttgactaggctgcaatcccacctatatgctcagccctaagagctgtggtttcctgtgctctcatttgtccattcattcattcattcattcattcagcaaataatctgaaatccagtctgaactaaggcctgagctgtggataccatggcgcgtgagttagatgtggtccctgccctcatggggctgacagtcctaaaatcaagtgctaggacacagtggccattgagctgggagcattcttccctctaccgcttaagccactgatggctgcgagcttgaagagagggattctgagggagagcttggtccatctggtcaccaaggctgggcgggacagagcagtcaagaaccacggtgtggcttgagaaacagtcctgcttcctgagcctctttgctctgcctcttggggcaagctccttaacctgtctgtatttttatgcctctgtctcccattcagttcctccttgaatacctctttctacagagaggcacgggctcccctgaaggattgtcgaggccagggttcgggaagtacactgccatcggtcaggggacagctgcctcccaccttgcctgggtgatggtgaatgggactcatcttttcctgccttgcttttgaggagatggttgaatttaagctaacaggaaagccaaaccagcaccctcctttgtgctctgagaggttggagacatctggtccaccccattgcccctgcccctggcaagccctgaagtcgggagaggtgaccacaggtctgaaaatcagccagtgccaacattgcttgccctgcaaggtgcaactgagcccacatagcgcattcatagtttccctgaccacagccttgggaagacggtggaaacccgaggatgtgtgggtttcccagctaacggacaagctcccctgccacacccagtgcccacgcatgctcacatacatacagcagaccacaaccctgttgccaagcagtgcttccaagggatagcgatccagattccaacattgtcttggagagggttagtccacatccaagttgcgtgagataagatgcaaagggctctgtgtggatgaggaacgcaccttagaggagtgggaaaggccaccagggttgggccctgtttaggtaattcctgttggcagcacctagagagagcatctgagctgaaggagtgggaaactttgcccaagcaatggcacgggcagcgggctctttctggcgccctgtgctggagcagggccaagtcttagggcatcacaaacagcccatttgatggagggagcagggacatagcacatttttgtctgtctttgtgaggctgctttgctaactctctgaggagaggaagcctctcgggctttccgtcggctggggctagtgccagagaatcccttctcagtggccagcaggttcctgggaggccggcacaaggcaccgctccccactcatgacaccttggtgcagagtgacctcctgcccagtcaccactccggccagccccagccaaacacacaaaagcccatggttgcggttgcatctacaccgttagttggcaaaggatcctgcttgagctctgcgtggtggccaaggagtagcatggaggagggccctgattttaaaaaggaaaaatagagaggcctcaaaacaatgaaacaaagagcttgatatgtcaagaggagaccaaggccctgggaggcataggcaagccgggcagagtcagaccagtgccctcccttgaccatctcctagcattccttaacctagacaggggctaccccatgtgagtccaagccagactttgtggctgtccccagcctgcacagcccaagcccagggaagtgtcctttctttcccttccttactaataatgggccttcctgagacacattcagagaaggatcagagagaaaggagaaccatccaggagagccacaagcgtccaccaaacagtgtctcaggcctcacctgaagctgctgttcctcctatcagcacactagtattaaatgggtgttccataatgaggagaatggaaataggtacaaggcatctagcttaggacagaatcggatttcggcatgtgaaggaatcccagagctgatctcattgaaatgatctatcgtacagacaaggatatgcaaatccacagaagtgaagggatttttgctcaagatcacatagctggtaaactaaggtaaggttagggcttgaacttgggccttctgactccttgtccagtcagtgttctttcatctcaccacagctgcctcctttgaaacagaggtattaagatctgtccttctggttcaccctctcatacctctttactgcgtctcccacatcccccacatgcctcccaaaatgaaagacaaacaggattgtttctgagaccaagatcagtctgtctgtgatcagcctgtgtgtggttcacccagtcatgcaattaagggcagatctgggccagtggaataggatagctgattggtgtttgttactgtgaaccctagaccgtaccccgtagaatggtgtctcttgctttgtaacacatcgggccttcagtgtgctgtattcctcagaagtgagggcatctcggtccattctgcccatggccacagggtgcagagaggcagcagggcccatgcaagctgccaccctgggatttgctgggctggagttcaacagatgtaaagacttcagtgaagcaataaacacaaaactctgggagaagatatccagaattttgtacattactctgtttctttttcaaaaatgaggcagatcagatgcccctgagctgcccctttttttctgattcccaactgcaatgtcctcagtcagtgttgtccctctgcccggctccccagctctttgccaacctcttcacactccccttgagctgagcatcagtcgcctgtgacgtggccaccttctgtcctgctcccactcccgacccatgctggaccccggaggacctcctgccccgcccccaccacacacccatatcccccaccattccaatttgttctttcccgtggggaattttttttcccagcgtctccatcccttcctacatatccacacacacacaaattggtctgatcttttttccattggttaaacatttaactccatgccagaccttgttttaacccctctcacatcatgttctttccttttttgcgagttattttgcattaaccaactttgtcagtgacagatgcgtatctgagggtgtcacacacgaccttcagcagggaagacttctgggccatggagggccgtctaatacatggacttataaactgactgcatgagcaatgaaaaggccaaattattctgaattttttttgaatcactgtaaaaaaactgatttcttttgtatagagaacactaaacgtataataaaagttgttcaaaatgg

SEQ ID NO: 158830 - DNA, 12362 bp, Homo sapiens
  Payload ID: 11072
  Gene Symbol: NF1
  Gene Name: neurofibromin 1
  Uniprot ID: P21359
  ENST ID: ENST00000356175
  CDS Start-End: 384-8840
aatctctagctcgctcgcgctccctctccccgggccgtggaaaggatcccacttccggtggggtgtcatggcggcgtctcggactgtgatggctgtggggagacggcgctagtggggagagcgaccaagaggccccctcccctccccgggtccccttcccctatccccctccccccagcctccttgccaacgccccctttccctctccccctcccgctcggcgctgaccccccatccccacccccgtgggaacactgggagcctgcactccacagaccctctccttgcctcttccctcacctcagcctccgctccccgccctcttcccggcccagggcgccggcccacccttccctccgccgccccccggccgcggggaggacatggccgcgcacaggccggtggaatgggtccaggccgtggtcagccgcttcgacgagcagcttccaataaaaacaggacagcagaacacacataccaaagtcagtactgagcacaacaaggaatgtctaatcaatatttccaaatacaagttttctttggttataagcggcctcactactattttaaagaatgttaacaatatgagaatatttggagaagctgctgaaaaaaatttatatctctctcagttgattatattggatacactggaaaaatgtcttgctgggcaaccaaaggacacaatgagattagatgaaacgatgctggtcaaacagttgctgccagaaatctgccattttcttcacacctgtcgtgaaggaaaccagcatgcagctgaacttcggaattctgcctctggggttttattttctctcagctgcaacaacttcaatgcagtctttagtcgcatttctaccaggttacaggaattaactgtttgttcagaagacaatgttgatgttcatgatatagaattgttacagtatatcaatgtggattgtgcaaaattaaaacgactcctgaaggaaacagcatttaaatttaaagccctaaagaaggttgcgcagttagcagttataaatagcctggaaaaggcattttggaactgggtagaaaattatccagatgaatttacaaaactgtaccagatcccacagactgatatggctgaatgtgcagaaaagctatttgacttggtggatggttttgctgaaagcaccaaacgtaaagcagcagtttggccactacaaatcattctccttatcttgtgtccagaaataatccaggatatatccaaagacgtggttgatgaaaacaacatgaataagaagttatttctggacagtctacgaaaagctcttgctggccatggaggaagtaggcagctgacagaaagtgctgcaattgcctgtgtcaaactgtgtaaagcaagtacttacatcaattgggaagataactctgtcattttcctacttgttcagtccatggtggttgatcttaagaacctgctttttaatccaagtaagccattctcaagaggcagtcagcctgcagatgtggatctaatgattgactgccttgtttcttgctttcgtataagccctcacaacaaccaacactttaagatctgcctggctcagaattcaccttctacatttcactatgtgctggtaaattcactccatcgaatcatcaccaattccgcattggattggtggcctaagattgatgctgtgtattgtcactcggttgaacttcgaaatatgtttggtgaaacacttcataaagcagtgcaaggttgtggagcacacccagcaatacgaatggcaccgagtcttacatttaaagaaaaagtaacaagccttaaatttaaagaaaaacctacagacctggagacaagaagctataagtatcttctcttgtccatggtgaaactaattcatgcagatccaaagctcttgctttgtaatccaagaaaacaggggcccgaaacccaaggcagtacagcagaattaattacagggctcgtccaactggtccctcagtcacacatgccagagattgctcaggaagcaatggaggctctgctggttcttcatcagttagatagcattgatttgtggaatcctgatgctcctgtagaaacattttgggagattagctcacaaatgcttttttacatctgcaagaaattaactagtcatcaaatgcttagtagcacagaaattctcaagtggttgcgggaaatattgatctgcaggaataaatttcttcttaaaaataagcaggcagatagaagttcctgtcactttctccttttttacggggtaggatgtgatattccttctagtggaaataccagtcaaatgtccatggatcatgaagaattactacgtactcctggagcctctctccggaagggaaaagggaactcctctatggatagtgcagcaggatgcagcggaacccccccgatttgccgacaagcccagaccaaactagaagtggccctgtacatgtttctgtggaaccctgacactgaagctgttctggttgccatgtcctgtttccgccacctctgtgaggaagcagatatccggtgtggggtggatgaagtgtcagtgcataacctcttgcccaactataacacattcatggagtttgcctctgtcagcaatatgatgtcaacaggaagagcagcacttcagaaaagagtgatggcactgctgaggcgcattgagcatcccactgcaggaaacactgaggcttgggaagatacacatgcaaaatgggaacaagcaacaaagctaatccttaactatccaaaagccaaaatggaagatggccaggctgctgaaagccttcacaagaccattgttaagaggcgaatgtcccatgtgagtggaggaggatccatagatttgtctgacacagactccctacaggaatggatcaacatgactggcttcctttgtgcccttgggggagtgtgcctccagcagagaagcaattctggcctggcaacctatagcccacccatgggtccagtcagtgaacgtaagggttctatgatttcagtgatgtcttcagagggaaacgcagatacacctgtcagcaaatttatggatcggctgttgtccttaatggtgtgtaaccatgagaaagtgggacttcaaatacggaccaatgttaaggatctggtgggtctagaattgagtcctgctctgtatccaatgctatttaacaaattgaagaataccatcagcaagttttttgactcccaaggacaggttttattgactgataccaatactcaatttgtagaacaaaccatagctataatgaagaacttgctagataatcatactgaaggcagctctgaacatctagggcaagctagcattgaaacaatgatgttaaatctggtcaggtatgttcgtgtgcttgggaatatggtccatgcaattcaaataaaaacgaaactgtgtcaattagttgaagtaatgatggcaaggagagatgacctctcattttgccaagagatgaaatttaggaataagatggtagaatacctgacagactgggttatgggaacatcaaaccaagcagcagatgatgatgtaaaatgtcttacaagagatttggaccaggcaagcatggaagcagtagtttcacttctagctggtctccctctgcagcctgaagaaggagatggtgtggaattgatggaagccaaatcacagttatttcttaaatacttcacattatttatgaaccttttgaatgactgcagtgaagttgaagatgaaagtgcgcaaacaggtggcaggaaacgtggcatgtctcggaggctggcatcactgaggcactgtacggtccttgcaatgtcaaacttactcaatgccaacgtagacagtggtctcatgcactccataggcttaggttaccacaaggatctccagacaagagctacatttatggaagttctgacaaaaatccttcaacaaggcacagaatttgacacacttgcagaaacagtattggctgatcggtttgagagattggtggaactggtcacaatgatgggtgatcaaggagaactccctatagcgatggctctggccaatgtggttccttgttctcagtgggatgaactagctcgagttctggttactctgtttgattctcggcatttactctaccaactgctctggaacatgttttctaaagaagtagaattggcagactccatgcagactctcttccgaggcaacagcttggccagtaaaataatgacattctgtttcaaggtatatggtgctacctatctacaaaaactcctggatcctttattacgaattgtgatcacatcctctgattggcaacatgttagctttgaagtggatcctaccaggttagaaccatcagagagccttgaggaaaaccagcggaacctccttcagatgactgaaaagttcttccatgccatcatcagttcctcctcagaattcccccctcaacttcgaagtgtgtgccactgtttataccaggtggttagccagcgtttccctcagaacagcatcggtgcagtaggaagtgccatgttcctcagatttatcaatcctgccattgtctcaccgtatgaagcagggattttagataaaaagccaccacctagaatcgaaaggggcttgaagttaatgtcaaagatacttcagagtattgccaatcatgttctcttcacaaaagaagaacatatgcggcctttcaatgattttgtgaaaagcaactttgatgcagcacgcaggtttttccttgatatagcatctgattgtcctacaagtgatgcagtaaatcatagtctttccttcataagtgacggcaatgtgcttgctttacatcgtctactctggaacaatcaggagaaaattgggcagtatctttccagcaacagggatcataaagctgttggaagacgaccttttgataagatggcaacacttcttgcatacctgggtcctccagagcacaaacctgtggcagatacacactggtccagccttaaccttaccagttcaaagtttgaggaatttatgactaggcatcaggtacatgaaaaagaagaattcaaggctttgaaaacgttaagtattttctaccaagctgggacttccaaagctgggaatcctattttttattatgttgcacggaggttcaaaactggtcaaatcaatggtgatttgctgatataccatgtcttactgactttaaagccatattatgcaaagccatatgaaattgtagtggaccttacccataccgggcctagcaatcgctttaaaacagactttctctctaagtggtttgttgtttttcctggctttgcttacgacaacgtctccgcagtctatatctataactgtaactcctgggtcagggagtacaccaagtatcatgagcggctgctgactggcctcaaaggtagcaaaaggcttgttttcatagactgtcctgggaaactggctgagcacatagagcatgaacaacagaaactacctgctgccaccttggctttagaagaggacctgaaggtattccacaatgctctcaagctagctcacaaagacaccaaagtttctattaaagttggttctactgctgtccaagtaacttcagcagagcgaacaaaagtcctagggcaatcagtctttctaaatgacatttattatgcttcggaaattgaagaaatctgcctagtagatgagaaccagttcaccttaaccattgcaaaccagggcacgccgctcaccttcatgcaccaggagtgtgaagccattgtccagtctatcattcatatccggacccgctgggaactgtcacagcccgactctatcccccaacacaccaagattcggccaaaagatgtccctgggacactgctcaatatcgcattacttaatttaggcagttctgacccgagtttacggtcagctgcctataatcttctgtgtgccttaacttgtacctttaatttaaaaatcgagggccagttactagagacatcaggtttatgtatccctgccaacaacaccctctttattgtctctattagtaagacactggcagccaatgagccacacctcacgttagaatttttggaagagtgtatttctggatttagcaaatctagtattgaattgaaacacctttgtttggaatacatgactccatggctgtcaaatctagttcgtttttgcaagcataatgatgatgccaaacgacaaagagttactgctattcttgacaagctgataacaatgaccatcaatgaaaaacagatgtacccatctattcaagcaaaaatatggggaagccttgggcagattacagatctgcttgatgttgtactagacagtttcatcaaaaccagtgcaacaggtggcttgggatcaataaaagctgaggtgatggcagatactgctgtagctttggcttctggaaatgtgaaattggtttcaagcaaggttattggaaggatgtgcaaaataattgacaagacatgcttatctccaactcctactttagaacaacatcttatgtgggatgatattgctattttagcacgctacatgctgatgctgtccttcaacaattcccttgatgtggcagctcatcttccctacctcttccacgttgttactttcttagtagccacaggtccgctctcccttagagcttccacacatggactggtcattaatatcattcactctctgtgtacttgttcacagcttcattttagtgaagagaccaagcaagttttgagactcagtctgacagagttctcattacccaaattttacttgctgtttggcattagcaaagtcaagtcagctgctgtcattgccttccgttccagttaccgggacaggtcattctctcctggctcctatgagagagagacttttgctttgacatccttggaaacagtcacagaagctttgttggagatcatggaggcatgcatgagagatattccaacgtgcaagtggctggaccagtggacagaactagctcaaagatttgcattccaatataatccatccctgcaaccaagagctcttgttgtctttgggtgtattagcaaacgagtgtctcatgggcagataaagcagataatccgtattcttagcaaggcacttgagagttgcttaaaaggacctgacacttacaacagtcaagttctgatagaagctacagtaatagcactaaccaaattacagccacttcttaataaggactcgcctctgcacaaagccctcttttgggtagctgtggctgtgctgcagcttgatgaggtcaacttgtattcagcaggtaccgcacttcttgaacaaaacctgcatactttagatagtctccgtatattcaatgacaagagtccagaggaagtatttatggcaatccggaatcctctggagtggcactgcaagcaaatggatcattttgttggactcaatttcaactctaactttaactttgcattggttggacaccttttaaaagggtacaggcatccttcacctgctattgttgcaagaacagtcagaattttacatacactactaactctggttaacaaacacagaaattgtgacaaatttgaagtgaatacacagagcgtggcctacttagcagctttacttacagtgtctgaagaagttcgaagtcgctgcagcctaaaacatagaaagtcacttcttcttactgatatttcaatggaaaatgttcctatggatacatatcccattcatcatggtgacccttcctataggacactaaaggagactcagccatggtcctctcccaaaggttctgaaggataccttgcagccacctatccaactgtcggccagaccagtccccgagccaggaaatccatgagcctggacatggggcaaccttctcaggccaacactaagaagttgcttggaacaaggaaaagttttgatcacttgatatcagacacaaaggctcctaaaaggcaagaaatggaatcagggatcacaacaccccccaaaatgaggagagtagcagaaactgattatgaaatggaaactcagaggatttcctcatcacaacagcacccacatttacgtaaagtttcagtgtctgaatcaaatgttctcttggatgaagaagtacttactgatccgaagatccaggcgctgcttcttactgttctagctacactggtaaaatataccacagatgagtttgatcaacgaattctttatgaatacttagcagaggccagtgttgtgtttcccaaagtctttcctgttgtgcataatttgttggactctaagatcaacaccctgttatcattgtgccaagatccaaatttgttaaatccaatccatggaattgtgcagagtgtggtgtaccatgaagaatccccaccacaataccaaacatcttacctgcaaagttttggttttaatggcttgtggcggtttgcaggaccgttttcaaagcaaacacaaattccagactatgctgagcttattgttaagtttcttgatgccttgattgacacgtacctgcctggaattgatgaagaaaccagtgaagaatccctcctgactcccacatctccttaccctcctgcactgcagagccagcttagtatcactgccaaccttaacctttctaattccatgacctcacttgcaacttcccagcattccccaggaatcgacaaggagaacgttgaactctcccctaccactggccactgtaacagtggacgaactcgccacggatccgcaagccaagtgcagaagcaaagaagcgctggcagtttcaaacgtaatagcattaagaagatcgtgtgaagcttgcttgctttcttttttaaaatcaacttaacatgggctcttcactagtgaccccttccctgtccttgccctttccccccatgttgtaatgctgcacttcctgttttataatgaacccatccggtttgccatgttgccagatgatcaactcttcgaagccttgcctaaatttaatgctgccttttctttaactttttttcttctacttttggcgtgtatctggtatatgtaagtgttcagaacaactgcaaagaaagtgggaggtcaggaaacttttaactgagaaatctcaattgtaagagaggatgaattcttgaatactgctactactggccagtgatgaaagccatttgcacagagctctgccttctgtggttttcccttcttcatcctacagagtaaagtgttagtcctatttatacatttttcaagatacaagtttatgagagaaatagtattataaccccagtatgtttaatcttttagctgtggactttttttttaaccgtacaaaactgaaagaaccatagaggtcaagcctcagtgacttgacaccataaagccacagacaaggtacttgggggggagggcagggaaatttcatattttatagtggattcttaagaaatactaacacttgagtattagcaataattacaggaaaataagtgcgaccacatatatcttaacattactgaattaaaactatggcttctaagtccttatccaaactcagtcatccaaactagtttatttttttctccagttgattatcttttaatttttaattttgctaaaggtggtttttttgtgttttgttttttgtaaaccaaaactatactaagtatagtaattatatatatatatatattttttcccctccccctcttctttcctaactaattctgagcagggtaatcagtgaacaaagtgttgaaaattgttcccagaaggtaattttcatagatgtttgcattagctccatagcaaaatggaatggtacgtgacatttagggtagctgatatttttattttgttaaataatttccaagaatagagtatggtgtatattataaatttctttgataagatgtattttgaatgtcttttaatcttcctcctcctctccaaaaaaatcagaaacctctttaagaaaacatgtaggttatatatgctagaattgcatttaatcactgtgaaaagactggtcagcctgcattagtatgacagtaggggggctgttagaattgctgctatactggtggtatggattatcatggcattggaattttcatagtaatgcagatccaatttctttgtggtacctgcagtttacaaaataatttgacttcagtgagcatattggtatctggatgttccaatttagaactaaaccatatttattacaaaaagatattaatccctctactcccaggttccctttatatgttaagatataatggctttgaggggggaaaaaataaacctaggggagaggggagtttcctgtagtgctgtttcattagaggatttcagtaaattaaattccacagctaattcaataaataatggtacatttaagtgttctgattttaataatatatttcacatttatccacacagtaacaatgtaatatgttaatgtaaataaaattggttttgatactcagaaataacaagaatttaattttttaaatttgtttacagtcctgggaaaagtaagaattatttgccaaaataagaggaaagaaaaccttagtattattaatgagtttaccatagaattgttggaaatactgaagacaggtgcaatttactaaacttttgtttttaaactattgtagaggctgcattagaagaaaatgtttataatgacagagcaactatgactatataaaaaagctgaaattagaactgtgtttagaaatagatcagtaacccagtgccaaggatgccaagctgccaccatggtcttggctctcccacaacccagtgtttctggggtaagtttcacagtttctaggccctggaatagcaggcagtgtaagcctttgataactttagttcgatgtttttcttgtttttgtttgttggtttggtgcatatgatagtgggtgttatgctattttgctcttcccatcaaaataaagaaacttccagaggtttactgttaaaaatactgatatttccataaacgggtttaccaagggtgtagtatttcataccgcctgaaatgatcagcattggcacaaatcaaaattcagccgcctttgaaatgcaaaaatacctttgactagtaagtacatcctaggagtttgaaaacttaactaaggtttaaaatttaccttgtttaaagaacttctgacttttgaggaaaatctagctttccaagtaactaaaatgtacatgagataaacctctcaccactatgtgtcccttgagaaatgcaacacttttttagtcttcatacttgtaatctataaaagaaattctgaagtttagaccaagttgcccatttctgcgtaattgacataagttctgttaaaaatattataagtaattcgtttcggtttgtagatgtttcccctgacttgttaaagaggaaaccaggaactcagtcatgtttttgtcctggataatctacctgttatgccagtactcccatccgaggggcatgcccttagttgcccagatggagatgcagttcagtagatttggggcaaagtggctacagctctgtcttccattcactcaacacctgttcatgactgagccaggtgcccaggacacatcctaaacagtcagcttctatcctgtgtcctagttggggagacagagtgccagccagcaaccctcccaggtttgtaggttttaggggttttcagttttgtttgggttttttgttttttgtttttgtttctacatccttccccgactcccaggcataatgaggcatgtcttactcaatgttatgcaatggatttaggcaaaaattcattcttagtgtcagccacacaattttttttaatgcagtatattcacctgtaaatagtttgtgtaaaatttgacaaaaaaagtatatttactatactgtaaatatatgtgatgatatattgtattattttgcttttttgtaaagcagttagttgctgcacatggataacaacaaaaatttgattattctcgtgttagtattgttaacttctttttgcgactgcgttacatcatttaaagaaaatgctgtgtattgtaaacttaaattgtatatgataacttactgtcctttccatccgggcctaaactttggcagttcctttgtctacaaccttgttaatactgtaaacagttgtacgccagcaggaaaaatactgcccaacagacaaaatcgatcattgtaggggaaaatcatagaaatccatttcagatctttattgttcctcaccccattttcctccttgtgtatgtacttcccccacccccctttttttaagtaaaatgtaaattcaatctgctctaaga

SEQ ID NO: 158831 - DNA, 12425 bp, Homo sapiens
  Payload ID: 11072
  Gene Symbol: NF1
  Gene Name: neurofibromin 1
  Uniprot ID: P21359
  ENST ID: ENST00000358273
  CDS Start-End: 384-8903
aatctctagctcgctcgcgctccctctccccgggccgtggaaaggatcccacttccggtggggtgtcatggcggcgtctcggactgtgatggctgtggggagacggcgctagtggggagagcgaccaagaggccccctcccctccccgggtccccttcccctatccccctccccccagcctccttgccaacgccccctttccctctccccctcccgctcggcgctgaccccccatccccacccccgtgggaacactgggagcctgcactccacagaccctctccttgcctcttccctcacctcagcctccgctccccgccctcttcccggcccagggcgccggcccacccttccctccgccgccccccggccgcggggaggacatggccgcgcacaggccggtggaatgggtccaggccgtggtcagccgcttcgacgagcagcttccaataaaaacaggacagcagaacacacataccaaagtcagtactgagcacaacaaggaatgtctaatcaatatttccaaatacaagttttctttggttataagcggcctcactactattttaaagaatgttaacaatatgagaatatttggagaagctgctgaaaaaaatttatatctctctcagttgattatattggatacactggaaaaatgtcttgctgggcaaccaaaggacacaatgagattagatgaaacgatgctggtcaaacagttgctgccagaaatctgccattttcttcacacctgtcgtgaaggaaaccagcatgcagctgaacttcggaattctgcctctggggttttattttctctcagctgcaacaacttcaatgcagtctttagtcgcatttctaccaggttacaggaattaactgtttgttcagaagacaatgttgatgttcatgatatagaattgttacagtatatcaatgtggattgtgcaaaattaaaacgactcctgaaggaaacagcatttaaatttaaagccctaaagaaggttgcgcagttagcagttataaatagcctggaaaaggcattttggaactgggtagaaaattatccagatgaatttacaaaactgtaccagatcccacagactgatatggctgaatgtgcagaaaagctatttgacttggtggatggttttgctgaaagcaccaaacgtaaagcagcagtttggccactacaaatcattctccttatcttgtgtccagaaataatccaggatatatccaaagacgtggttgatgaaaacaacatgaataagaagttatttctggacagtctacgaaaagctcttgctggccatggaggaagtaggcagctgacagaaagtgctgcaattgcctgtgtcaaactgtgtaaagcaagtacttacatcaattgggaagataactctgtcattttcctacttgttcagtccatggtggttgatcttaagaacctgctttttaatccaagtaagccattctcaagaggcagtcagcctgcagatgtggatctaatgattgactgccttgtttcttgctttcgtataagccctcacaacaaccaacactttaagatctgcctggctcagaattcaccttctacatttcactatgtgctggtaaattcactccatcgaatcatcaccaattccgcattggattggtggcctaagattgatgctgtgtattgtcactcggttgaacttcgaaatatgtttggtgaaacacttcataaagcagtgcaaggttgtggagcacacccagcaatacgaatggcaccgagtcttacatttaaagaaaaagtaacaagccttaaatttaaagaaaaacctacagacctggagacaagaagctataagtatcttctcttgtccatggtgaaactaattcatgcagatccaaagctcttgctttgtaatccaagaaaacaggggcccgaaacccaaggcagtacagcagaattaattacagggctcgtccaactggtccctcagtcacacatgccagagattgctcaggaagcaatggaggctctgctggttcttcatcagttagatagcattgatttgtggaatcctgatgctcctgtagaaacattttgggagattagctcacaaatgcttttttacatctgcaagaaattaactagtcatcaaatgcttagtagcacagaaattctcaagtggttgcgggaaatattgatctgcaggaataaatttcttcttaaaaataagcaggcagatagaagttcctgtcactttctccttttttacggggtaggatgtgatattccttctagtggaaataccagtcaaatgtccatggatcatgaagaattactacgtactcctggagcctctctccggaagggaaaagggaactcctctatggatagtgcagcaggatgcagcggaacccccccgatttgccgacaagcccagaccaaactagaagtggccctgtacatgtttctgtggaaccctgacactgaagctgttctggttgccatgtcctgtttccgccacctctgtgaggaagcagatatccggtgtggggtggatgaagtgtcagtgcataacctcttgcccaactataacacattcatggagtttgcctctgtcagcaatatgatgtcaacaggaagagcagcacttcagaaaagagtgatggcactgctgaggcgcattgagcatcccactgcaggaaacactgaggcttgggaagatacacatgcaaaatgggaacaagcaacaaagctaatccttaactatccaaaagccaaaatggaagatggccaggctgctgaaagccttcacaagaccattgttaagaggcgaatgtcccatgtgagtggaggaggatccatagatttgtctgacacagactccctacaggaatggatcaacatgactggcttcctttgtgcccttgggggagtgtgcctccagcagagaagcaattctggcctggcaacctatagcccacccatgggtccagtcagtgaacgtaagggttctatgatttcagtgatgtcttcagagggaaacgcagatacacctgtcagcaaatttatggatcggctgttgtccttaatggtgtgtaaccatgagaaagtgggacttcaaatacggaccaatgttaaggatctggtgggtctagaattgagtcctgctctgtatccaatgctatttaacaaattgaagaataccatcagcaagttttttgactcccaaggacaggttttattgactgataccaatactcaatttgtagaacaaaccatagctataatgaagaacttgctagataatcatactgaaggcagctctgaacatctagggcaagctagcattgaaacaatgatgttaaatctggtcaggtatgttcgtgtgcttgggaatatggtccatgcaattcaaataaaaacgaaactgtgtcaattagttgaagtaatgatggcaaggagagatgacctctcattttgccaagagatgaaatttaggaataagatggtagaatacctgacagactgggttatgggaacatcaaaccaagcagcagatgatgatgtaaaatgtcttacaagagatttggaccaggcaagcatggaagcagtagtttcacttctagctggtctccctctgcagcctgaagaaggagatggtgtggaattgatggaagccaaatcacagttatttcttaaatacttcacattatttatgaaccttttgaatgactgcagtgaagttgaagatgaaagtgcgcaaacaggtggcaggaaacgtggcatgtctcggaggctggcatcactgaggcactgtacggtccttgcaatgtcaaacttactcaatgccaacgtagacagtggtctcatgcactccataggcttaggttaccacaaggatctccagacaagagctacatttatggaagttctgacaaaaatccttcaacaaggcacagaatttgacacacttgcagaaacagtattggctgatcggtttgagagattggtggaactggtcacaatgatgggtgatcaaggagaactccctatagcgatggctctggccaatgtggttccttgttctcagtgggatgaactagctcgagttctggttactctgtttgattctcggcatttactctaccaactgctctggaacatgttttctaaagaagtagaattggcagactccatgcagactctcttccgaggcaacagcttggccagtaaaataatgacattctgtttcaaggtatatggtgctacctatctacaaaaactcctggatcctttattacgaattgtgatcacatcctctgattggcaacatgttagctttgaagtggatcctaccaggttagaaccatcagagagccttgaggaaaaccagcggaacctccttcagatgactgaaaagttcttccatgccatcatcagttcctcctcagaattcccccctcaacttcgaagtgtgtgccactgtttataccaggcaacttgccactccctactgaataaagctacagtaaaagaaaaaaaggaaaacaaaaaatcagtggttagccagcgtttccctcagaacagcatcggtgcagtaggaagtgccatgttcctcagatttatcaatcctgccattgtctcaccgtatgaagcagggattttagataaaaagccaccacctagaatcgaaaggggcttgaagttaatgtcaaagatacttcagagtattgccaatcatgttctcttcacaaaagaagaacatatgcggcctttcaatgattttgtgaaaagcaactttgatgcagcacgcaggtttttccttgatatagcatctgattgtcctacaagtgatgcagtaaatcatagtctttccttcataagtgacggcaatgtgcttgctttacatcgtctactctggaacaatcaggagaaaattgggcagtatctttccagcaacagggatcataaagctgttggaagacgaccttttgataagatggcaacacttcttgcatacctgggtcctccagagcacaaacctgtggcagatacacactggtccagccttaaccttaccagttcaaagtttgaggaatttatgactaggcatcaggtacatgaaaaagaagaattcaaggctttgaaaacgttaagtattttctaccaagctgggacttccaaagctgggaatcctattttttattatgttgcacggaggttcaaaactggtcaaatcaatggtgatttgctgatataccatgtcttactgactttaaagccatattatgcaaagccatatgaaattgtagtggaccttacccataccgggcctagcaatcgctttaaaacagactttctctctaagtggtttgttgtttttcctggctttgcttacgacaacgtctccgcagtctatatctataactgtaactcctgggtcagggagtacaccaagtatcatgagcggctgctgactggcctcaaaggtagcaaaaggcttgttttcatagactgtcctgggaaactggctgagcacatagagcatgaacaacagaaactacctgctgccaccttggctttagaagaggacctgaaggtattccacaatgctctcaagctagctcacaaagacaccaaagtttctattaaagttggttctactgctgtccaagtaacttcagcagagcgaacaaaagtcctagggcaatcagtctttctaaatgacatttattatgcttcggaaattgaagaaatctgcctagtagatgagaaccagttcaccttaaccattgcaaaccagggcacgccgctcaccttcatgcaccaggagtgtgaagccattgtccagtctatcattcatatccggacccgctgggaactgtcacagcccgactctatcccccaacacaccaagattcggccaaaagatgtccctgggacactgctcaatatcgcattacttaatttaggcagttctgacccgagtttacggtcagctgcctataatcttctgtgtgccttaacttgtacctttaatttaaaaatcgagggccagttactagagacatcaggtttatgtatccctgccaacaacaccctctttattgtctctattagtaagacactggcagccaatgagccacacctcacgttagaatttttggaagagtgtatttctggatttagcaaatctagtattgaattgaaacacctttgtttggaatacatgactccatggctgtcaaatctagttcgtttttgcaagcataatgatgatgccaaacgacaaagagttactgctattcttgacaagctgataacaatgaccatcaatgaaaaacagatgtacccatctattcaagcaaaaatatggggaagccttgggcagattacagatctgcttgatgttgtactagacagtttcatcaaaaccagtgcaacaggtggcttgggatcaataaaagctgaggtgatggcagatactgctgtagctttggcttctggaaatgtgaaattggtttcaagcaaggttattggaaggatgtgcaaaataattgacaagacatgcttatctccaactcctactttagaacaacatcttatgtgggatgatattgctattttagcacgctacatgctgatgctgtccttcaacaattcccttgatgtggcagctcatcttccctacctcttccacgttgttactttcttagtagccacaggtccgctctcccttagagcttccacacatggactggtcattaatatcattcactctctgtgtacttgttcacagcttcattttagtgaagagaccaagcaagttttgagactcagtctgacagagttctcattacccaaattttacttgctgtttggcattagcaaagtcaagtcagctgctgtcattgccttccgttccagttaccgggacaggtcattctctcctggctcctatgagagagagacttttgctttgacatccttggaaacagtcacagaagctttgttggagatcatggaggcatgcatgagagatattccaacgtgcaagtggctggaccagtggacagaactagctcaaagatttgcattccaatataatccatccctgcaaccaagagctcttgttgtctttgggtgtattagcaaacgagtgtctcatgggcagataaagcagataatccgtattcttagcaaggcacttgagagttgcttaaaaggacctgacacttacaacagtcaagttctgatagaagctacagtaatagcactaaccaaattacagccacttcttaataaggactcgcctctgcacaaagccctcttttgggtagctgtggctgtgctgcagcttgatgaggtcaacttgtattcagcaggtaccgcacttcttgaacaaaacctgcatactttagatagtctccgtatattcaatgacaagagtccagaggaagtatttatggcaatccggaatcctctggagtggcactgcaagcaaatggatcattttgttggactcaatttcaactctaactttaactttgcattggttggacaccttttaaaagggtacaggcatccttcacctgctattgttgcaagaacagtcagaattttacatacactactaactctggttaacaaacacagaaattgtgacaaatttgaagtgaatacacagagcgtggcctacttagcagctttacttacagtgtctgaagaagttcgaagtcgctgcagcctaaaacatagaaagtcacttcttcttactgatatttcaatggaaaatgttcctatggatacatatcccattcatcatggtgacccttcctataggacactaaaggagactcagccatggtcctctcccaaaggttctgaaggataccttgcagccacctatccaactgtcggccagaccagtccccgagccaggaaatccatgagcctggacatggggcaaccttctcaggccaacactaagaagttgcttggaacaaggaaaagttttgatcacttgatatcagacacaaaggctcctaaaaggcaagaaatggaatcagggatcacaacaccccccaaaatgaggagagtagcagaaactgattatgaaatggaaactcagaggatttcctcatcacaacagcacccacatttacgtaaagtttcagtgtctgaatcaaatgttctcttggatgaagaagtacttactgatccgaagatccaggcgctgcttcttactgttctagctacactggtaaaatataccacagatgagtttgatcaacgaattctttatgaatacttagcagaggccagtgttgtgtttcccaaagtctttcctgttgtgcataatttgttggactctaagatcaacaccctgttatcattgtgccaagatccaaatttgttaaatccaatccatggaattgtgcagagtgtggtgtaccatgaagaatccccaccacaataccaaacatcttacctgcaaagttttggttttaatggcttgtggcggtttgcaggaccgttttcaaagcaaacacaaattccagactatgctgagcttattgttaagtttcttgatgccttgattgacacgtacctgcctggaattgatgaagaaaccagtgaagaatccctcctgactcccacatctccttaccctcctgcactgcagagccagcttagtatcactgccaaccttaacctttctaattccatgacctcacttgcaacttcccagcattccccaggaatcgacaaggagaacgttgaactctcccctaccactggccactgtaacagtggacgaactcgccacggatccgcaagccaagtgcagaagcaaagaagcgctggcagtttcaaacgtaatagcattaagaagatcgtgtgaagcttgcttgctttcttttttaaaatcaacttaacatgggctcttcactagtgaccccttccctgtccttgccctttccccccatgttgtaatgctgcacttcctgttttataatgaacccatccggtttgccatgttgccagatgatcaactcttcgaagccttgcctaaatttaatgctgccttttctttaactttttttcttctacttttggcgtgtatctggtatatgtaagtgttcagaacaactgcaaagaaagtgggaggtcaggaaacttttaactgagaaatctcaattgtaagagaggatgaattcttgaatactgctactactggccagtgatgaaagccatttgcacagagctctgccttctgtggttttcccttcttcatcctacagagtaaagtgttagtcctatttatacatttttcaagatacaagtttatgagagaaatagtattataaccccagtatgtttaatcttttagctgtggactttttttttaaccgtacaaaactgaaagaaccatagaggtcaagcctcagtgacttgacaccataaagccacagacaaggtacttgggggggagggcagggaaatttcatattttatagtggattcttaagaaatactaacacttgagtattagcaataattacaggaaaataagtgcgaccacatatatcttaacattactgaattaaaactatggcttctaagtccttatccaaactcagtcatccaaactagtttatttttttctccagttgattatcttttaatttttaattttgctaaaggtggtttttttgtgttttgttttttgtaaaccaaaactatactaagtatagtaattatatatatatatatattttttcccctccccctcttctttcctaactaattctgagcagggtaatcagtgaacaaagtgttgaaaattgttcccagaaggtaattttcatagatgtttgcattagctccatagcaaaatggaatggtacgtgacatttagggtagctgatatttttattttgttaaataatttccaagaatagagtatggtgtatattataaatttctttgataagatgtattttgaatgtcttttaatcttcctcctcctctccaaaaaaatcagaaacctctttaagaaaacatgtaggttatatatgctagaattgcatttaatcactgtgaaaagactggtcagcctgcattagtatgacagtaggggggctgttagaattgctgctatactggtggtatggattatcatggcattggaattttcatagtaatgcagatccaatttctttgtggtacctgcagtttacaaaataatttgacttcagtgagcatattggtatctggatgttccaatttagaactaaaccatatttattacaaaaagatattaatccctctactcccaggttccctttatatgttaagatataatggctttgaggggggaaaaaataaacctaggggagaggggagtttcctgtagtgctgtttcattagaggatttcagtaaattaaattccacagctaattcaataaataatggtacatttaagtgttctgattttaataatatatttcacatttatccacacagtaacaatgtaatatgttaatgtaaataaaattggttttgatactcagaaataacaagaatttaattttttaaatttgtttacagtcctgggaaaagtaagaattatttgccaaaataagaggaaagaaaaccttagtattattaatgagtttaccatagaattgttggaaatactgaagacaggtgcaatttactaaacttttgtttttaaactattgtagaggctgcattagaagaaaatgtttataatgacagagcaactatgactatataaaaaagctgaaattagaactgtgtttagaaatagatcagtaacccagtgccaaggatgccaagctgccaccatggtcttggctctcccacaacccagtgtttctggggtaagtttcacagtttctaggccctggaatagcaggcagtgtaagcctttgataactttagttcgatgtttttcttgtttttgtttgttggtttggtgcatatgatagtgggtgttatgctattttgctcttcccatcaaaataaagaaacttccagaggtttactgttaaaaatactgatatttccataaacgggtttaccaagggtgtagtatttcataccgcctgaaatgatcagcattggcacaaatcaaaattcagccgcctttgaaatgcaaaaatacctttgactagtaagtacatcctaggagtttgaaaacttaactaaggtttaaaatttaccttgtttaaagaacttctgacttttgaggaaaatctagctttccaagtaactaaaatgtacatgagataaacctctcaccactatgtgtcccttgagaaatgcaacacttttttagtcttcatacttgtaatctataaaagaaattctgaagtttagaccaagttgcccatttctgcgtaattgacataagttctgttaaaaatattataagtaattcgtttcggtttgtagatgtttcccctgacttgttaaagaggaaaccaggaactcagtcatgtttttgtcctggataatctacctgttatgccagtactcccatccgaggggcatgcccttagttgcccagatggagatgcagttcagtagatttggggcaaagtggctacagctctgtcttccattcactcaacacctgttcatgactgagccaggtgcccaggacacatcctaaacagtcagcttctatcctgtgtcctagttggggagacagagtgccagccagcaaccctcccaggtttgtaggttttaggggttttcagttttgtttgggttttttgttttttgtttttgtttctacatccttccccgactcccaggcataatgaggcatgtcttactcaatgttatgcaatggatttaggcaaaaattcattcttagtgtcagccacacaattttttttaatgcagtatattcacctgtaaatagtttgtgtaaaatttgacaaaaaaagtatatttactatactgtaaatatatgtgatgatatattgtattattttgcttttttgtaaagcagttagttgctgcacatggataacaacaaaaatttgattattctcgtgttagtattgttaacttctttttgcgactgcgttacatcatttaaagaaaatgctgtgtattgtaaacttaaattgtatatgataacttactgtcctttccatccgggcctaaactttggcagttcctttgtctacaaccttgttaatactgtaaacagttgtacgccagcaggaaaaatactgcccaacagacaaaatcgatcattgtaggggaaaatcatagaaatccatttcagatctttattgttcctcaccccattttcctccttgtgtatgtacttcccccacccccctttttttaagtaaaatgtaaattcaatctgctctaaga

SEQ ID NO: 158832 - DNA, 7787 bp, Homo sapiens
  Payload ID: 11072
  Gene Symbol: NF1
  Gene Name: neurofibromin 1
  ENST ID: ENST00000456735
  CDS Start-End: 1-7509
aattgggaagataactctgtcattttcctacttgttcagtccatggtggttgatcttaagaacctgctttttaatccaagtaagccattctcaagaggcagtcagcctgcagatgtggatctaatgattgactgccttgtttcttgctttcgtataagccctcacaacaaccaacactttaagatctgcctggctcagaattcaccttctacatttcactatgtgctggtaaattcactccatcgaatcatcaccaattccgcattggattggtggcctaagattgatgctgtgtattgtcactcggttgaacttcgaaatatgtttggtgaaacacttcataaagcagtgcaaggttgtggagcacacccagcaatacgaatggcaccgagtcttacatttaaagaaaaagtaacaagccttaaatttaaagaaaaacctacagacctggagacaagaagctataagtatcttctcttgtccatggtgaaactaattcatgcagatccaaagctcttgctttgtaatccaagaaaacaggggcccgaaacccaaggcagtacagcagaattaattacagggctcgtccaactggtccctcagtcacacatgccagagattgctcaggaagcaatggaggctctgctggttcttcatcagttagatagcattgatttgtggaatcctgatgctcctgtagaaacattttgggagattagctcacaaatgcttttttacatctgcaagaaattaactagtcatcaaatgcttagtagcacagaaattctcaagtggttgcgggaaatattgatctgcaggaataaatttcttcttaaaaataagcaggcagatagaagttcctgtcactttctccttttttacggggtaggatgtgatattccttctagtggaaataccagtcaaatgtccatggatcatgaagaattactacgtactcctggagcctctctccggaagggaaaagggaactcctctatggatagtgcagcaggatgcagcggaacccccccgatttgccgacaagcccagaccaaactagaagtggccctgtacatgtttctgtggaaccctgacactgaagctgttctggttgccatgtcctgtttccgccacctctgtgaggaagcagatatccggtgtggggtggatgaagtgtcagtgcataacctcttgcccaactataacacattcatggagtttgcctctgtcagcaatatgatgtcaacaggaagagcagcacttcagaaaagagtgatggcactgctgaggcgcattgagcatcccactgcaggaaacactgaggcttgggaagatacacatgcaaaatgggaacaagcaacaaagctaatccttaactatccaaaagccaaaatggaagatggccaggctgctgaaagccttcacaagaccattgttaagaggcgaatgtcccatgtgagtggaggaggatccatagatttgtctgacacagactccctacaggaatggatcaacatgactggcttcctttgtgcccttgggggagtgtgcctccagcagagaagcaattctggcctggcaacctatagcccacccatgggtccagtcagtgaacgtaagggttctatgatttcagtgatgtcttcagagggaaacgcagatacacctgtcagcaaatttatggatcggctgttgtccttaatggtgtgtaaccatgagaaagtgggacttcaaatacggaccaatgttaaggatctggtgggtctagaattgagtcctgctctgtatccaatgctatttaacaaattgaagaataccatcagcaagttttttgactcccaaggacaggttttattgactgataccaatactcaatttgtagaacaaaccatagctataatgaagaacttgctagataatcatactgaaggcagctctgaacatctagggcaagctagcattgaaacaatgatgttaaatctggtcaggtatgttcgtgtgcttgggaatatggtccatgcaattcaaataaaaacgaaactgtgtcaattagttgaagtaatgatggcaaggagagatgacctctcattttgccaagagatgaaatttaggaataagatggtagaatacctgacagactgggttatgggaacatcaaaccaagcagcagatgatgatgtaaaatgtcttacaagagatttggaccaggcaagcatggaagcagtagtttcacttctagctggtctccctctgcagcctgaagaaggagatggtgtggaattgatggaagccaaatcacagttatttcttaaatacttcacattatttatgaaccttttgaatgactgcagtgaagttgaagatgaaagtgcgcaaacaggtggcaggaaacgtggcatgtctcggaggctggcatcactgaggcactgtacggtccttgcaatgtcaaacttactcaatgccaacgtagacagtggtctcatgcactccataggcttaggttaccacaaggatctccagacaagagctacatttatggaagttctgacaaaaatccttcaacaaggcacagaatttgacacacttgcagaaacagtattggctgatcggtttgagagattggtggaactggtcacaatgatgggtgatcaaggagaactccctatagcgatggctctggccaatgtggttccttgttctcagtgggatgaactagctcgagttctggttactctgtttgattctcggcatttactctaccaactgctctggaacatgttttctaaagaagtagaattggcagactccatgcagactctcttccgaggcaacagcttggccagtaaaataatgacattctgtttcaaggtatatggtgctacctatctacaaaaactcctggatcctttattacgaattgtgatcacatcctctgattggcaacatgttagctttgaagtggatcctaccaggttagaaccatcagagagccttgaggaaaaccagcggaacctccttcagatgactgaaaagttcttccatgccatcatcagttcctcctcagaattcccccctcaacttcgaagtgtgtgccactgtttataccaggtggttagccagcgtttccctcagaacagcatcggtgcagtaggaagtgccatgttcctcagatttatcaatcctgccattgtctcaccgtatgaagcagggattttagataaaaagccaccacctagaatcgaaaggggcttgaagttaatgtcaaagatacttcagagtattgccaatcatgttctcttcacaaaagaagaacatatgcggcctttcaatgattttgtgaaaagcaactttgatgcagcacgcaggtttttccttgatatagcatctgattgtcctacaagtgatgcagtaaatcatagtctttccttcataagtgacggcaatgtgcttgctttacatcgtctactctggaacaatcaggagaaaattgggcagtatctttccagcaacagggatcataaagctgttggaagacgaccttttgataagatggcaacacttcttgcatacctgggtcctccagagcacaaacctgtggcagatacacactggtccagccttaaccttaccagttcaaagtttgaggaatttatgactaggcatcaggtacatgaaaaagaagaattcaaggctttgaaaacgttaagtattttctaccaagctgggacttccaaagctgggaatcctattttttattatgttgcacggaggttcaaaactggtcaaatcaatggtgatttgctgatataccatgtcttactgactttaaagccatattatgcaaagccatatgaaattgtagtggaccttacccataccgggcctagcaatcgctttaaaacagactttctctctaagtggtttgttgtttttcctggctttgcttacgacaacgtctccgcagtctatatctataactgtaactcctgggtcagggagtacaccaagtatcatgagcggctgctgactggcctcaaaggtagcaaaaggcttgttttcatagactgtcctgggaaactggctgagcacatagagcatgaacaacagaaactacctgctgccaccttggctttagaagaggacctgaaggtattccacaatgctctcaagctagctcacaaagacaccaaagtttctattaaagttggttctactgctgtccaagtaacttcagcagagcgaacaaaagtcctagggcaatcagtctttctaaatgacatttattatgcttcggaaattgaagaaatctgcctagtagatgagaaccagttcaccttaaccattgcaaaccagggcacgccgctcaccttcatgcaccaggagtgtgaagccattgtccagtctatcattcatatccggacccgctgggaactgtcacagcccgactctatcccccaacacaccaagattcggccaaaagatgtccctgggacactgctcaatatcgcattacttaatttaggcagttctgacccgagtttacggtcagctgcctataatcttctgtgtgccttaacttgtacctttaatttaaaaatcgagggccagttactagagacatcaggtttatgtatccctgccaacaacaccctctttattgtctctattagtaagacactggcagccaatgagccacacctcacgttagaatttttggaagagtgtatttctggatttagcaaatctagtattgaattgaaacacctttgtttggaatacatgactccatggctgtcaaatctagttcgtttttgcaagcataatgatgatgccaaacgacaaagagttactgctattcttgacaagctgataacaatgaccatcaatgaaaaacagatgtacccatctattcaagcaaaaatatggggaagccttgggcagattacagatctgcttgatgttgtactagacagtttcatcaaaaccagtgcaacaggtggcttgggatcaataaaagctgaggtgatggcagatactgctgtagctttggcttctggaaatgtgaaattggtttcaagcaaggttattggaaggatgtgcaaaataattgacaagacatgcttatctccaactcctactttagaacaacatcttatgtgggatgatattgctattttagcacgctacatgctgatgctgtccttcaacaattcccttgatgtggcagctcatcttccctacctcttccacgttgttactttcttagtagccacaggtccgctctcccttagagcttccacacatggactggtcattaatatcattcactctctgtgtacttgttcacagcttcattttagtgaagagaccaagcaagttttgagactcagtctgacagagttctcattacccaaattttacttgctgtttggcattagcaaagtcaagtcagctgctgtcattgccttccgttccagttaccgggacaggtcattctctcctggctcctatgagagagagacttttgctttgacatccttggaaacagtcacagaagctttgttggagatcatggaggcatgcatgagagatattccaacgtgcaagtggctggaccagtggacagaactagctcaaagatttgcattccaatataatccatccctgcaaccaagagctcttgttgtctttgggtgtattagcaaacgagtgtctcatgggcagataaagcagataatccgtattcttagcaaggcacttgagagttgcttaaaaggacctgacacttacaacagtcaagttctgatagaagctacagtaatagcactaaccaaattacagccacttcttaataaggactcgcctctgcacaaagccctcttttgggtagctgtggctgtgctgcagcttgatgaggtcaacttgtattcagcaggtaccgcacttcttgaacaaaacctgcatactttagatagtctccgtatattcaatgacaagagtccagaggaagtatttatggcaatccggaatcctctggagtggcactgcaagcaaatggatcattttgttggactcaatttcaactctaactttaactttgcattggttggacaccttttaaaagggtacaggcatccttcacctgctattgttgcaagaacagtcagaattttacatacactactaactctggttaacaaacacagaaattgtgacaaatttgaagtgaatacacagagcgtggcctacttagcagctttacttacagtgtctgaagaagttcgaagtcgctgcagcctaaaacatagaaagtcacttcttcttactgatatttcaatggaaaatgttcctatggatacatatcccattcatcatggtgacccttcctataggacactaaaggagactcagccatggtcctctcccaaaggttctgaaggataccttgcagccacctatccaactgtcggccagaccagtccccgagccaggaaatccatgagcctggacatggggcaaccttctcaggccaacactaagaagttgcttggaacaaggaaaagttttgatcacttgatatcagacacaaaggctcctaaaaggcaagaaatggaatcagggatcacaacaccccccaaaatgaggagagtagcagaaactgattatgaaatggaaactcagaggatttcctcatcacaacagcacccacatttacgtaaagtttcagtgtctgaatcaaatgttctcttggatgaagaagtacttactgatccgaagatccaggcgctgcttcttactgttctagctacactggtaaaatataccacagatgagtttgatcaacgaattctttatgaatacttagcagaggccagtgttgtgtttcccaaagtctttcctgttgtgcataatttgttggactctaagatcaacaccctgttatcattgtgccaagatccaaatttgttaaatccaatccatggaattgtgcagagtgtggtgtaccatgaagaatccccaccacaataccaaacatcttacctgcaaagttttggttttaatggcttgtggcggtttgcaggaccgttttcaaagcaaacacaaattccagactatgctgagcttattgttaagtttcttgatgccttgattgacacgtacctgcctggaattgatgaagaaaccagtgaagaatccctcctgactcccacatctccttaccctcctgcactgcagagccagcttagtatcactgccaaccttaacctttctaattccatgacctcacttgcaacttcccagcattccccagcttctctgccttgctctaaatcagcagttttcatgcagctgttccctcatcaaggaatcgacaaggagaacgttgaactctcccctaccactggccactgtaacagtggacgaactcgccacggatccgcaagccaagtgcagaagcaaagaagcgctggcagtttcaaacgtaatagcattaagaagatcgtgtgaagcttgcttgctttcttttttaaaatcaacttaacatgggctcttcactagtgaccccttccctgtccttgccctttccccccatgttgtaatgctgcacttcctgttttataatgaacccatccggtttgccatgttgccagatgatcaactcttcgaagccttgcctaaatttaatgctgccttttctttaactttttttcttctacttttggcgtgtatctggtatatgtaagtgttcagaacaactgcaaagaaagtgggaggtcaggaaactt

SEQ ID NO: 158833 - DNA, 2889 bp, Homo sapiens
  Payload ID: 11072
  Gene Symbol: NF1
  Gene Name: neurofibromin 1
  Uniprot ID: P21359
  ENST ID: ENST00000431387
  CDS Start-End: 334-2115
acttccggtggggtgtcatggcggcgtctcggactgtgatggctgtggggagacggcgctagtggggagagcgaccaagaggccccctcccctccccgggtccccttcccctatccccctccccccagcctccttgccaacgccccctttccctctccccctcccgctcggcgctgaccccccatccccacccccgtgggaacactgggagcctgcactccacagaccctctccttgcctcttccctcacctcagcctccgctccccgccctcttcccggcccagggcgccggcccacccttccctccgccgccccccggccgcggggaggacatggccgcgcacaggccggtggaatgggtccaggccgtggtcagccgcttcgacgagcagcttccaataaaaacaggacagcagaacacacataccaaagtcagtactgagcacaacaaggaatgtctaatcaatatttccaaatacaagttttctttggttataagcggcctcactactattttaaagaatgttaacaatatgagaatatttggagaagctgctgaaaaaaatttatatctctctcagttgattatattggatacactggaaaaatgtcttgctgggcaaccaaaggacacaatgagattagatgaaacgatgctggtcaaacagttgctgccagaaatctgccattttcttcacacctgtcgtgaaggaaaccagcatgcagctgaacttcggaattctgcctctggggttttattttctctcagctgcaacaacttcaatgcagtctttagtcgcatttctaccaggttacaggaattaactgtttgttcagaagacaatgttgatgttcatgatatagaattgttacagtatatcaatgtggattgtgcaaaattaaaacgactcctgaaggaaacagcatttaaatttaaagccctaaagaaggttgcgcagttagcagttataaatagcctggaaaaggcattttggaactgggtagaaaattatccagatgaatttacaaaactgtaccagatcccacagactgatatggctgaatgtgcagaaaagctatttgacttggtggatggttttgctgaaagcaccaaacgtaaagcagcagtttggccactacaaatcattctccttatcttgtgtccagaaataatccaggatatatccaaagacgtggttgatgaaaacaacatgaataagaagttatttctggacagtctacgaaaagctcttgctggccatggaggaagtaggcagctgacagaaagtgctgcaattgcctgtgtcaaactgtgtaaagcaagtacttacatcaattgggaagataactctgtcattttcctacttgttcagtccatggtggttgatcttaagaacctgctttttaatccaagtaagccattctcaagaggcagtcagcctgcagatgtggatctaatgattgactgccttgtttcttgctttcgtataagccctcacaacaaccaacactttaagatctgcctggctcagaattcaccttctacatttcactatgtgctggtaaattcactccatcgaatcatcaccaattccgcattggattggtggcctaagattgatgctgtgtattgtcactcggttgaacttcgaaatatgtttggtgaaacacttcataaagcagtgcaaggttgtggagcacacccagcaatacgaatggcaccgagtcttacatttaaagaaaaagtaacaagccttaaatttaaagaaaaacctacagacctggagacaagaagctataagtatcttctcttgtccatggtgaaactaattcatgcagatccaaagctcttgctttgtaatccaagaaaacaggggcccgaaacccaaggcagtacagcagaattaattacagggctcgtccaactggtccctcagtcacacatgccagagattgctcaggaagcaatggaggctctgctggttcttcatcagttagatagcattgatttgtggaatcctgatgctcctgtagaaacattttgggagattaggtatatgtacttttattttttaaattcaacttttaaattttattttgtatttttgtcttgaaatattaactctgtagtacttagtacattgtaaaacttacacttccaaaggttttatggttttgtattttatttgacttcaaattattagaatttcttgttttaactgtaagaaaagtatcacagcaatttagaaaataaattttaagaatagtgctaaattttgtcaccctaacataagtactgttgtttggtatattacttttttcagatttcaatgtggttactactgtatttttaatagattttcatagttataagcctagaatgataaaattttgtaacaatactgttttttcagttttttgaactatgatctttcataaactttctgtaataccaatgctttcgatgaatgaattaataatggacacctgcttagaagaaaaaaatgtatgcagaattttgtggtctgcttcctagattatacaaatcattacattttaatgagcatgaagtcaccacacggaggaaaatgtaaatgtgtaaacctcaagtttgccattatcttataagaatgggtgtgctaagttacttggcagctgaattaaaccttactctagagtagtgctgtccactagtaatataatgagaaccccatatgttaaaaacttttttacttactacattaaagagtaaaaagaagcaggtaaaattaattgtaattatgttttgtttaacccggtgtatattatctataatttcaacatgtaatcaatataaaagttattaatgacatttcattctcttttttttaataaagtcttcaaacttt

SEQ ID NO: 158834 - DNA, 1114 bp, Homo sapiens
  Payload ID: 11072
  Gene Symbol: NF1
  Gene Name: neurofibromin 1
  ENST ID: ENST00000479614
  CDS Start-End: 1-619
aagagctacatttatggaagttctgacaaaaatccttcaacaaggcacagaatttgacacacttgcagaaacagtattggctgatcggtttgagagattggtggaactggtcacaatgatgggtgatcaaggagaactccctatagcgatggctctggccaatgtggttccttgttctcagtgggatgaactagctcgagttctggttactctgtttgattctcggcatttactctaccaactgctctggaacatgttttctaaagaagtagaattggcagactccatgcagactctcttccgaggcaacagcttggccagtaaaataatgacattctgtttcaaggtatatggtgctacctatctacaaaaactcctggatcctttattacgaattgtgatcacatcctctgattggcaacatgttagctttgaagtggatcctaccaggttagaaccatcagagagccttgaggaaaaccagcggaacctccttcagatgactgaaaagttcttccatgccatcatcagttcctcctcagaattcccccctcaacttcgaagtgtgtgccactgtttataccaggtccccaagaattcccatccctccatggtttaaataataggtggttagccagcgtttccctcagaacagcatcggtgcagtaggaagtgccatgttcctcagatttatcaatcctgccattgtctcaccgtatgaagcagggattttagataaaaagccaccacctagaatcgaaaggggcttgaagttaatgtcaaagatacttcagagtattgccaatcatgttctcttcacaaaagaagaacatatgcggcctttcaatgattttgtgaaaagcaactttgatgcagcacgcaggtttttccttgatatagcatctgattgtcctacaagtgatgcagtaaatcatagtctttccttcataagtgacggcaatgtgcttgctttacatcgtctactctggaacaatcaggagaaaattgggcagtatctttccagcaacagggatcataaagctgttggaagacgaccttttgataagatggcaacacttcttgcatacctgggtcctccagagcacaaacctgt

SEQ ID NO: 158835 - DNA, 8788 bp, Homo sapiens
  Payload ID: 11072
  Gene Symbol: NF1
  Gene Name: neurofibromin 1
  ENST ID: ENST00000579081
  CDS Start-End: 1-4971
tccttgcctcttccctcacctcagcctccgctccccgccctcttcccggcccagggcgccggcccacccttccctccgccgccccccggccgcggggaggacatggccgcgcacaggccggtggaatgggtccaggccgtggtcagccgcttcgacgagcagcttccaataaaaacaggacagcagaacacacataccaaagtcagtactgagcacaacaaggaatgtctaatcaatatttccaaatacaagttttctttggttataagcggcctcactactattttaaagaatgttaacaatatgagaatatttggagaagctgctgaaaaaaatttatatctctctcagttgattatattggatacactggaaaaatgtcttgctgggcaaccaaaggacacaatgagattagatgaaacgatgctggtcaaacagttgctgccagaaatctgccattttcttcacacctgtcgtgaaggaaaccagcatgcagctgaacttcggaattctgcctctggggttttattttctctcagctgcaacaacttcaatgcagtctttagtcgcatttctaccaggttacaggaattaactgtttgttcagaagacaatgttgatgttcatgatatagaattgttacagtatatcaatgtggattgtgcaaaattaaaacgactcctgaaggaaacagcatttaaatttaaagccctaaagaaggttgcgcagttagcagttataaatagcctggaaaaggcattttggaactgggtagaaaattatccagatgaatttacaaaactgtaccagatcccacagactgatatggctgaatgtgcagaaaagctatttgacttggtggatggttttgctgaaagcaccaaacgtaaagcagcagtttggccactacaaatcattctccttatcttgtgtccagaaataatccaggatatatccaaagacgtggttgatgaaaacaacatgaataagaagttatttctggacagtctacgaaaagctcttgctggccatggaggaagtaggcagctgacagaaagtgctgcaattgcctgtgtcaaactgtgtaaagcaagtacttacatcaattgggaagataactctgtcattttcctacttgttcagtccatggtggttgatcttaagaacctgctttttaatccaagtaagccattctcaagaggcagtcagcctgcagatgtggatctaatgattgactgccttgtttcttgctttcgtataagccctcacaacaaccaacactttaagatctgcctggctcagaattcaccttctacatttcactatgtgctggtaaattcactccatcgaatcatcaccaattccgcattggattggtggcctaagattgatgctgtgtattgtcactcggttgaacttcgaaatatgtttggtgaaacacttcataaagcagtgcaaggttgtggagcacacccagcaatacgaatggcaccgagtcttacatttaaagaaaaagtaacaagccttaaatttaaagaaaaacctacagacctggagacaagaagctataagtatcttctcttgtccatggtgaaactaattcatgcagatccaaagctcttgctttgtaatccaagaaaacaggggcccgaaacccaaggcagtacagcagaattaattacagggctcgtccaactggtccctcagtcacacatgccagagattgctcaggaagcaatggaggctctgctggttcttcatcagttagatagcattgatttgtggaatcctgatgctcctgtagaaacattttgggagattagctcacaaatgcttttttacatctgcaagaaattaactagtcatcaaatgcttagtagcacagaaattctcaagtggttgcgggaaatattgatctgcaggaataaatttcttcttaaaaataagcaggcagatagaagttcctgtcactttctccttttttacggggtaggatgtgatattccttctagtggaaataccagtcaaatgtccatggatcatgaagaattactacgtactcctggagcctctctccggaagggaaaagggaactcctctatggatagtgcagcaggatgcagcggaacccccccgatttgccgacaagcccagaccaaactagaagtggccctgtacatgtttctgtggaaccctgacactgaagctgttctggttgccatgtcctgtttccgccacctctgtgaggaagcagatatccggtgtggggtggatgaagtgtcagtgcataacctcttgcccaactataacacattcatggagtttgcctctgtcagcaatatgatgtcaacaggaagagcagcacttcagaaaagagtgatggcactgctgaggcgcattgagcatcccactgcaggaaacactgaggcttgggaagatacacatgcaaaatgggaacaagcaacaaagctaatccttaactatccaaaagccaaaatggaagatggccaggctgctgaaagccttcacaagaccattgttaagaggcgaatgtcccatgtgagtggaggaggatccatagatttgtctgacacagactccctacaggaatggatcaacatgactggcttcctttgtgcccttgggggagtgtgcctccagcagagaagcaattctggcctggcaacctatagcccacccatgggtccagtcagtgaacgtaagggttctatgatttcagtgatgtcttcagagggaaacgcagatacacctgtcagcaaatttatggatcggctgttgtccttaatggtgtgtaaccatgagaaagtgggacttcaaatacggaccaatgttaaggatctggtgggtctagaattgagtcctgctctgtatccaatgctatttaacaaattgaagaataccatcagcaagttttttgactcccaaggacaggttttattgactgataccaatactcaatttgtagaacaaaccatagctataatgaagaacttgctagataatcatactgaaggcagctctgaacatctagggcaagctagcattgaaacaatgatgttaaatctggtcaggtatgttcgtgtgcttgggaatatggtccatgcaattcaaataaaaacgaaactgtgtcaattagttgaagtaatgatggcaaggagagatgacctctcattttgccaagagatgaaatttaggaataagatggtagaatacctgacagactgggttatgggaacatcaaaccaagcagcagatgatgatgtaaaatgtcttacaagagatttggaccaggcaagcatggaagcagtagtttcacttctagctggtctccctctgcagcctgaagaaggagatggtgtggaattgatggaagccaaatcacagttatttcttaaatacttcacattatttatgaaccttttgaatgactgcagtgaagttgaagatgaaagtgcgcaaacaggtggcaggaaacgtggcatgtctcggaggctggcatcactgaggcactgtacggtccttgcaatgtcaaacttactcaatgccaacgtagacagtggtctcatgcactccataggcttaggttaccacaaggatctccagacaagagctacatttatggaagttctgacaaaaatccttcaacaaggcacagaatttgacacacttgcagaaacagtattggctgatcggtttgagagattggtggaactggtcacaatgatgggtgatcaaggagaactccctatagcgatggctctggccaatgtggttccttgttctcagtgggatgaactagctcgagttctggttactctgtttgattctcggcatttactctaccaactgctctggaacatgttttctaaagaagtagaattggcagactccatgcagactctcttccgaggcaacagcttggccagtaaaataatgacattctgtttcaaggtatatggtgctacctatctacaaaaactcctggatcctttattacgaattgtgatcacatcctctgattggcaacatgttagctttgaagtggatcctaccaggttagaaccatcagagagccttgaggaaaaccagcggaacctccttcagatgactgaaaagttcttccatgccatcatcagttcctcctcagaattcccccctcaacttcgaagtgtgtgccactgtttataccaggtggttagccagcgtttccctcagaacagcatcggtgcagtaggaagtgccatgttcctcagatttatcaatcctgccattgtctcaccgtatgaagcagggattttagataaaaagccaccacctagaatcgaaaggggcttgaagttaatgtcaaagatacttcagagtattgccaatcatgttctcttcacaaaagaagaacatatgcggcctttcaatgattttgtgaaaagcaactttgatgcagcacgcaggtttttccttgatatagcatctgattgtcctacaagtgatgcagtaaatcatagtctttccttcataagtgacggcaatgtgcttgctttacatcgtctactctggaacaatcaggagaaaattgggcagtatctttccagcaacagggatcataaagctgttggaagacgaccttttgataagatggcaacacttcttgcatacctgggtcctccagagcacaaacctgtggcagatacacactggtccagccttaaccttaccagttcaaagtttgaggaatttatgactaggcatcaggtacatgaaaaagaagaattcaaggctttgaaaacgttaagtattttctaccaagctgggacttccaaagctgggaatcctattttttattatgttgcacggaggatatattaccccaacattgtgaaaggtatcacaaagcatctgccaaggaatagctatcccacgctaatcagtggtttcagttttccattattataggttcaaaactggtcaaatcaatggtgatttgctgatataccatgtcttactgactttaaagccatattatgcaaagccatatgaaattgtagtggaccttacccataccgggcctagcaatcgctttaaaacagactttctctctaagtggtttgttgtttttcctggctttgcttacgacaacgtctccgcagtctatatctataactgtaactcctgggtcagggagtacaccaagtatcatgagcggctgctgactggcctcaaaggtagcaaaaggcttgttttcatagactgtcctgggaaactggctgagcacatagagcatgaacaacagaaactacctgctgccaccttggctttagaagaggacctgaaggtattccacaatgctctcaagctagctcacaaagacaccaaagtttctattaaagttggttctactgctgtccaagtaacttcagcagagcgaacaaaagtcctagggcaatcagtctttctaaatgacatttattatgcttcggaaattgaagaaatctgcctagtagatgagaaccagttcaccttaaccattgcaaaccagggcacgccgctcaccttcatgcaccaggagtgtgaagccattgtccagtctatcattcatatccggacccgctgggaactgtcacagcccgactctatcccccaacacaccaagattcggccaaaagatgtccctgggacactgctcaatatcgcattacttaatttaggcagttctgacccgagtttacggtcagctgcctataatcttctgtgtgccttaacttgtacctttaatttaaaaatcgagggccagttactagagacatcaggtttatgtatccctgccaacaacaccctctttattgtctctattagtaagacactggcagccaatgagccacacctcacgttagaatttttggaagagtgtatttctggatttagcaaatctagtattgaattgaaacacctttgtttggaatacatgactccatggctgtcaaatctagttcgtttttgcaagcataatgatgatgccaaacgacaaagagttactgctattcttgacaagctgataacaatgaccatcaatgaaaaacagatgtacccatctattcaagcaaaaatatggggaagccttgggcagattacagatctgcttgatgttgtactagacagtttcatcaaaaccagtgcaacaggtggcttgggatcaataaaagctgaggtgatggcagatactgctgtagctttggcttctggaaatgtgaaattggtttcaagcaaggttattggaaggatgtgcaaaataattgacaagacatgcttatctccaactcctactttagaacaacatcttatgtgggatgatattgctattttagcacgctacatgctgatgctgtccttcaacaattcccttgatgtggcagctcatcttccctacctcttccacgttgttactttcttagtagccacaggtccgctctcccttagagcttccacacatggactggtcattaatatcattcactctctgtgtacttgttcacagcttcattttagtgaagagaccaagcaagttttgagactcagtctgacagagttctcattacccaaattttacttgctgtttggcattagcaaagtcaagtcagctgctgtcattgccttccgttccagttaccgggacaggtcattctctcctggctcctatgagagagagacttttgctttgacatccttggaaacagtcacagaagctttgttggagatcatggaggcatgcatgagagatattccaacgtgcaagtggctggaccagtggacagaactagctcaaagatttgcattccaatataatccatccctgcaaccaagagctcttgttgtctttgggtgtattagcaaacgagtgtctcatgggcagataaagcagataatccgtattcttagcaaggcacttgagagttgcttaaaaggacctgacacttacaacagtcaagttctgatagaagctacagtaatagcactaaccaaattacagccacttcttaataaggactcgcctctgcacaaagccctcttttgggtagctgtggctgtgctgcagcttgatgaggtcaacttgtattcagcaggtaccgcacttcttgaacaaaacctgcatactttagatagtctccgtatattcaatgacaagagtccagaggaagtatttatggcaatccggaatcctctggagtggcactgcaagcaaatggatcattttgttggactcaatttcaactctaactttaactttgcattggttggacaccttttaaaagggtacaggcatccttcacctgctattgttgcaagaacagtcagaattttacatacactactaactctggttaacaaacacagaaattgtgacaaatttgaagtgaatacacagagcgtggcctacttagcagctttacttacagtgtctgaagaagttcgaagtcgctgcagcctaaaacatagaaagtcacttcttcttactgatatttcaatggaaaatgttcctatggatacatatcccattcatcatggtgacccttcctataggacactaaaggagactcagccatggtcctctcccaaaggttctgaaggataccttgcagccacctatccaactgtcggccagaccagtccccgagccaggaaatccatgagcctggacatggggcaaccttctcaggccaacactaagaagttgcttggaacaaggaaaagttttgatcacttgatatcagacacaaaggctcctaaaaggcaagaaatggaatcagggatcacaacaccccccaaaatgaggagagtagcagaaactgattatgaaatggaaactcagaggatttcctcatcacaacagcacccacatttacgtaaagtttcagtgtctgaatcaaatgttctcttggatgaagaagtacttactgatccgaagatccaggcgctgcttcttactgttctagctacactggtaaaatataccacagatgagtttgatcaacgaattctttatgaatacttagcagaggccagtgttgtgtttcccaaagtctttcctgttgtgcataatttgttggactctaagatcaacaccctgttatcattgtgccaagatccaaatttgttaaatccaatccatggaattgtgcagagtgtggtgtaccatgaagaatccccaccacaataccaaacatcttacctgcaaagttttggttttaatggcttgtggcggtttgcaggaccgttttcaaagcaaacacaaattccagactatgctgagcttattgttaagtttcttgatgccttgattgacacgtacctgcctggaattgatgaagaaaccagtgaagaatccctcctgactcccacatctccttaccctcctgcactgcagagccagcttagtatcactgccaaccttaacctttctaattccatgacctcacttgcaacttcccagcattccccaggaatcgacaaggagaacgttgaactctcccctaccactggccactgtaacagtggacgaactcgccacggatccgcaagccaagtgcagaagcaaagaagcgctggcagtttcaaacgtaatagcattaagaagatcgtgtgaagcttgcttgctttcttttttaaaatcaacttaacatgggctcttcactagtgaccccttccctgtccttgccctttccccccatgttgtaatgctgcacttcctgttttataatgaacccatccggtttgc

SEQ ID NO: 158836 - DNA, 1256 bp, Homo sapiens
  Payload ID: 11072
  Gene Symbol: NF1
  Gene Name: neurofibromin 1
  ENST ID: ENST00000581790
  CDS Start-End: 1-619
aggcatgcatgagagatattccaacgtgcaagtggctggaccagtggacagaactagctcaaaggactcgcctctgcacaaagccctcttttgggtagctgtggctgtgctgcagcttgatgaggtcaacttgtattcagcaggtaccgcacttcttgaacaaaacctgcatactttagatagtctccgtatattcaatgacaagagtccagaggaagtatttatggcaatccggaatcctctggagtggcactgcaagcaaatggatcattttgttggactcaatttcaactctaactttaactttgcattggttggacaccttttaaaagggtacaggcatccttcacctgctattgttgcaagaacagtcagaattttacatacactactaactctggttaacaaacacagaaattgtgacaaatttgaagtgaatacacagagcgtggcctacttagcagctttacttacagtgtctgaagaagttcgaagtcgctgcagcctaaaacatagaaagtcacttcttcttactgatatttcaatggaaaatgttcctatggatacatatcccattcatcatggtgacccttcctataggaacaaggaaaagttttgatcacttgatatcagacacaaaggctcctaaaaggcaagaaatggaatcagggatcacaacaccccccaaaatgaggagagtagcagaaactgattatgaaatggaaactcagaggatttcctcatcacaacagcacccacatttacgtaaagtttcagtgtctgaatcaaatgttctcttggatgaagaagtacttactgatccgaagatccaggcgctgcttcttactgttctagctacactggtaaaatataccacagatgagtttgatcaacgaattctttatgaatacttagcagaggccagtgttgtgtttcccaaagtctttcctgttgtgcataatttgttggactctaagatcaacaccctgttatcattgtgccaagatccaaatttgttaaatccaatccatggaattgtgcagagtgtggtgtaccatgaagaatccccaccacaataccaaacatcttacctgcaaagttttggttttaatggcttgtggcggtttgcaggaccgttttcaaagcaaacacaaattccagactatgctgagcttattgttaagtttcttgatgccttgattgacacgtacctgcctggaattgatgaagaaaccagtgaagaatccctcctgact

SEQ ID NO: 158837 - DNA, 8223 bp, Homo sapiens
  Payload ID: 11072
  Gene Symbol: NF1
  Gene Name: neurofibromin 1
  ENST ID: ENST00000495910
  CDS Start-End: 1-374
aggaatgtctaatcaatatttccaaatacaagttttctttggttataagcggcctcactactattttaaagaatgttaacaatatgagaatatttggagaagctgctgaaaaaaatttatatctctctcagttgattatattggatacactggaaaaatgtcttgctgggcaaccaaaggacacaatgagattagatgaaacgatgctggtcaaacagttgctgccagaaatctgccattttcttcacacctgtcgtgaaggaaaccagcatgcagctgaacttcggaattctgcctctggggttttattttctctcagctgcaacaacttcaatgcagtctttagtcgcatttctaccagaaacagcatttaaatttaaagccctaaagaaggttgcgcagttagcagttataaatagcctggaaaaggcattttggaactgggtagaaaattatccagatgaatttacaaaactgtaccagatcccacagactgatatggctgaatgtgcagaaaagctatttgacttggtggatggttttgctgaaagcaccaaacgtaaagcagcagtttggccactacaaatcattctccttatcttgtgtccagaaataatccaggatatatccaaagacgtggttgatgaaaacaacatgaataagaagttatttctggacagtctacgaaaagctcttgctggccatggaggaagtaggcagctgacagaaagtgctgcaattgcctgtgtcaaactgtgtaaagcaagtacttacatcaattgggaagataactctgtcattttcctacttgttcagtccatggtggttgatcttaagaacctgctttttaatccaagtaagccattctcaagaggcagtcagcctgcagatgtggatctaatgattgactgccttgtttcttgctttcgtataagccctcacaacaaccaacactttaagatctgcctggctcagaattcaccttctacatttcactatgtgctggtaaattcactccatcgaatcatcaccaattccgcattggattggtggcctaagattgatgctgtgtattgtcactcggttgaacttcgaaatatgtttggtgaaacacttcataaagcagtgcaaggttgtggagcacacccagcaatacgaatggcaccgagtcttacatttaaagaaaaagtaacaagccttaaatttaaagaaaaacctacagacctggagacaagaagctataagtatcttctcttgtccatggtgaaactaattcatgcagatccaaagctcttgctttgtaatccaagaaaacaggggcccgaaacccaaggcagtacagcagaattaattacagggctcgtccaactggtccctcagtcacacatgccagagattgctcaggaagcaatggaggctctgctggttcttcatcagttagatagcattgatttgtggaatcctgatgctcctgtagaaacattttgggagattagctcacaaatgcttttttacatctgcaagaaattaactagtcatcaaatgcttagtagcacagaaattctcaagtggttgcgggaaatattgatctgcaggaataaatttcttcttaaaaataagcaggcagatagaagttcctgtcactttctccttttttacggggtaggatgtgatattccttctagtggaaataccagtcaaatgtccatggatcatgaagaattactacgtactcctggagcctctctccggaagggaaaagggaactcctctatggatagtgcagcaggatgcagcggaacccccccgatttgccgacaagcccagaccaaactagaagtggccctgtacatgtttctgtggaaccctgacactgaagctgttctggttgccatgtcctgtttccgccacctctgtgaggaagcagatatccggtgtggggtggatgaagtgtcagtgcataacctcttgcccaactataacacattcatggagtttgcctctgtcagcaatatgatgtcaacaggaagagcagcacttcagaaaagagtgatggcactgctgaggcgcattgagcatcccactgcaggaaacactgaggcttgggaagatacacatgcaaaatgggaacaagcaacaaagctaatccttaactatccaaaagccaaaatggaagatggccaggctgctgaaagccttcacaagaccattgttaagaggcgaatgtcccatgtgagtggaggaggatccatagatttgtctgacacagactccctacaggaatggatcaacatgactggcttcctttgtgcccttgggggagtgtgcctccagcagagaagcaattctggcctggcaacctatagcccacccatgggtccagtcagtgaacgtaagggttctatgatttcagtgatgtcttcagagggaaacgcagatacacctgtcagcaaatttatggatcggctgttgtccttaatggtgtgtaaccatgagaaagtgggacttcaaatacggaccaatgttaaggatctggtgggtctagaattgagtcctgctctgtatccaatgctatttaacaaattgaagaataccatcagcaagttttttgactcccaaggacaggttttattgactgataccaatactcaatttgtagaacaaaccatagctataatgaagaacttgctagataatcatactgaaggcagctctgaacatctagggcaagctagcattgaaacaatgatgttaaatctggtcaggtatgttcgtgtgcttgggaatatggtccatgcaattcaaataaaaacgaaactgtgtcaattagttgaagtaatgatggcaaggagagatgacctctcattttgccaagagatgaaatttaggaataagatggtagaatacctgacagactgggttatgggaacatcaaaccaagcagcagatgatgatgtaaaatgtcttacaagagatttggaccaggcaagcatggaagcagtagtttcacttctagctggtctccctctgcagcctgaagaaggagatggtgtggaattgatggaagccaaatcacagttatttcttaaatacttcacattatttatgaaccttttgaatgactgcagtgaagttgaagatgaaagtgcgcaaacaggtggcaggaaacgtggcatgtctcggaggctggcatcactgaggcactgtacggtccttgcaatgtcaaacttactcaatgccaacgtagacagtggtctcatgcactccataggcttaggttaccacaaggatctccagacaagagctacatttatggaagttctgacaaaaatccttcaacaaggcacagaatttgacacacttgcagaaacagtattggctgatcggtttgagagattggtggaactggtcacaatgatgggtgatcaaggagaactccctatagcgatggctctggccaatgtggttccttgttctcagtgggatgaactagctcgagttctggttactctgtttgattctcggcatttactctaccaactgctctggaacatgttttctaaagaagtagaattggcagactccatgcagactctcttccgaggcaacagcttggccagtaaaataatgacattctgtttcaaggtatatggtgctacctatctacaaaaactcctggatcctttattacgaattgtgatcacatcctctgattggcaacatgttagctttgaagtggatcctaccaggttagaaccatcagagagccttgaggaaaaccagcggaacctccttcagatgactgaaaagttcttccatgccatcatcagttcctcctcagaattcccccctcaacttcgaagtgtgtgccactgtttataccagagtcatcgcagccatttgcttttttagcacacggcttcagttgcttagagacgttaacagcatcattgaaatcaccattttaaaagctgtttgaggctgctctatgtgaattttttcaccattgctatttttaaagatgtatctgttctatctgtaaaaaagcttttcacggtatacatagatgataaaacatacttaaccttgtctctcttaatttatcatgacttttctgcctttacaaaaaggctcaaggaaacttaggaaaatcctgtatagttttttcaactagttaagtctgagtctaaagggtagtttagttataatatgaaacttaatacagtgaatatcttctcaagtttgggctgtattcaggtttctctttaaattttatttagtaattgttctattgatgaaactaggcagacaggaaatagcacatattaaaaatagtctgggtcagcttcttggttggcctagtagtaactggtttcagagagcaagtgggtttctaaaatgacagaggctttgactttagctggttaaaagtgaatggggactgactacatgattacatggtctaggagattgtagtagaatttcttcatgtggttgtcatcctaaaagaaaaatctttttgtatcatgagcaaagttggagaccgttttgagaccatgattctaataatgtaaaaggaacaggtcttagcacttatttagtacttaggaaatatttaatgaagaaataaatttcccatccctcccacctaagtaaacaagattcttgccagctttcacagctaagaaaggaggaaaatagtgaaaatagatttttaaacactatatgtggtgattattaaacagtatgttatgctttttagagcacttcacagtaaaatatcctatattattttaataacaaacctggtttattatgttaaaatttcacataaaattattatctttaaaaacatgaattaaaggtggtatcagtgcattgtttaagtattgggtaaaagcattgttgaagagcagagacagcatgctgtgttgttattaaataaggctttattttttaattagtaactggtaacagggaatgttacatttactgattagaaagaaagataggaaaaaagctttggtctcaagatagtattttattgagtctgcttcccaaacctagtttatttcttttggtttgctcttttgtttttattcatcttccctcttctggctttttcttgcccctttgcctttggcagtaacagaaaggtaccttcctgctcttctgtgttctgcctggagggatagtagtccctttgggacctactggggaaatgttgaaagggaagtgagtatattgctagctaataaacttccctggactttagctccttttttgagttcatatcttggcctttaagccttttcaaatcatgtgttaaccagctctattactttatataccttccttccttagttgactggattaaggttatttaagaatagccaactgtgaacatgtgtcagatttataattaaatcattttctcatgtgttgttttcacttctcctgatggttttaggataaagataaaatgattcccaaagtggatattctcgtatggtgagagaattctaagaactaatttatgattctaaataaatctcaccctttttcagtaaatctgcttctccaaactgaagtagtttacacacagttttaaggctataaatgatagttatataccactgttactaatacatttgtatatagtctaaagtttgaaacaaagctctgtgagctaaggggctgtgtcttgttgttttactgctatttcccaatgcctagaatggtatttgacctgtaggtacacagtaactctttggatggatgaatgggtgggtggatgaatggatgtctaactaacttaaagcccaagttatgggttatggtgttggatgtccagaattcccagaataagatgccatctatttgtggattaaataattctaacatggttttaaaaatatttttaaaataattattctgcctaggctagtccaatcaagagtcttttaattttgaaagaaatctttggtctagaaagagctctgagagatgaaaccaatatgtgcctggagttttgggggttttttaggtggctttttttttttttttttttaagatattttgataaatggtcaactgtaatatgtgaaaagttttaagcaggcctacagttttgttctgtaattttctctgcagtttcttcactttaataatattaatgcttcttactagttgagctgataaccttcttctcccaaatgttgcagagcttttaacctcctctgattagaaccatttcaggaagtagcctgcaaacattgaaaaatatgtgaaatgttaagagtaatcttttttagagagagaggtctttaattcagaatttctaaagtgaatttttatatttatccatataatttttatttctttattcagtaggatcataattaaatgccaggtgttggaaaaagaacttaaagtcaattgaaggatacacagagaagaattttacataccaagaaaaaattatgtagacacaaatgtttttagtgtgtgatctacttgtaatgaatattttatattacatttctcaaaagctaggaattaaccaaaatgtaaatatttaatatcctcaaattcacttggagagagtttttctgtgattcatagccagaaatagtagacatgattgggtctcaacatttcttgctgttttagtgcttggcttaaaaatgtaataaaaattaaaacccagaattaaaattcattcctcaaaattcagttgatttctaattttttgttgattccatttgtgttacattttatggtgtaattttatgtacaagccaacattgtttttgttgctgtatgtagtcggtgctgtgacttgtttgtgctcatctctgttctgtaggcaacttgccactccctactgaataaagctacagtaaaagaaaaaaaggaaaacaaaaaatcagtaagtttggagaactttttattagctgtttctttcaaagcaaaacaaaaatcttttgctgtttgttaagaatatcttcacttcagcctatttgaccttcactgtaaaatcattctactaattctggcacaaaatagctttcatttcaattaaccctggaattaagttacattgaaacattctctgtgttcctttggtttgatttatcccaaaggcaatttgtgggcatttgttgcattggatatccttggtctaattttattattgttactttttaaattataaatgaatgcaaagaaacttaatttcaaggccttaggaaacgctgactgtcttcattcttgcttcttgtttgaaggtaatgtgagtggtttcttttcccagagatgacagtgtttcttaattgttagaagtatatggtgggaaagagtcactttctaaatcttacctaaaagttgctaaattttatttttttactcttcatatttttatctaggcagtctcaggcataatttagatatttgtgcatagattatagaaattttaatggtaaaactacttttacctcaaaaaaataagaggtaaatgataagatagtacttttgagataaaagaaaactgagttcatatttgtagaaaaacacatcattctgcaaacataatgtgaatatactatctgcttctatgaacttgccttgatttatttaaaaggaagaaaattatgagagtcgtaattattttcttccagtgaatggaatttgtccaaaatataatatgcattcattttacatttgccattatctgtcacagtgacttatcaggctgagccctgtctttgttcatataatccaaatgattgtagagtaagatgtaaagaaaactaagtaggtagttttcttaaaagggtgtaatttagaatacagtgttcatctggtttcatctttcatgccttatctaaactttacatataataaaagctttatggctgggcacagtggctcatacctgtaatccgggcactttgggagaccaaggtgggagtatctcttgagcccaagagttaaagaccagcttgggcaacatagcgagtcgtctctacaaataatttttttttttttttaattagccaggcgtggtggtgtactcctgtagtcccagctactcgggaggctgaggcaggaggattgcttgagcccaggtggttgaggctgcagtgagctgtgattgtatcactgtactccaccatgagtgacagagtaagaccctgtctcacaaaaaaaaaaaaaaaaaaa

SEQ ID NO: 158838 - DNA, 1177 bp, Homo sapiens
  Payload ID: 11072
  Gene Symbol: NF1
  Gene Name: neurofibromin 1
  ENST ID: ENST00000466819
  CDS Start-End: 1-682
aagagctacatttatggaagttctgacaaaaatccttcaacaaggcacagaatttgacacacttgcagaaacagtattggctgatcggtttgagagattggtggaactggtcacaatgatgggtgatcaaggagaactccctatagcgatggctctggccaatgtggttccttgttctcagtgggatgaactagctcgagttctggttactctgtttgattctcggcatttactctaccaactgctctggaacatgttttctaaagaagtagaattggcagactccatgcagactctcttccgaggcaacagcttggccagtaaaataatgacattctgtttcaaggtatatggtgctacctatctacaaaaactcctggatcctttattacgaattgtgatcacatcctctgattggcaacatgttagctttgaagtggatcctaccaggttagaaccatcagagagccttgaggaaaaccagcggaacctccttcagatgactgaaaagttcttccatgccatcatcagttcctcctcagaattcccccctcaacttcgaagtgtgtgccactgtttataccaggcaacttgccactccctactgaataaagctacagtaaaagaaaaaaaggaaaacaaaaaatcagtccccaagaattcccatccctccatggtttaaataataggtggttagccagcgtttccctcagaacagcatcggtgcagtaggaagtgccatgttcctcagatttatcaatcctgccattgtctcaccgtatgaagcagggattttagataaaaagccaccacctagaatcgaaaggggcttgaagttaatgtcaaagatacttcagagtattgccaatcatgttctcttcacaaaagaagaacatatgcggcctttcaatgattttgtgaaaagcaactttgatgcagcacgcaggtttttccttgatatagcatctgattgtcctacaagtgatgcagtaaatcatagtctttccttcataagtgacggcaatgtgcttgctttacatcgtctactctggaacaatcaggagaaaattgggcagtatctttccagcaacagggatcataaagctgttggaagacgaccttttgataagatggcaacacttcttgcatacctgggtcctccagagcacaaacctgt

SEQ ID NO: 158839 - DNA, 2028 bp, Homo sapiens
  Payload ID: 11072
  Gene Symbol: NF1
  Gene Name: neurofibromin 1
  ENST ID: ENST00000471572
  CDS Start-End: 1-1921
aggcatgcatgagagatattccaacgtgcaagtggctggaccagtggacagaactagctcaaagttctgtggatcttttaattgcagatttgcattccaatataatccatccctgcaaccaagagctcttgttgtctttgggtgtattagcaaacgagtgtctcatgggcagataaagcagataatccgtattcttagcaaggcacttgagagttgcttaaaaggacctgacacttacaacagtcaagttctgatagaagctacagtaatagcactaaccaaattacagccacttcttaataaggactcgcctctgcacaaagccctcttttgggtagctgtggctgtgctgcagcttgatgaggtcaacttgtattcagcaggtaccgcacttcttgaacaaaacctgcatactttagatagtctccgtatattcaatgacaagagtccagaggaagtatttatggcaatccggaatcctctggagtggcactgcaagcaaatggatcattttgttggactcaatttcaactctaactttaactttgcattggttggacaccttttaaaagggtacaggcatccttcacctgctattgttgcaagaacagtcagaattttacatacactactaactctggttaacaaacacagaaattgtgacaaatttgaagtgaatacacagagcgtggcctacttagcagctttacttacagtgtctgaagaagttcgaagtcgctgcagcctaaaacatagaaagtcacttcttcttactgatatttcaatggaaaatgttcctatggatacatatcccattcatcatggtgacccttcctataggacactaaaggagactcagccatggtcctctcccaaaggttctgaaggataccttgcagccacctatccaactgtcggccagaccagtccccgagccaggaaatccatgagcctggacatggggcaaccttctcaggccaacactaagaagttgcttggaacaaggaaaagttttgatcacttgatatcagacacaaaggctcctaaaaggcaagaaatggaatcagggatcacaacaccccccaaaatgaggagagtagcagaaactgattatgaaatggaaactcagaggatttcctcatcacaacagcacccacatttacgtaaagtttcagtgtctgaatcaaatgttctcttggatgaagaagtacttactgatccgaagatccaggcgctgcttcttactgttctagctacactggtaaaatataccacagatgagtttgatcaacgaattctttatgaatacttagcagaggccagtgttgtgtttcccaaagtctttcctgttgtgcataatttgttggactctaagatcaacaccctgttatcattgtgccaagatccaaatttgttaaatccaatccatggaattgtgcagagtgtggtgtaccatgaagaatccccaccacaataccaaacatcttacctgcaaagttttggttttaatggcttgtggcggtttgcaggaccgttttcaaagcaaacacaaattccagactatgctgagcttattgttaagtttcttgatgccttgattgacacgtacctgcctggaattgatgaagaaaccagtgaagaatccctcctgactcccacatctccttaccctcctgcactgcagagccagcttagtatcactgccaaccttaacctttctaattccatgacctcacttgcaacttcccagcattccccaggaatcgacaaggagaacgttgaactctcccctaccactggccactgtaacagtggacgaactcgccacggatccgcaagccaagtgcagaagcaaagaagcgctggcagtttcaaactagcacttcttaacctgctcactgcccatcagaacagcctctgacaaagctgcatccaaattctttaaagggcaattcattgccccaagtaatctgccaaacctgtcttcatttggaaatcagtcttcatattcagcactgctcagcacgc

SEQ ID NO: 158840 - DNA, 592 bp, Homo sapiens
  Payload ID: 11072
  Gene Symbol: NF1
  Gene Name: neurofibromin 1
  ENST ID: ENST00000468273
  CDS Start-End: 1-347
caatccatggaattgtgcagagtgtggtgtaccatgaagaatccccaccacaataccaaacatcttacctgcaaagttttggttttaatggcttgtggcggtttgcaggaccgttttcaaagcaaacacaaattccagactatgctgagcttattgttaagtttcttgatgccttgattgacacgtacctgcctggaattgatgaagaaaccagtgaagaatccctcctgactcccacatctccttaccctcctgcactgcagagccagcttagtatcactgccaaccttaacctttctaattccatgacctcacttgcaacttcccagcattccccaggtcagtaaatgtgatctttatatgactttgagcaacaatataagacaccaacattaggaattcccttgtgatcagtttatagcaaattttgctcctttttcttatgagattcaccttacatttcttctttaccttgtaactgacttgacttttgttattctatgaagctttctactttcaaacaagttgtacataagacagtaaaatgttaaaatgtccacatgatattccaaggttgacaagtttgtagagt

SEQ ID NO: 158841 - DNA, 619 bp, Homo sapiens
  Payload ID: 11072
  Gene Symbol: NF1
  Gene Name: neurofibromin 1
  ENST ID: ENST00000422121
  CDS Start-End: 1-41
cacttcttaacctgctcactgcccatcagaacagcctctgacaaagctgcatccaaattctttaaagggcaattcattgccccaagtaatctgccaaacctgtcttcatttggaaatcagtcttcatattcagaaccagccgggcgcggtggctcacgcgtgtaatcccaacactggaaggccaaggcaggcggatcacttgaagtcgggagtttgggaaacatggtgaaaccccatctctactaaaaatacaaaaattagccggccatggtggcttatgcctatagtcccagctaccaggaggctgaagcaagagaatcacttgaacccgggaggtggaggtttcagtgagctgagattgcacttctgcactacagcctgggagcactgctcagcacgcaggcatgtgaggaagctgggcttaaaggagactccagcaaatggagagacagaccacagtcctgggttggaaagctgaatatcgttgaatgccagatcttcccaaataaatgaactggcttaatacaattctgatcaagatgccaacaagaagagagtgtatccagacaaaatgatctttggaaaatattcttcaccttgtggaataaacaggaaagca

SEQ ID NO: 158842 - DNA, 811 bp, Homo sapiens
  Payload ID: 11072
  Gene Symbol: NF1
  Gene Name: neurofibromin 1
  ENST ID: ENST00000479536
  CDS Start-End: 1-244
ttgtacctttaatttaaaaatcgagggccagttactagagacatcaggtttatgtatccctgccaacaacaccctctttattgtctctattagtaagacactggcagccaatgagccacacctcacgttagaatttttggaagagtgtatttctggatttagcaaatctagactgttctttcttcgcctctacaaaaatatatttgccaagtgtcttttctccaggcctgattctaggtattgaattgaaacacctttgtttggaatacatgactccatggctgtcaaatctagttcgtttttgcaagcataatgatgatgccaaacgacaaagagttactgctattcttgacaagctgataacaatgaccatcaatgaaaaacagatgtacccatctattcaagcaaaaatatggggaagccttgggcagattacagatctgcttgatgttgtactagacagtttcatcaaaaccagtgcaacaggtggcttgggatcaataaaagctgaggtgatggcagatactgctgtagctttggcttctggaaatgtgaaattggtttcaagcaaggttattggaaggatgtgcaaaataattgacaagacatgcttatctccaactcctactttagaacaacatcttatgtgggatgatattgctattttagcacgctacatgctgatgctgtccttcaacaattcccttgatgtggcagctcatcttccctacctcttccacgttgttactttcttagtagccacaggtccgctctcccttagagcttccacacatggactggtcattaatat

SEQ ID NO: 158843 - DNA, 543 bp, Homo sapiens
  Payload ID: 11072
  Gene Symbol: NF1
  Gene Name: neurofibromin 1
  ENST ID: ENST00000489712
  CDS Start-End: 192-543
aatgttctttcctttccatatttagtgctgctttcaggagctctcgtaagcttccaataaaaacaggacagcagaacacacataccaaagtcagtactgagcacaacaaggaatgtctaatcaatatttccaaatacaagttttctttggttataagcggcctcactactattttaaagaatgttaacaatatgagaatatttggagaagctgctgaaaaaaatttatatctctctcagttgattatattggatacactggaaaaatgtcttgctgggcaaccaaaggacacaatgagattagatgaaacgatgctggtcaaacagttgctgccagaaatctgccattttcttcacacctgtcgtgaaggaaaccagcatgcagctgaacttcggaattctgcctctggggttttattttctctcagctgcaacaacttcaatgcagtctttagtcgcatttctaccaggttacaggaattaactgtttgttcagaagacaatgttgatgttcatgatatagaattgttacagtatatcaatg

SEQ ID NO: 158844 - DNA, 2020 bp, Homo sapiens
  Payload ID: 11073
  Gene Symbol: NF2
  Gene Name: neurofibromin 2 (merlin)
  Uniprot ID: P35240
  ENST ID: ENST00000334961
  CDS Start-End: 273-1796
tcccggagtgccgggtcgcgcctgcaccgaaggtcccggctcctgtgccctccctgcagccgtcagggcccgtcccccaactcccctttccgctcaggcagggtcctcgcggcccatgctggccgctggggacccgcgcagcccagaccgttcccgggccgggcagccggccaccatggtggccctgaggcctgtgcagcaactccaggggggctaaagggctcagagtgcaggccgtggggcgcgagggtcccgggcctgagccccgcgccatggccggggccatcgcttcccgcatgagcttcagctctctcaagaggaagcaacccaagacgttcaccgtgaggatcgtcaccatggacgccgagatggagttcaattgcgaggtaaagaagcagattttagatgaaaagatctactgccctcctgaggcttctgtgctcctggcttcttacgccgtccaggccaagtatggtgactacgaccccagtgttcacaagcggggatttttggcccaagaggaattgcttccaaaaagggtaataaatctgtatcagatgactccggaaatgtgggaggagagaattactgcttggtacgcagagcaccgaggccgagccagggatgaagctgaaatggaatatctgaagatagctcaggacctggagatgtacggtgtgaactactttgcaatccggaataaaaagggcacagagctgctgcttggagtggatgccctggggcttcacatttatgaccctgagaacagactgacccccaagatctccttcccgtggaatgaaatccgaaacatctcgtacagtgacaaggagtttactattaaaccactggataagaaaattgatgtcttcaagtttaactcctcaaagcttcgtgttaataagctgattctccagctatgtatcgggaaccatgatctatttatgaggagaaggaaagccgattctttggaagttcagcagatgaaagcccaggccagggaggagaaggctagaaagcagatggagcggcagcgcctcgctcgagagaagcagatgagggaggaggctgaacgcacgagggatgagttggagaggaggctgctgcagatgaaagaagaagcaacaatggccaacgaagcactgatgcggtctgaggagacagctgacctgttggctgaaaaggcccagatcaccgaggaggaggcaaaacttctggcccagaaggccgcagaggctgagcaggaaatgcagcgcatcaaggccacagcgattcgcacggaggaggagaagcgcctgatggagcagaaggtgctggaagccgaggtgctggcactgaagatggctgaggagtcagagaggagggccaaagaggcagatcagctgaagcaggacctgcaggaagcacgcgaggcggagcgaagagccaagcagaagctcctggagattgccaccaagcccacgtacccgcccatgaacccaattccagcaccgttgcctcctgacataccaagcttcaacctcattggtgacagcctgtctttcgacttcaaagatactgacatgaagcggctttccatggagatagagaaagaaaaagtggaatacatggaaaagagcaagcatctgcaggagcagctcaatgaactcaagacagaaatcgaggccttgaaactgaaagagagggagacagctctggatattctgcacaatgagaactccgacaggggtggcagcagcaagcacaataccattaaaaagcctcaagcccaaggcagaagacctatctgcatttgagccctcaaacttcctctccataggctgagcagagatgtggtcagagtgaactcacattggaacagtacactcacggcaccctggagaggagcggtcactggttgctgagtgaattaaccgaatgtttgctgcttttctcctgcaacagttcattattcctccagcatgcctaggcagtggagagaatgtattttgcccaataataaaatgacatcctgcctcta

SEQ ID NO: 158845 - DNA, 1845 bp, Homo sapiens
  Payload ID: 11073
  Gene Symbol: NF2
  Gene Name: neurofibromin 2 (merlin)
  Uniprot ID: P35240
  ENST ID: ENST00000353887
  CDS Start-End: 253-1776
cctgcaccgaaggtcccggctcctgtgccctccctgcagccgtcagggcccgtcccccaactcccctttccgctcaggcagggtcctcgcggcccatgctggccgctggggacccgcgcagcccagaccgttcccgggccgggcagccggccaccatggtggccctgaggcctgtgcagcaactccaggggggctaaagggctcagagtgcaggccgtggggcgcgagggtcccgggcctgagccccgcgccatggccggggccatcgcttcccgcatgagcttcagctctctcaagaggaagcaacccaagacgttcaccgtgaggatcgtcaccatggacgccgagatggagttcaattgcgaggtaaagaagcagattttagatgaaaagatctactgccctcctgaggcttctgtgctcctggcttcttacgccgtccaggccaagtatggtgactacgaccccagtgttcacaagcggggatttttggcccaagaggaattgcttccaaaaagggtaataaatctgtatcagatgactccggaaatgtgggaggagagaattactgcttggtacgcagagcaccgaggccgagccagggatgaagctgaaatggaatatctgaagatagctcaggacctggagatgtacggtgtgaactactttgcaatccggaataaaaagggcacagagctgctgcttggagtggatgccctggggcttcacatttatgaccctgagaacagactgacccccaagatctccttcccgtggaatgaaatccgaaacatctcgtacagtgacaaggagtttactattaaaccactggataagaaaattgatgtcttcaagtttaactcctcaaagcttcgtgttaataagctgattctccagctatgtatcgggaaccatgatctatttatgaggagaaggaaagccgattctttggaagttcagcagatgaaagcccaggccagggaggagaaggctagaaagcagatggagcggcagcgcctcgctcgagagaagcagatgagggaggaggctgaacgcacgagggatgagttggagaggaggctgctgcagatgaaagaagaagcaacaatggccaacgaagcactgatgcggtctgaggagacagctgacctgttggctgaaaaggcccagatcaccgaggaggaggcaaaacttctggcccagaaggccgcagaggctgagcaggaaatgcagcgcatcaaggccacagcgattcgcacggaggaggagaagcgcctgatggagcagaaggtgctggaagccgaggtgctggcactgaagatggctgaggagtcagagaggagggccaaagaggcagatcagctgaagcaggacctgcaggaagcacgcgaggcggagcgaagagccaagcagaagctcctggagattgccaccaagcccacgtacccgcccatgaacccaattccagcaccgttgcctcctgacataccaagcttcaacctcattggtgacagcctgtctttcgacttcaaagatactgacatgaagcggctttccatggagatagagaaagaaaaagtggaatacatggaaaagagcaagcatctgcaggagcagctcaatgaactcaagacagaaatcgaggccttgaaactgaaagagagggagacagctctggatattctgcacaatgagaactccgacaggggtggcagcagcaagcacaataccattaaaaagcctcaagcccaaggcagaagacctatctgcatttgagccctcaaactcaccttgcagagcgccaagtcccgagtggccttctttgaagagctctagcaggtgacc

SEQ ID NO: 158846 - DNA, 6025 bp, Homo sapiens
  Payload ID: 11073
  Gene Symbol: NF2
  Gene Name: neurofibromin 2 (merlin)
  Uniprot ID: P35240
  ENST ID: ENST00000338641
  CDS Start-End: 442-2229
cgcttcccgcgggcgcgcggagtgaggacggtgacagccacgcgcgcgcgtacgcgcccgatgcagcgcggccccgtgaccctagtcggccgctgagaggcgcgcggagtctgggccgctgccgtctaggggtcccgtcccgaggcgtccccggcatctccggcccgaatcccggagtgccgggtcgcgcctgcaccgaaggtcccggctcctgtgccctccctgcagccgtcagggcccgtcccccaactcccctttccgctcaggcagggtcctcgcggcccatgctggccgctggggacccgcgcagcccagaccgttcccgggccgggcagccggccaccatggtggccctgaggcctgtgcagcaactccaggggggctaaagggctcagagtgcaggccgtggggcgcgagggtcccgggcctgagccccgcgccatggccggggccatcgcttcccgcatgagcttcagctctctcaagaggaagcaacccaagacgttcaccgtgaggatcgtcaccatggacgccgagatggagttcaattgcgagatgaagtggaaagggaaggacctctttgatttggtgtgccggactctggggctccgagaaacctggttctttggactgcagtacacaatcaaggacacagtggcctggctcaaaatggacaagaaggtactggatcatgatgtttcaaaggaagaaccagtcacctttcacttcttggccaaattttatcctgagaatgctgaagaggagctggttcaggagatcacacaacatttattcttcttacaggtaaagaagcagattttagatgaaaagatctactgccctcctgaggcttctgtgctcctggcttcttacgccgtccaggccaagtatggtgactacgaccccagtgttcacaagcggggatttttggcccaagaggaattgcttccaaaaagggtaataaatctgtatcagatgactccggaaatgtgggaggagagaattactgcttggtacgcagagcaccgaggccgagccagggatgaagctgaaatggaatatctgaagatagctcaggacctggagatgtacggtgtgaactactttgcaatccggaataaaaagggcacagagctgctgcttggagtggatgccctggggcttcacatttatgaccctgagaacagactgacccccaagatctccttcccgtggaatgaaatccgaaacatctcgtacagtgacaaggagtttactattaaaccactggataagaaaattgatgtcttcaagtttaactcctcaaagcttcgtgttaataagctgattctccagctatgtatcgggaaccatgatctatttatgaggagaaggaaagccgattctttggaagttcagcagatgaaagcccaggccagggaggagaaggctagaaagcagatggagcggcagcgcctcgctcgagagaagcagatgagggaggaggctgaacgcacgagggatgagttggagaggaggctgctgcagatgaaagaagaagcaacaatggccaacgaagcactgatgcggtctgaggagacagctgacctgttggctgaaaaggcccagatcaccgaggaggaggcaaaacttctggcccagaaggccgcagaggctgagcaggaaatgcagcgcatcaaggccacagcgattcgcacggaggaggagaagcgcctgatggagcagaaggtgctggaagccgaggtgctggcactgaagatggctgaggagtcagagaggagggccaaagaggcagatcagctgaagcaggacctgcaggaagcacgcgaggcggagcgaagagccaagcagaagctcctggagattgccaccaagcccacgtacccgcccatgaacccaattccagcaccgttgcctcctgacataccaagcttcaacctcattggtgacagcctgtctttcgacttcaaagatactgacatgaagcggctttccatggagatagagaaagaaaaagtggaatacatggaaaagagcaagcatctgcaggagcagctcaatgaactcaagacagaaatcgaggccttgaaactgaaagagagggagacagctctggatattctgcacaatgagaactccgacaggggtggcagcagcaagcacaataccattaaaaagctcaccttgcagagcgccaagtcccgagtggccttctttgaagagctctagcaggtgacccagccaccccaggacctgccacttctcctgctaccgggaccgcgggatggaccagatatcaagagagccatccatagggagctggctgggggtttccgtgggagctccagaactttccccagctgagtgaagagcccagcccctcttatgtgcaattgccttgaactacgaccctgtagagatttctctcatggcgttctagttctctgacctgagtctttgttttaagaagtatttgtcttcctttgtctaatgtgggattcctgactcccttcgtccaaggcaccggtgtgtgtgtgtcttgcactccagagctgacctccaccgcccagcctgggaagtcattgtagggagtgagacactgaagccctgagaagccagtgccatcatccccaccccgcccagggttccggaacattcattcccccaccggtgaggacctggcatgcagcgaagcagcccagcccggcggatcccaggccagcacgcctgccggcttctcatcgtcagggagcccgcccagagctcgtgacgagcaagtgctgggtccccgccaggcaccccgaggcggcgctctggctggcagctggtggggaataggcagggcagctgtggctggggagagactttaggcagaagctgtgatgcaggctgactgccagccgaggggctgggtagtgccgtgcgggagctgatggtacagggcactcgctgtccccctccggccaccctagaccagggtccgagaggcaggcaggagccactcatgtcttccccattgcccgacgcccatagacgctccttcctgtgtggggctggggtactccctggtcgtactgcagtcagcacccgtaacccggctatgaccagggatctgtaagccctgtggctccacaggtgctgcttctcactggcccagactctgagctccaccggcccagtctgcacggcccatctgcttcaccttccctcccagccacgtgccagtggccacagcccacttcccaacccactgttgtacccaggcctcactttgctgttgcccttgtccctcttcgggccctgaattttctgttccctgggggccagccagggccctttgtgcccctcccagcacaggcctgatgcaggtgtccactcacaggtggcgctcacctaggctgtcacaggacccacctccatgccaggcaacagagggccacagaaccacccccacggctcactccttggtctggggccaccttcttgccctttctttttttttttttttttttttttccgagatggagtctctctctgtcacccaggtgggagtgtggtggcacaatctcggctcactgcaacctccacctcctgagttcaagcaattctcctgcctcagcctcccaagtagctgggactacaggcatgcaccaccacacttggccaatgttctgtatttttaatagggacggggttttgccatgttagctaggctggtctcaaactcacacctgggattacaggcatgagccactgcacccagccccttcttgccctttcttttctccatggctgatgctgctgtggccagccagggcccttgagatccttccagtttggctgttatgcaaagcaggtgatttgtcttaatcagataaaagatagaggctatgggggcctcaagatttttggagagcagaggtggtctctggcaattccatctggttttgagaaacttagcagctcacagagcacagagatcctgccttcttcctactatcaggctgacctaatggggttgggctgctcggcaactgcttgggtcaccttgccccaaggaaaccagccctgggtgccacccagccacttagggtctacagggtgggactccagacctagagcgtaagtatggatgttgtggccctgtgtcttcctagtgtgacccagccaggagcggaagcttcaggcgtttgtaaagtgaggtctggctctgcctcctccgttttttttttttttctgtttctgtttctgttttttttttgagatggagtctcgctctgtcgcccaggctggagtgcagtgtcacgatctcagctcactgcaacctccgcctcccaggtacaagagattctcctgcctcagcctcccgagtagctgggactacaggcgtgtgccaccatgcctggctaatttttgtatttttagtagagatggggtttcgccatgttagccagactggtctcgaactcctgacctcaggtgatcctcccaccccggcttcccaaagttctgggattataggcgtgagccaccatgcccggtctcttctcagtcttgaagcccatccctggatttccaccaggagttactttcctcctgacctgtaaatttgttctttaacaatggctgcaggtgggagcatatggtggtttataaaaacgctgtcgggctttgtttccttctttagctgccgtgtctacttctgaagtctgggaagtgccaagccacgcggcctcaagggagctggctggtgtttgagctgtggcagaagcacctggggctccagggagcaggctgggaactgcaggaccttgctcagccaggagcacttccccctccttgaggcaggaatactgaggtgcctccccacagatggagaaggtggagaggaggatgggcctcaggagcatctcaagccccagtagcaggagaaagaaagaaagagatgcctggttttcacagactggttcctgtggctgggatgactgcatccttttttttttttttttgagacggagtttttgcctttgtcgcccaggctggagtgcaatggcgtgatctcggctcaccgcaacctccgcctcccggattcaagcaattctcctgcctcagcctcccgagtagctgggattacaggcacgcacctccacgtccggctaattttgtatttttagtggagacggggtttctccatgtcggtcaggctggtctcgaactcccgacctcaggtgatctgcccacctcggcctcccaaagtgctgggattacaggcatgagccaccgcgcttggccagactgcgtcctttttaagcgaacattttagggcctgggagtttgtcaagtaaggaagtctcaagcccaaagagcagcgtcctgaccatggtggtttcattacgagcccttctgctggctctcaggcagaagccccacagcaccgggaccattcatgaggtcactgcccagctcatgatgtccgtgaggctgtccttttggccagtagccgtgtgcagctgtgtggcacagatggcttcgttcatcctgatcaaggccccacctcagccacagcagtccccccaacctgtgttgtccaccctattattcatgtacctgccaggccctgctagatagcaccccgtggcattacataacacttcatgagtggctgtgtcttgtaattttggggacaggtttctctctttccctctcttttttttgtcaaaagcccagagactgacaaccagctgcagtgtctaagtgttcctcactgacagggtggggcctcaccacccctggagggagcagcgttggcagggagacagcctggcccagtgaccctgggcccaagccagcccctccagggctttcagggaagcgccatccattttcaaagatgtcaaacgtcacttcttcctgtagggcccgagtcctgcctcctatcagggccagatcatagaaggctattttctattctggggaacgattataacttaaatgattgttttaataaaaattctaagctggaaaa

SEQ ID NO: 158847 - DNA, 1837 bp, Homo sapiens
  Payload ID: 11073
  Gene Symbol: NF2
  Gene Name: neurofibromin 2 (merlin)
  Uniprot ID: P35240
  ENST ID: ENST00000361166
  CDS Start-End: 1-1773
atggccggggccatcgcttcccgcatgagcttcagctctctcaagaggaagcaacccaagacgttcaccgtgaggatcgtcaccatggacgccgagatggagttcaattgcgagatgaagtggaaagggaaggacctctttgatttggtgtgccggactctggggctccgagaaacctggttctttggactgcagtacacaatcaaggacacagtggcctggctcaaaatggacaagaaggtactggatcatgatgtttcaaaggaagaaccagtcacctttcacttcttggccaaattttatcctgagaatgctgaagaggagctggttcaggagatcacacaacatttattcttcttacaggtaaagaagcagattttagatgaaaagatctactgccctcctgaggcttctgtgctcctggcttcttacgccgtccaggccaagtatggtgactacgaccccagtgttcacaagcggggatttttggcccaagaggaattgcttccaaaaagggtaataaatctgtatcagatgactccggaaatgtgggaggagagaattactgcttggtacgcagagcaccgaggccgagccagggatgaagctgaaatggaatatctgaagatagctcaggacctggagatgtacggtgtgaactactttgcaatccggaataaaaagggcacagagctgctgcttggagtggatgccctggggcttcacatttatgaccctgagaacagactgacccccaagatctccttcccgtggaatgaaatccgaaacatctcgtacagtgacaaggagtttactattaaaccactggataagaaaattgatgtcttcaagtttaactcctcaaagcttcgtgttaataagctgattctccagctatgtatcgggaaccatgatctatttatgaggagaaggaaagccgattctttggaagttcagcagatgaaagcccaggccagggaggagaaggctagaaagcagatggagcggcagcgcctcgctcgagagaagcagatgagggaggaggctgaacgcacgagggatgagttggagaggaggctgctgcagatgaaagaagaagcaacaatggccaacgaagcactgatgcggtctgaggagacagctgacctgttggctgaaaaggcccagatcaccgaggaggaggcaaaacttctggcccagaaggccgcagaggctgagcaggaaatgcagcgcatcaaggccacagcgattcgcacggaggaggagaagcgcctgatggagcagaaggtgctggaagccgaggtgctggcactgaagatggctgaggagtcagagaggagggccaaagaggcagatcagctgaagcaggacctgcaggaagcacgcgaggcggagcgaagagccaagcagaagctcctggagattgccaccaagcccacgtacccgcccatgaacccaattccagcaccgttgcctcctgacataccaagcttcaacctcattggtgacagcctgtctttcgacttcaaagatactgacatgaagcggctttccatggagatagagaaagaaaaagtggaatacatggaaaagagcaagcatctgcaggagcagctcaatgaactcaagacagaaatcgaggccttgaaactgaaagagagggagacagctctggatattctgcacaatgagaactccgacaggggtggcagcagcaagcacaataccattaaaaagcctcaagcccaaggcagaagacctatctgcatttgagccctcaaactcaccttgcagagcgccaagtcccgagtggccttctttgaagagctctagcagg

SEQ ID NO: 158848 - DNA, 5884 bp, Homo sapiens
  Payload ID: 11073
  Gene Symbol: NF2
  Gene Name: neurofibromin 2 (merlin)
  Uniprot ID: P35240
  ENST ID: ENST00000361452
  CDS Start-End: 383-2032
gatgcagcgcggccccgtgaccctagtcggccgctgagaggcgcgcggagtctgggccgctgccgtctaggggtcccgtcccgaggcgtccccggcatctccggcccgaatcccggagtgccgggtcgcgcctgcaccgaaggtcccggctcctgtgccctccctgcagccgtcagggcccgtcccccaactcccctttccgctcaggcagggtcctcgcggcccatgctggccgctggggacccgcgcagcccagaccgttcccgggccgggcagccggccaccatggtggccctgaggcctgtgcagcaactccaggggggctaaagggctcagagtgcaggccgtggggcgcgagggtcccgggcctgagccccgcgccatggccggggccatcgcttcccgcatgagcttcagctctctcaagaggaagcaacccaagacgttcaccgtgaggatcgtcaccatggacgccgagatggagttcaattgcgagatgaagtggaaagggaaggacctctttgatttggtgtgccggactctggggctccgagaaacctggttctttggactgcagtacacaatcaaggacacagtggcctggctcaaaatggacaagaaggtaaagaagcagattttagatgaaaagatctactgccctcctgaggcttctgtgctcctggcttcttacgccgtccaggccaagtatggtgactacgaccccagtgttcacaagcggggatttttggcccaagaggaattgcttccaaaaagggtaataaatctgtatcagatgactccggaaatgtgggaggagagaattactgcttggtacgcagagcaccgaggccgagccagggatgaagctgaaatggaatatctgaagatagctcaggacctggagatgtacggtgtgaactactttgcaatccggaataaaaagggcacagagctgctgcttggagtggatgccctggggcttcacatttatgaccctgagaacagactgacccccaagatctccttcccgtggaatgaaatccgaaacatctcgtacagtgacaaggagtttactattaaaccactggataagaaaattgatgtcttcaagtttaactcctcaaagcttcgtgttaataagctgattctccagctatgtatcgggaaccatgatctatttatgaggagaaggaaagccgattctttggaagttcagcagatgaaagcccaggccagggaggagaaggctagaaagcagatggagcggcagcgcctcgctcgagagaagcagatgagggaggaggctgaacgcacgagggatgagttggagaggaggctgctgcagatgaaagaagaagcaacaatggccaacgaagcactgatgcggtctgaggagacagctgacctgttggctgaaaaggcccagatcaccgaggaggaggcaaaacttctggcccagaaggccgcagaggctgagcaggaaatgcagcgcatcaaggccacagcgattcgcacggaggaggagaagcgcctgatggagcagaaggtgctggaagccgaggtgctggcactgaagatggctgaggagtcagagaggagggccaaagaggcagatcagctgaagcaggacctgcaggaagcacgcgaggcggagcgaagagccaagcagaagctcctggagattgccaccaagcccacgtacccgcccatgaacccaattccagcaccgttgcctcctgacataccaagcttcaacctcattggtgacagcctgtctttcgacttcaaagatactgacatgaagcggctttccatggagatagagaaagaaaaagtggaatacatggaaaagagcaagcatctgcaggagcagctcaatgaactcaagacagaaatcgaggccttgaaactgaaagagagggagacagctctggatattctgcacaatgagaactccgacaggggtggcagcagcaagcacaataccattaaaaagcctcaagcccaaggcagaagacctatctgcatttgagccctcaaactcaccttgcagagcgccaagtcccgagtggccttctttgaagagctctagcaggtgacccagccaccccaggacctgccacttctcctgctaccgggaccgcgggatggaccagatatcaagagagccatccatagggagctggctgggggtttccgtgggagctccagaactttccccagctgagtgaagagcccagcccctcttatgtgcaattgccttgaactacgaccctgtagagatttctctcatggcgttctagttctctgacctgagtctttgttttaagaagtatttgtcttcctttgtctaatgtgggattcctgactcccttcgtccaaggcaccggtgtgtgtgtgtcttgcactccagagctgacctccaccgcccagcctgggaagtcattgtagggagtgagacactgaagccctgagaagccagtgccatcatccccaccccgcccagggttccggaacattcattcccccaccggtgaggacctggcatgcagcgaagcagcccagcccggcggatcccaggccagcacgcctgccggcttctcatcgtcagggagcccgcccagagctcgtgacgagcaagtgctgggtccccgccaggcaccccgaggcggcgctctggctggcagctggtggggaataggcagggcagctgtggctggggagagactttaggcagaagctgtgatgcaggctgactgccagccgaggggctgggtagtgccgtgcgggagctgatggtacagggcactcgctgtccccctccggccaccctagaccagggtccgagaggcaggcaggagccactcatgtcttccccattgcccgacgcccatagacgctccttcctgtgtggggctggggtactccctggtcgtactgcagtcagcacccgtaacccggctatgaccagggatctgtaagccctgtggctccacaggtgctgcttctcactggcccagactctgagctccaccggcccagtctgcacggcccatctgcttcaccttccctcccagccacgtgccagtggccacagcccacttcccaacccactgttgtacccaggcctcactttgctgttgcccttgtccctcttcgggccctgaattttctgttccctgggggccagccagggccctttgtgcccctcccagcacaggcctgatgcaggtgtccactcacaggtggcgctcacctaggctgtcacaggacccacctccatgccaggcaacagagggccacagaaccacccccacggctcactccttggtctggggccaccttcttgccctttctttttttttttttttttttttttccgagatggagtctctctctgtcacccaggtgggagtgtggtggcacaatctcggctcactgcaacctccacctcctgagttcaagcaattctcctgcctcagcctcccaagtagctgggactacaggcatgcaccaccacacttggccaatgttctgtatttttaatagggacggggttttgccatgttagctaggctggtctcaaactcacacctgggattacaggcatgagccactgcacccagccccttcttgccctttcttttctccatggctgatgctgctgtggccagccagggcccttgagatccttccagtttggctgttatgcaaagcaggtgatttgtcttaatcagataaaagatagaggctatgggggcctcaagatttttggagagcagaggtggtctctggcaattccatctggttttgagaaacttagcagctcacagagcacagagatcctgccttcttcctactatcaggctgacctaatggggttgggctgctcggcaactgcttgggtcaccttgccccaaggaaaccagccctgggtgccacccagccacttagggtctacagggtgggactccagacctagagcgtaagtatggatgttgtggccctgtgtcttcctagtgtgacccagccaggagcggaagcttcaggcgtttgtaaagtgaggtctggctctgcctcctccgttttttttttttttctgtttctgtttctgttttttttttgagatggagtctcgctctgtcgcccaggctggagtgcagtgtcacgatctcagctcactgcaacctccgcctcccaggtacaagagattctcctgcctcagcctcccgagtagctgggactacaggcgtgtgccaccatgcctggctaatttttgtatttttagtagagatggggtttcgccatgttagccagactggtctcgaactcctgacctcaggtgatcctcccaccccggcttcccaaagttctgggattataggcgtgagccaccatgcccggtctcttctcagtcttgaagcccatccctggatttccaccaggagttactttcctcctgacctgtaaatttgttctttaacaatggctgcaggtgggagcatatggtggtttataaaaacgctgtcgggctttgtttccttctttagctgccgtgtctacttctgaagtctgggaagtgccaagccacgcggcctcaagggagctggctggtgtttgagctgtggcagaagcacctggggctccagggagcaggctgggaactgcaggaccttgctcagccaggagcacttccccctccttgaggcaggaatactgaggtgcctccccacagatggagaaggtggagaggaggatgggcctcaggagcatctcaagccccagtagcaggagaaagaaagaaagagatgcctggttttcacagactggttcctgtggctgggatgactgcatccttttttttttttttttgagacggagtttttgcctttgtcgcccaggctggagtgcaatggcgtgatctcggctcaccgcaacctccgcctcccggattcaagcaattctcctgcctcagcctcccgagtagctgggattacaggcacgcacctccacgtccggctaattttgtatttttagtggagacggggtttctccatgtcggtcaggctggtctcgaactcccgacctcaggtgatctgcccacctcggcctcccaaagtgctgggattacaggcatgagccaccgcgcttggccagactgcgtcctttttaagcgaacattttagggcctgggagtttgtcaagtaaggaagtctcaagcccaaagagcagcgtcctgaccatggtggtttcattacgagcccttctgctggctctcaggcagaagccccacagcaccgggaccattcatgaggtcactgcccagctcatgatgtccgtgaggctgtccttttggccagtagccgtgtgcagctgtgtggcacagatggcttcgttcatcctgatcaaggccccacctcagccacagcagtccccccaacctgtgttgtccaccctattattcatgtacctgccaggccctgctagatagcaccccgtggcattacataacacttcatgagtggctgtgtcttgtaattttggggacaggtttctctctttccctctcttttttttgtcaaaagcccagagactgacaaccagctgcagtgtctaagtgttcctcactgacagggtggggcctcaccacccctggagggagcagcgttggcagggagacagcctggcccagtgaccctgggcccaagccagcccctccagggctttcagggaagcgccatccattttcaaagatgtcaaacgtcacttcttcctgtagggcccgagtcctgcctcctatcagggccagatcatagaaggctattttctattctggggaacgattataacttaaatgattgttttaataaaaattctaagctgg

SEQ ID NO: 158849 - DNA, 1716 bp, Homo sapiens
  Payload ID: 11073
  Gene Symbol: NF2
  Gene Name: neurofibromin 2 (merlin)
  Uniprot ID: P35240
  ENST ID: ENST00000361676
  CDS Start-End: 1-1647
atggccggggccatcgcttcccgcatgagcttcagctctctcaagaggaagcaacccaagacgttcaccgtgaggatcgtcaccatggacgccgagatggagttcaattgcgaggtactggatcatgatgtttcaaaggaagaaccagtcacctttcacttcttggccaaattttatcctgagaatgctgaagaggagctggttcaggagatcacacaacatttattcttcttacaggtaaagaagcagattttagatgaaaagatctactgccctcctgaggcttctgtgctcctggcttcttacgccgtccaggccaagtatggtgactacgaccccagtgttcacaagcggggatttttggcccaagaggaattgcttccaaaaagggtaataaatctgtatcagatgactccggaaatgtgggaggagagaattactgcttggtacgcagagcaccgaggccgagccagggatgaagctgaaatggaatatctgaagatagctcaggacctggagatgtacggtgtgaactactttgcaatccggaataaaaagggcacagagctgctgcttggagtggatgccctggggcttcacatttatgaccctgagaacagactgacccccaagatctccttcccgtggaatgaaatccgaaacatctcgtacagtgacaaggagtttactattaaaccactggataagaaaattgatgtcttcaagtttaactcctcaaagcttcgtgttaataagctgattctccagctatgtatcgggaaccatgatctatttatgaggagaaggaaagccgattctttggaagttcagcagatgaaagcccaggccagggaggagaaggctagaaagcagatggagcggcagcgcctcgctcgagagaagcagatgagggaggaggctgaacgcacgagggatgagttggagaggaggctgctgcagatgaaagaagaagcaacaatggccaacgaagcactgatgcggtctgaggagacagctgacctgttggctgaaaaggcccagatcaccgaggaggaggcaaaacttctggcccagaaggccgcagaggctgagcaggaaatgcagcgcatcaaggccacagcgattcgcacggaggaggagaagcgcctgatggagcagaaggtgctggaagccgaggtgctggcactgaagatggctgaggagtcagagaggagggccaaagaggcagatcagctgaagcaggacctgcaggaagcacgcgaggcggagcgaagagccaagcagaagctcctggagattgccaccaagcccacgtacccgcccatgaacccaattccagcaccgttgcctcctgacataccaagcttcaacctcattggtgacagcctgtctttcgacttcaaagatactgacatgaagcggctttccatggagatagagaaagaaaaagtggaatacatggaaaagagcaagcatctgcaggagcagctcaatgaactcaagacagaaatcgaggccttgaaactgaaagagagggagacagctctggatattctgcacaatgagaactccgacaggggtggcagcagcaagcacaataccattaaaaagcctcaagcccaaggcagaagacctatctgcatttgagccctcaaactcaccttgcagagcgccaagtcccgagtggccttctttgaagagctctagcaggtgacc

SEQ ID NO: 158850 - DNA, 1857 bp, Homo sapiens
  Payload ID: 11073
  Gene Symbol: NF2
  Gene Name: neurofibromin 2 (merlin)
  Uniprot ID: P35240
  ENST ID: ENST00000397789
  CDS Start-End: 1-1773
atggccggggccatcgcttcccgcatgagcttcagctctctcaagaggaagcaacccaagacgttcaccgtgaggatcgtcaccatggacgccgagatggagttcaattgcgagatgaagtggaaagggaaggacctctttgatttggtgtgccggactctggggctccgagaaacctggttctttggactgcagtacacaatcaaggacacagtggcctggctcaaaatggacaagaaggtactggatcatgatgtttcaaaggaagaaccagtcacctttcacttcttggccaaattttatcctgagaatgctgaagaggagctggttcaggagatcacacaacatttattcttcttacaggtaaagaagcagattttagatgaaaagatctactgccctcctgaggcttctgtgctcctggcttcttacgccgtccaggccaagtatggtgactacgaccccagtgttcacaagcggggatttttggcccaagaggaattgcttccaaaaagggtaataaatctgtatcagatgactccggaaatgtgggaggagagaattactgcttggtacgcagagcaccgaggccgagccagggatgaagctgaaatggaatatctgaagatagctcaggacctggagatgtacggtgtgaactactttgcaatccggaataaaaagggcacagagctgctgcttggagtggatgccctggggcttcacatttatgaccctgagaacagactgacccccaagatctccttcccgtggaatgaaatccgaaacatctcgtacagtgacaaggagtttactattaaaccactggataagaaaattgatgtcttcaagtttaactcctcaaagcttcgtgttaataagctgattctccagctatgtatcgggaaccatgatctatttatgaggagaaggaaagccgattctttggaagttcagcagatgaaagcccaggccagggaggagaaggctagaaagcagatggagcggcagcgcctcgctcgagagaagcagatgagggaggaggctgaacgcacgagggatgagttggagaggaggctgctgcagatgaaagaagaagcaacaatggccaacgaagcactgatgcggtctgaggagacagctgacctgttggctgaaaaggcccagatcaccgaggaggaggcaaaacttctggcccagaaggccgcagaggctgagcaggaaatgcagcgcatcaaggccacagcgattcgcacggaggaggagaagcgcctgatggagcagaaggtgctggaagccgaggtgctggcactgaagatggctgaggagtcagagaggagggccaaagaggcagatcagctgaagcaggacctgcaggaagcacgcgaggcggagcgaagagccaagcagaagctcctggagattgccaccaagcccacgtacccgcccatgaacccaattccagcaccgttgcctcctgacataccaagcttcaacctcattggtgacagcctgtctttcgacttcaaagatactgacatgaagcggctttccatggagatagagaaagaaaaagtggaatacatggaaaagagcaagcatctgcaggagcagctcaatgaactcaagacagaaatcgaggccttgaaactgaaagagagggagacagctctggatattctgcacaatgagaactccgacaggggtggcagcagcaagcacaataccattaaaaagcctcaagcccaaggcagaagacctatctgcatttgagccctcaaagtaggttgttcccagctcaccttgcagagcgccaagtcccgagtggccttctttgaagagctctagcaggtgacc

SEQ ID NO: 158851 - DNA, 2568 bp, Homo sapiens
  Payload ID: 11073
  Gene Symbol: NF2
  Gene Name: neurofibromin 2 (merlin)
  Uniprot ID: P35240
  ENST ID: ENST00000403435
  CDS Start-End: 412-2097
gtgacagccacgcgcgcgcgtacgcgcccgatgcagcgcggccccgtgaccctagtcggccgctgagaggcgcgcggagtctgggccgctgccgtctaggggtcccgtcccgaggcgtccccggcatctccggcccgaatcccggagtgccgggtcgcgcctgcaccgaaggtcccggctcctgtgccctccctgcagccgtcagggcccgtcccccaactcccctttccgctcaggcagggtcctcgcggcccatgctggccgctggggacccgcgcagcccagaccgttcccgggccgggcagccggccaccatggtggccctgaggcctgtgcagcaactccaggggggctaaagggctcagagtgcaggccgtggggcgcgagggtcccgggcctgagccccgcgccatggccggggccatcgcttcccgcatgagcttcagctctctcaagaggaagcaacccaagacgttcaccgtgaggatcgtcaccatggacgccgagatggagttcaattgcgagatgaagtggaaagggaaggacctctttgatttggtgtgccggactctggggctccgagaaacctggttctttggactgcagtacacaatcaaggacacagtggcctggctcaaaatggacaagaaggtactggatcatgatgtttcaaaggaagaaccagtcacctttcacttcttggccaaattttatcctgagaatgctgaagaggagctggttcaggagatcacacaacatttattcttcttacaggtaaagaagcagattttagatgaaaagatctactgccctcctgaggcttctgtgctcctggcttcttacgccgtccaggccaagtatggtgactacgaccccagtgttcacaagcggggatttttggcccaagaggaattgcttccaaaaagggtaataaatctgtatcagatgactccggaaatgtgggaggagagaattactgcttggtacgcagagcaccgaggccgagccagggatgaagctgaaatggaatatctgaagatagctcaggacctggagatgtacggtgtgaactactttgcaatccggaataaaaagggcacagagctgctgcttggagtggatgccctggggcttcacatttatgaccctgagaacagactgacccccaagatctccttcccgtggaatgaaatccgaaacatctcgtacagtgacaaggagtttactattaaaccactggataagaaaattgatgtcttcaagtttaactcctcaaagcttcgtgttaataagctgattctccagctatgtatcgggaaccatgatctatttatgaggagaaggaaagccgattctttggaagttcagcagatgaaagcccaggccagggaggagaaggctagaaagcagatgaaagaagaagcaacaatggccaacgaagcactgatgcggtctgaggagacagctgacctgttggctgaaaaggcccagatcaccgaggaggaggcaaaacttctggcccagaaggccgcagaggctgagcaggaaatgcagcgcatcaaggccacagcgattcgcacggaggaggagaagcgcctgatggagcagaaggtgctggaagccgaggtgctggcactgaagatggctgaggagtcagagaggagggccaaagaggcagatcagctgaagcaggacctgcaggaagcacgcgaggcggagcgaagagccaagcagaagctcctggagattgccaccaagcccacgtacccgcccatgaacccaattccagcaccgttgcctcctgacataccaagcttcaacctcattggtgacagcctgtctttcgacttcaaagatactgacatgaagcggctttccatggagatagagaaagaaaaagtggaatacatggaaaagagcaagcatctgcaggagcagctcaatgaactcaagacagaaatcgaggccttgaaactgaaagagagggagacagctctggatattctgcacaatgagaactccgacaggggtggcagcagcaagcacaataccattaaaaagcctcaagcccaaggcagaagacctatctgcatttgagccctcaaacttcctctccataggctgagcagagatgtggtcagagtgaactcacattggaacagtacactcacggcaccctggagaggagcggtcactggttgctgagtgaattaaccgaatgtttgctgcttttctcctgcaacagttcattattcctccagcatgcctaggcagtggagagaatgtattttgcccaataataaaatgacatcctgcctctacttctcacctaatccccagtagtacccatgccaacaagccccacaccacctgacagcagcataggatgtgtcctttggagtcttccctgcagtttctgctcatagagtggaataagctcattggaacctttctaacaaaaagagatctggcataagatagatcctacttgtggtcgttatcccatcaagagaggtcagctgttaaagtccctgatagatcttattaaaaggtacacttgagctgtca

SEQ ID NO: 158852 - DNA, 2999 bp, Homo sapiens
  Payload ID: 11073
  Gene Symbol: NF2
  Gene Name: neurofibromin 2 (merlin)
  Uniprot ID: P35240
  ENST ID: ENST00000403999
  CDS Start-End: 367-2139
gtgaccctagtcggccgctgagaggcgcgcggagtctgggccgctgccgtctaggggtcccgtcccgaggcgtccccggcatctccggcccgaatcccggagtgccgggtcgcgcctgcaccgaaggtcccggctcctgtgccctccctgcagccgtcagggcccgtcccccaactcccctttccgctcaggcagggtcctcgcggcccatgctggccgctggggacccgcgcagcccagaccgttcccgggccgggcagccggccaccatggtggccctgaggcctgtgcagcaactccaggggggctaaagggctcagagtgcaggccgtggggcgcgagggtcccgggcctgagccccgcgccatggccggggccatcgcttcccgcatgagcttcagctctctcaagaggaagcaacccaagacgttcaccgtgaggatcgtcaccatggacgccgagatggagttcaattgcgagatgaagtggaaagggaaggacctctttgatttggtgtgccggactctggggctccgagaaacctggttctttggactgcagtacacaatcaaggacacagtggcctggctcaaaatggacaagaaggtactggatcatgatgtttcaaaggaagaaccagtcacctttcacttcttggccaaattttatcctgagaatgctgaagaggagctggttcaggagatcacacaacatttattcttcttacaggtaaagaagcagattttagatgaaaagatctactgccctcctgaggcttctgtgctcctggcttcttacgccgtccaggccaagtatggtgactacgaccccagtgttcacaagcggggatttttggcccaagaggaattgcttccaaaaagggtaataaatctgtatcagatgactccggaaatgtgggaggagagaattactgcttggtacgcagagcaccgaggccgagccagggatgaagctgaaatggaatatctgaagatagctcaggacctggagatgtacggtgtgaactactttgcaatccggaataaaaagggcacagagctgctgcttggagtggatgccctggggcttcacatttatgaccctgagaacagactgacccccaagatctccttcccgtggaatgaaatccgaaacatctcgtacagtgacaaggagtttactattaaaccactggataagaaaattgatgtcttcaagtttaactcctcaaagcttcgtgttaataagctgattctccagctatgtatcgggaaccatgatctatttatgaggagaaggaaagccgattctttggaagttcagcagatgaaagcccaggccagggaggagaaggctagaaagcagatggagcggcagcgcctcgctcgagagaagcagatgagggaggaggctgaacgcacgagggatgagttggagaggaggctgctgcagatgaaagaagaagcaacaatggccaacgaagcactgatgcggtctgaggagacagctgacctgttggctgaaaaggcccagatcaccgaggaggaggcaaaacttctggcccagaaggccgcagaggctgagcaggaaatgcagcgcatcaaggccacagcgattcgcacggaggaggagaagcgcctgatggagcagaaggtgctggaagccgaggtgctggcactgaagatggctgaggagtcagagaggagggccaaagaggcagatcagctgaagcaggacctgcaggaagcacgcgaggcggagcgaagagccaagcagaagctcctggagattgccaccaagcccacgtacccgcccatgaacccaattccagcaccgttgcctcctgacataccaagcttcaacctcattggtgacagcctgtctttcgacttcaaagatactgacatgaagcggctttccatggagatagagaaagaaaaagtggaatacatggaaaagagcaagcatctgcaggagcagctcaatgaactcaagacagaaatcgaggccttgaaactgaaagagagggagacagctctggatattctgcacaatgagaactccgacaggggtggcagcagcaagcacaataccattaaaaagcctcaagcccaaggcagaagacctatctgcatttgagccctcaaagtaggttgttcccaggtactctctatgtggtgatggtgctgccctctgtgatactaacccgtgcatgagcttgcctgtctctgtcctcgggccacactgagcccttacgagggcaggtggtgcctgggtactggccgcagcatgctttgagtctaaaagtaggcacccaccctgtgaagccagaccagcctccagggccccagaagactgcctcgttccgaagagcatgtcatggggctgtaggaccagccattcttcccatctcgggtcattgttgggctggggaaggttatggcttcttgtccagtcaggtgtgtctaaaagtcctttgtcttggtggcatactcctagcatggaaatggggtcaatctgggcactttggagactggtgtgtttaactcaagatcaagaccttttatgcgttgacagcctctcaagacccatggtcacacctggcagcttctggtagtggggcaaaagggttgcttgtgctggctcattttcctttagagctttccctttctgcacacatcccttttcttttcaaataaagcaaacccagagcacagggtctgatatgtgagtccacggggagtggactgtctgttcatctgtgctcagccacctctgcttcagcttcctctccataggctgagcagagatgtggtcagagtgaactcacattggaacagtacactcacggcaccctggagaggagcggtcactggttgctgagtgaattaaccgaatgtttgctgcttttctcctgcaacagttcattattcctccagcatgcctaggcagtggagagaatgtattttgcccaataataaaatgacatcctgcctcta

SEQ ID NO: 158853 - DNA, 1000 bp, Homo sapiens
  Payload ID: 11073
  Gene Symbol: NF2
  Gene Name: neurofibromin 2 (merlin)
  Uniprot ID: P35240
  ENST ID: ENST00000432151
  CDS Start-End: 51-713
tcagagtgcaggccgtggggcgcgagggtcccgggcctgagccccgcgccatggccggggccatcgcttcccgcatgagcttcagctctctcaagaggaagcaacccaagacgttcaccgtgaggatcgtcaccatggacgccgagatggagttcaattgcgaggtaaagaagcagattttagatgaaaagatctactgccctcctgaggcttctgtgctcctggcttcttacgccgtccaggccaagaataaaaagggcacagagctgctgcttggagtggatgccctggggcttcacatttatgaccctgagaacagactgacccccaagatctccttcccgtggaatgaaatccgaaacatctcgtacagtgacaaggagtttactattaaaccactggataagaaaattgatgtcttcaagtttaactcctcaaagcttcgtgttaataagctgattctccagctatgtatcgggaaccatgatctatttatgaggagaaggaaagccgattctttggaagttcagcagatgaaagcccaggccagggaggagaaggctagaaagcagggccaaagaggcagatcagctgaagcaggacctgcaggaagcacgcgaggcggagcgaagagccaagcagaagctcctggagattgccaccaagcccacgtacccgcccatgaacccaattccagcaccgttgcctcctgacataccaagcttcaacctcattggtgacagcctgtctttcgacttcaaagatactgacatgaagcggctttccatggagatagagaaagaaaactcaccttgcagagcgccaagtcccgagtggccttctttgaagagctctagcaggtgacccagccaccccaggacctgccacttctcctgctaccgggaccgcgggatggaccagatatcaagagagccatccatagggagctggctgggggtttccgtgggagctccagaactttccccagctgagtgaagag

SEQ ID NO: 158854 - DNA, 4733 bp, Homo sapiens
  Payload ID: 11073
  Gene Symbol: NF2
  Gene Name: neurofibromin 2 (merlin)
  Uniprot ID: P35240
  ENST ID: ENST00000413209
  CDS Start-End: 444-941
tgcgcttcccgcgggcgcgcggagtgaggacggtgacagccacgcgcgcgcgtacgcgcccgatgcagcgcggccccgtgaccctagtcggccgctgagaggcgcgcggagtctgggccgctgccgtctaggggtcccgtcccgaggcgtccccggcatctccggcccgaatcccggagtgccgggtcgcgcctgcaccgaaggtcccggctcctgtgccctccctgcagccgtcagggcccgtcccccaactcccctttccgctcaggcagggtcctcgcggcccatgctggccgctggggacccgcgcagcccagaccgttcccgggccgggcagccggccaccatggtggccctgaggcctgtgcagcaactccaggggggctaaagggctcagagtgcaggccgtggggcgcgagggtcccgggcctgagccccgcgccatggccggggccatcgcttcccgcatgagcttcagctctctcaagaggaagcaacccaagacgttcaccgtgaggatcgtcaccatggacgccgagatggagttcaattgcgagatgaagtggaaagggaaggacctctttgatttggtgtgccggactctggggctccgagaaacctggttctttggactgcagtacacaatcaaggacacagtggcctggctcaaaatggacaagaaggtactggatcatgatgtttcaaaggaagaaccagtcacctttcacttcttggccaaattttatcctgagaatgctgaagaggagctggttcaggagatcacacaacatttattcttcttacaggtaaagaagcagattttagatgaaaagatctactgccctcctgaggcttctgtgctcctggcttcttacgccgtccaggccaagctcaccttgcagagcgccaagtcccgagtggccttctttgaagagctctagcaggtgacccagccaccccaggacctgccacttctcctgctaccgggaccgcgggatggaccagatatcaagagagccatccatagggagctggctgggggtttccgtgggagctccagaactttccccagctgagtgaagagcccagcccctcttatgtgcaattgccttgaactacgaccctgtagagatttctctcatggcgttctagttctctgacctgagtctttgttttaagaagtatttgtcttcctttgtctaatgtgggattcctgactcccttcgtccaaggcaccggtgtgtgtgtgtcttgcactccagagctgacctccaccgcccagcctgggaagtcattgtagggagtgagacactgaagccctgagaagccagtgccatcatccccaccccgcccagggttccggaacattcattcccccaccggtgaggacctggcatgcagcgaagcagcccagcccggcggatcccaggccagcacgcctgccggcttctcatcgtcagggagcccgcccagagctcgtgacgagcaagtgctgggtccccgccaggcaccccgaggcggcgctctggctggcagctggtggggaataggcagggcagctgtggctggggagagactttaggcagaagctgtgatgcaggctgactgccagccgaggggctgggtagtgccgtgcgggagctgatggtacagggcactcgctgtccccctccggccaccctagaccagggtccgagaggcaggcaggagccactcatgtcttccccattgcccgacgcccatagacgctccttcctgtgtggggctggggtactccctggtcgtactgcagtcagcacccgtaacccggctatgaccagggatctgtaagccctgtggctccacaggtgctgcttctcactggcccagactctgagctccaccggcccagtctgcacggcccatctgcttcaccttccctcccagccacgtgccagtggccacagcccacttcccaacccactgttgtacccaggcctcactttgctgttgcccttgtccctcttcgggccctgaattttctgttccctgggggccagccagggccctttgtgcccctcccagcacaggcctgatgcaggtgtccactcacaggtggcgctcacctaggctgtcacaggacccacctccatgccaggcaacagagggccacagaaccacccccacggctcactccttggtctggggccaccttcttgccctttctttttttttttttttttttttttccgagatggagtctctctctgtcacccaggtgggagtgtggtggcacaatctcggctcactgcaacctccacctcctgagttcaagcaattctcctgcctcagcctcccaagtagctgggactacaggcatgcaccaccacacttggccaatgttctgtatttttaatagggacggggttttgccatgttagctaggctggtctcaaactcacacctgggattacaggcatgagccactgcacccagccccttcttgccctttcttttctccatggctgatgctgctgtggccagccagggcccttgagatccttccagtttggctgttatgcaaagcaggtgatttgtcttaatcagataaaagatagaggctatgggggcctcaagatttttggagagcagaggtggtctctggcaattccatctggttttgagaaacttagcagctcacagagcacagagatcctgccttcttcctactatcaggctgacctaatggggttgggctgctcggcaactgcttgggtcaccttgccccaaggaaaccagccctgggtgccacccagccacttagggtctacagggtgggactccagacctagagcgtaagtatggatgttgtggccctgtgtcttcctagtgtgacccagccaggagcggaagcttcaggcgtttgtaaagtgaggtctggctctgcctcctccgttttttttttttttctgtttctgtttctgttttttttttgagatggagtctcgctctgtcgcccaggctggagtgcagtgtcacgatctcagctcactgcaacctccgcctcccaggtacaagagattctcctgcctcagcctcccgagtagctgggactacaggcgtgtgccaccatgcctggctaatttttgtatttttagtagagatggggtttcgccatgttagccagactggtctcgaactcctgacctcaggtgatcctcccaccccggcttcccaaagttctgggattataggcgtgagccaccatgcccggtctcttctcagtcttgaagcccatccctggatttccaccaggagttactttcctcctgacctgtaaatttgttctttaacaatggctgcaggtgggagcatatggtggtttataaaaacgctgtcgggctttgtttccttctttagctgccgtgtctacttctgaagtctgggaagtgccaagccacgcggcctcaagggagctggctggtgtttgagctgtggcagaagcacctggggctccagggagcaggctgggaactgcaggaccttgctcagccaggagcacttccccctccttgaggcaggaatactgaggtgcctccccacagatggagaaggtggagaggaggatgggcctcaggagcatctcaagccccagtagcaggagaaagaaagaaagagatgcctggttttcacagactggttcctgtggctgggatgactgcatccttttttttttttttttgagacggagtttttgcctttgtcgcccaggctggagtgcaatggcgtgatctcggctcaccgcaacctccgcctcccggattcaagcaattctcctgcctcagcctcccgagtagctgggattacaggcacgcacctccacgtccggctaattttgtatttttagtggagacggggtttctccatgtcggtcaggctggtctcgaactcccgacctcaggtgatctgcccacctcggcctcccaaagtgctgggattacaggcatgagccaccgcgcttggccagactgcgtcctttttaagcgaacattttagggcctgggagtttgtcaagtaaggaagtctcaagcccaaagagcagcgtcctgaccatggtggtttcattacgagcccttctgctggctctcaggcagaagccccacagcaccgggaccattcatgaggtcactgcccagctcatgatgtccgtgaggctgtccttttggccagtagccgtgtgcagctgtgtggcacagatggcttcgttcatcctgatcaaggccccacctcagccacagcagtccccccaacctgtgttgtccaccctattattcatgtacctgccaggccctgctagatagcaccccgtggcattacataacacttcatgagtggctgtgtcttgtaattttggggacaggtttctctctttccctctcttttttttgtcaaaagcccagagactgacaaccagctgcagtgtctaagtgttcctcactgacagggtggggcctcaccacccctggagggagcagcgttggcagggagacagcctggcccagtgaccctgggcccaagccagcccctccagggctttcagggaagcgccatccattttcaaagatgtcaaacgtcacttcttcctgtagggcccgagtcctgcctcctatcagggccagatcatagaaggctattttctattctggggaacgattataacttaaatgattgttttaataaaaattctaagctgg

SEQ ID NO: 158855 - DNA, 3783 bp, Homo sapiens
  Payload ID: 11074
  Gene Symbol: NEFH
  Gene Name: neurofilament, heavy polypeptide
  Uniprot ID: P12036
  ENST ID: ENST00000310624
  CDS Start-End: 34-3096
gccccgtcccggcctcgcgcacctgctcaggccatgatgagcttcggcggcgcggacgcgctgctgggcgccccgttcgcgccgctgcatggcggcggcagcctccactacgcgctagcccgaaagggtggcgcaggcgggacgcgctccgccgctggctcctccagcggcttccactcgtggacacggacgtccgtgagctccgtgtccgcctcgcccagccgcttccgtggcgcaggcgccgcctcaagcaccgactcgctggacacgctgagcaacgggccggagggctgcatggtggcggtggccacctcacgcagtgagaaggagcagctgcaggcgctgaacgaccgcttcgccgggtacatcgacaaggtgcggcagctggaggcgcacaaccgcagcctggagggcgaggctgcggcgctgcggcagcagcaggcgggccgctccgctatgggcgagctgtacgagcgcgaggtccgcgagatgcgcggcgcggtgctgcgcctgggcgcggcgcgcggtcagctacgcctggagcaggagcacctgctcgaggacatcgcgcacgtgcgccagcgcctagacgacgaggcccggcagcgagaggaggccgaggcggcggcccgcgcgctggcgcgcttcgcgcaggaggccgaggcggcgcgcgtggacctgcagaagaaggcgcaggcgctgcaggaggagtgcggctacctgcggcgccaccaccaggaagaggtgggcgagctgctcggccagatccagggctccggcgccgcgcaggcgcagatgcaggccgagacgcgcgacgccctgaagtgcgacgtgacgtcggcgctgcgcgagattcgcgcgcagcttgaaggccacgcggtgcagagcacgctgcagtccgaggagtggttccgagtgaggctggaccgactgtcggaggcagccaaggtgaacacagacgctatgcgctcagcgcaggaggagataactgagtaccggcgtcagctgcaggccaggaccacagagctggaggcactgaaaagcaccaaggactcactggagaggcagcgctctgagctggaggaccgtcatcaggccgacattgcctcctaccaggaagccattcagcagctggacgctgagctgaggaacaccaagtgggagatggccgcccagctgcgagaataccaggacctgctcaatgtcaagatggctctggatatagagatagccgcttacagaaaactcctggaaggtgaagagtgtcggattggctttggcccaattcctttctcgcttccagaaggactccccaaaattccctctgtgtccactcacataaaggtgaaaagcgaagagaagatcaaagtggtggagaagtctgagaaagaaactgtgattgtggaggaacagacagaggagacccaagtgactgaagaagtgactgaagaagaggagaaagaggccaaagaggaggagggcaaggaggaagaagggggtgaagaagaggaggcagaagggggagaagaagaaacaaagtctcccccagcagaagaggctgcatccccagagaaggaagccaagtcaccagtaaaggaagaggcaaagtcaccggctgaggccaagtccccagagaaggaggaagcaaaatccccagccgaagtcaagtcccctgagaaggccaagtctccagcaaaggaagaggcaaagtcaccgcctgaggccaagtccccagagaaggaggaagcaaaatctccagctgaggtcaagtcccccgagaaggccaagtccccagcaaaggaagaggcaaagtcaccggctgaggccaagtctccagagaaggccaagtccccagtgaaggaagaagcaaagtcaccggctgaggccaagtccccagtgaaggaagaagcaaaatctccagctgaggtcaagtccccggaaaaggccaagtctccaacgaaggaggaagcaaagtcccctgagaaggccaagtccccagagaaggaagaggccaagtcccctgagaaggccaagtccccagtgaaggcagaagcaaagtcccctgagaaggccaagtccccagtgaaggcagaagcaaagtcccctgagaaggccaagtccccagtgaaggaagaagcaaagtcccctgagaaggccaagtccccagtgaaggaagaagcaaagtcccctgagaaggccaagtccccagtgaaggaagaagcaaagacccccgagaaggccaagtccccagtgaaggaagaagctaagtccccagagaaggccaagtccccagagaaggccaagactcttgatgtgaagtctccagaagccaagactccagcgaaggaggaagcaaggtcccctgcagacaaattccctgaaaaggccaaaagccctgtcaaggaggaggtcaagtccccagagaaggcgaaatctcccctgaaggaggatgccaaggcccctgagaaggagatcccaaaaaaggaagaggtgaagtccccagtgaaggaggaggagaagccccaggaggtgaaagtcaaagagcccccaaagaaggcagaggaagagaaagcccctgccacaccaaaaacagaggagaagaaggacagcaagaaagaggaggcacccaagaaggaggctccaaagcccaaggtggaggagaagaaggaacctgctgtcgaaaagcccaaagaatccaaagttgaagccaagaaggaagaggctgaagataagaaaaaagtccccaccccagagaaggaggctcctgccaaggtggaggtgaaggaagacgctaaacccaaagaaaagacagaggtagccaagaaggaaccagatgatgccaaggccaaggaacccagcaaaccagcagagaagaaggaggcagcaccggagaaaaaagacaccaaggaggagaaggccaagaagcctgaggagaaacccaagacagaggccaaagccaaggaagatgacaagaccctctcaaaagagcctagcaagcctaaggcagaaaaggctgaaaaatcctccagcacagaccaaaaagacagcaagcctccagagaaggccacagaagacaaggccgccaaggggaagtaaggcagggagaaaggaacatccggaacagccaaagaaactcagaagagtcccggagctcaaggatcagagtaacacaattttcactttttctgtctttatgtaagaagaaactgcttagatgacggggcctccttcttcaaacaggaatttctgttagcaatatgttagcaagagagggcactcccaggcccctgcccccaggccctccccaggcgatggacaattatgatagcttatgtagctgaatgtgatacatgccgaatgccacacgtaaacacttgactataaaaactgcccccctcctttccaaataagtgcatttattgcctctatgtgcaactgacagatgaccgcaataatgaatgagcagttagaaatacattatgcttgagatgtcttaacctattcccaaatgccttctgttttccaaaggagtggtcaagcccttgcccagagctctctattctggaagagcggtccaggtggggccggggactggccactgaattatgccagggcgcactttccactggagttcactttcaattgcttctgtgcaataaaaccaagtgcttataaaatgaaaatgttgctgctgttattctctttccctgggaaggctgggggcagggcaggggaggtctggatgtgacaccccagactgcatgggactgagcaagcatcagt

SEQ ID NO: 158856 - DNA, 4082 bp, Homo sapiens
  Payload ID: 11075
  Gene Symbol: NEFL
  Gene Name: neurofilament, light polypeptide
  Uniprot ID: P07196
  ENST ID: ENST00000610854
  CDS Start-End: 596-2227
tacacataacctagcctatttatttgtatctaaaattccctagccgcaccatcaccgtaaacaccaagggaaaaaattaaggaggttcctggtgggaaaagggcgagttggggggacagggtgtctgcgaggtgacgggatacagaaaactagggtgtcaaaagggagcaagaacctgttttgggggcaacttaaggatccaagtgtcacggggtctgggcaatgcaggacgggaggggctgcgtgagtgagtacagaagggaaatgagtgagggggcatgggatctcagagaaaatcagggccctctgagcaaagtggaaaggacgaccgccgcagctcctcgggccgtagctcgaccccgccttcccttttgcgcagaatcctcgccttggctgcagcagcgcgctgcccccactggccggcgtgccgtgatcgatcgcaggctgcgtcaggagcctcccggcgtataaataggggtggcagaacggcgccgagccgcacacagccatccatcctcccccttccctctctcccctgtcctctctctccgggctcccaccgccgccgcgggccggggagccaccggccgccaccatgagttccttcagctacgagccgtactactcgacctcctacaagcggcgctacgtggagacgccccgggtgcacatctccagcgtgcgcagcggctacagcaccgcacgctcagcttactccagctactcggcgccggtgtcttcctcgctgtccgtgcgccgcagctactcctccagctctggatcgttgatgcccagtctggagaacctcgacctgagccaggtagccgccatcagcaacgacctcaagtccatccgcacgcaggagaaggcgcagctccaggacctcaatgaccgcttcgccagcttcatcgagcgcgtgcacgagctggagcagcagaacaaggtcctggaagccgagctgctggtgctgcgccagaagcactccgagccatcccgcttccgggcgctgtacgagcaggagatccgcgacctgcgcctggcggcggaagatgccaccaacgagaagcaggcgctccagggcgagcgcgaagggctggaggagaccctgcgcaacctgcaggcgcgctatgaagaggaggtgctgagccgcgaggacgccgagggccggctgatggaagcgcgcaaaggcgccgacgaggcggcgctcgctcgcgccgagctcgagaagcgcatcgacagcttgatggacgaaatctcttttctgaagaaagtgcacgaagaggagatcgccgaactgcaggcgcagatccagtacgcgcagatctccgtggagatggacgtgaccaagcccgacctttccgccgcgctcaaggacatccgcgcgcagtacgagaagctggccgccaagaacatgcagaacgctgaggaatggttcaagagccgcttcaccgtgctgaccgagagcgccgccaagaacaccgacgccgtgcgcgccgccaaggacgaggtgtccgagagccgtcgtctgctcaaggccaagaccctggaaatcgaagcatgccggggcatgaatgaagcgctggagaagcagctgcaggagctggaggacaagcagaacgccgacatcagcgctatgcaggacacgatcaacaaattagaaaatgaattgaggaccacaaagagtgaaatggcacgatacctaaaagaataccaagacctcctcaacgtgaagatggctttggatattgagattgcagcttacaggaaactcttggaaggcgaggagacccgactcagtttcaccagcgtgggaagcataaccagtggctactcccagagctcccaggtctttggccgatctgcctacggcggtttacagaccagctcctatctgatgtccacccgctccttcccgtcctactacaccagccatgtccaagaggagcagatcgaagtggaggaaaccattgaggctgccaaggctgaggaagccaaggatgagcccccctctgaaggagaagccgaggaggaggagaaggacaaggaagaggccgaggaagaggaggcagctgaagaggaagaagctgccaaggaagagtctgaagaagcaaaagaagaagaagaaggaggtgaaggtgaagaaggagaggaaaccaaagaagctgaagaggaggagaagaaagttgaaggtgctggggaggaacaagcagctaagaagaaagattgaacccccatttccttaattatttcaggaataattctcccgaaatcaggtcaaccccatcaccaaccaaccaaccagttgagttccagattctatgtgaattaaaaagtcaatatatgtataattctgagatgacttaggttggacattcaatgttgtgctatgaatttcctctttatgcagagtatctgtttgcttgcagagtggctttctggcttgctgccagcctgtgcatggaccacgcttatgagttcaggatctacggcaatgtgaatcattcagatgtttacaataaaaaacaccacatgagtaaatgaattcactaatgttaatgttaaacttcatggaaaaatagtcctttgaaccttcggtggttagcaattaaagaccctgagttatgtgcaataaatagtaaataaagttataccgaatgatgtattttttgctgtggttgttacttaattaaaataccttaaagatggcaccaatataaagtatataccagtggactattgacctccaattttttaaaaagttgaaattttaacaattaccaatacttttttttcttccttcaattggaaattctgagggatacagttatgtcatgattacttgtgaaatctctccccacaaaaattttactgataataaacatgagtaaatgagaaagtctataaataacaatagactttgcctcataacacgtgttgtgttaggttttgggatggctttctagggagcaattctgaaattacttgacagatacactctttatggtaaacaggtcatttcagagtctagagtgctaaccattacactatggaaccatgataaataggtcatttcaaactgatatgtcacaatgcaatatggatagaatatgaatcccatacattcatccctataactgcattttaaaatatagtctaaatatcatgggaggaggttaaaacctgagaacatggtacaataagaaggaataattttttatctatatataatttcaggagaagggattaaaactaccaaaggttatttgccactccactgcaaacatgttgcctgcaatcctgagctcatgatttagtgtgttgttaagcgtaattctgttgcctcaagtaaataccacttaatgctacacatttttaaacctttaaaagctacagacacaagtaatgaaattatgagtcacttaaggggggaggtaatatgcttgtatgttacattgacattgctctgcatgtctctactgggagatatttggatttcaatgatagcttgactggttggacattgcatcaaatacacgccccatgtatcctttctgtcgtaaagttaagaacgctcttgcatttgatgtggaataaatatagatgatattactatctgctattctgcctttgttctgaaacaattgctttgtcagctaatttcattcaatatttgttttttagacgatctctataagttattaatttaacctgaaaccaaagtggtctccatttaaagttacttaatccctttgtaccacctatttctagttaaatatatgttgctatgcaaataggtaaagtgcttccttgccatgatggtaatggattggaactatgaaggctctcagtgtattggcttctgtaaagatgaggcgtctcctcagaaacaaaacttttcacatttctgcttactagacctgggttgatgtacatggtaagtctcaaacagatgcaagctatgtgcaaaaagtaactttagccaaatggaaatagctggatgctttgagaattacttggttgaagtaagaaaactgtaccatcctctatcctgtgtgccataataaaatagtaaaaaacctaaa

SEQ ID NO: 158857 - DNA, 1879 bp, Homo sapiens
  Payload ID: 11075
  Gene Symbol: NEFL
  Gene Name: neurofilament, light polypeptide
  ENST ID: ENST00000619417
  CDS Start-End: 98-952
gcacacagccatccatcctcccccttccctctctcccctgtcctctctctccgggctcccaccgccgccgcgggccggggagccaccggccgccaccatgagttccttcagctacgagccgtactactcgacctcctacaagcggcgctacgtggagacgccccgggtgcacatctccagcgtgcgcagcggctacagcaccgcacgctcagcttactccagctactcggcgccggtgtcttcctcgctgtccgtgcgccgcagctactcctccagctctggatcgttgatgcccagtctggagaacctcgacctgagccaggtagccgccatcagcaacgacctcaagtccatccgcacgcaggagaaggcgcagctccaggacctcaatgaccgcttcgccagcttcatcgagcgcgtgcacgagctggagcagcagaacaaggtcctggaagccgagctgctggtgctgcgccagaagcactccgagccatcccgcttccgggcgctgtacgagcaggagatccgcgacctgcgcctggcggcggaagatgccaccaacgagaagcaggcgctccagggcgagcgcgaagggctggaggagaccctgcgcaacctgcaggcgcgctatgaagaggaggtgctgagccgcgaggacgccgagggccggctgatggaagcgcgcaaagccgccaagaacaccgacgccgtgcgcgccgccaaggacgaggtgtccgagagccgtcgtctgctcaaggccaagaccctggaaatcgaagcatgccggggcatgaatgaagcgctggagaagcagctgcaggagctggaggacaagcagaacgccgacatcagcgctatgcaggacacgatcaacaaattagaaaatgaattgaggaccacaaagagtgaaatggcacgatacctaaaagaataccaagacctcctcacgtgaagatggctttggatattgagattgcagcttacaggaaactcttggaaggcgaggagacccgactcagtttcaccagcgtgggaagcataaccagtggctactcccagagctcccaggtctttggccgatctgcctacggcggtttacagaccagctcctatctgatgtccacccgctccttcccgtcctactacaccagccatgtccaagaggagcagatcgaagtggaggaaaccattgaggctgccaaggctgaggaagccaaggatgagcccccctctgaaggagaagccgaggaggaggagaaggacaaggaagaggccgaggaagaggaggcagctgaagaggaagaagctgccaaggaagagtctgaagaagcaaaagaagaagaagaaggaggtgaaggtgaagaaggagaggaaaccaaagaagctgaagaggaggagaagaaagttgaaggtgctggggaggaacaagcagctaagaagaaagattgaacccccatttccttaattatttcaggaataattctcccgaaatcaggtcaaccccatcaccaaccaaccaaccagttgagttccagattctatgtgaattaaaaagtcaatatatgtataattctgagatgacttaggttggacattcaatgttgtgctatgaatttcctctttatgcagagtatctgtttgcttgcagagtggctttctggcttgctgccagcctgtgcatggaccacgcttatgagttcaggatctacggcaatgtgaatcattcagatgtttacaataaaaaacaccacatgagtaaatgaattcactaatgttaatgttaaacttcatggaaaaatagtcctttgaaccttcggtggttagcaattaaagaccctgagttatgtgcaataaatagtaaataaagttataccgaatg

SEQ ID NO: 158858 - DNA, 4020 bp, Homo sapiens
  Payload ID: 11076
  Gene Symbol: NEFM
  Gene Name: neurofilament, medium polypeptide
  Uniprot ID: P07197
  ENST ID: ENST00000221166
  CDS Start-End: 783-3533
tttttttttgttttgttttgtcttctagacccagctcctcggcgctcatctccagctgctttaagacaaggggtgggggaaggggagggaggcaagaaaagatgagggtgggggaggggaaaagagggaatgcaaggggaaggagggaggagacggggagaaggaaagattggaagaaaaggatctccgaggaaggggctgagagaagggcagggtgaactggactaaaggccagagtaggaaggagaagaggggccaaaaaagaaggggatgaaattaagcacagaagatgggtaaagaaaaaagtatcagggaaagggcaaaataagagaaagccttgaggataagagggtagaaggctaaagaacaaggggaccacggggtcggggaagcgctgcctgaacggcgggacagtgacaaagaaagggcgctggcgatattcgcaccaagggtgcgaaacgcaatcgggaggtgagaaatggaaagaaggcgaatgcccggctacaagtagcctgggactgaaaggggacctgggggaggggctgggcccagggcagaaaagtccaggttcccatgcggcctgggcccacgtggagcgggcgctgaatcaccgttcagccgcccccctcccctcctccccgaccggtgcccgcagtccccgcctcctcggccgccgcctccacggggcggggccctggcccgggaccagcgccgcggctataaatgggctgcggcgaggccggcagaacgctgtgacagccacacgccccaaggcctccaagatgagctacacgttggactcgctgggcaacccgtccgcctaccggcgggtaaccgagacccgctcgagcttcagccgcgtcagcggctccccgtccagtggcttccgctcgcagtcgtggtcccgcggctcgcccagcaccgtgtcctcctcctataagcgcagcatgctcgccccgcgcctcgcttacagctcggccatgctcagctccgccgagagcagccttgacttcagccagtcctcgtccctgctcaacggcggctccggacccggcggcgactacaagctgtcccgctccaacgagaaggagcagctgcaggggctgaacgaccgctttgccggctacatagagaaggtgcactacctggagcagcagaataaggagattgaggcggagatccaggcgctgcggcagaagcaggcctcgcacgcccagctgggcgacgcgtacgaccaggagatccgcgagctgcgcgccaccctggagatggtgaaccacgagaaggctcaggtgcagctggactcggaccacctggaggaagacatccaccggctcaaggagcgctttgaggaggaggcgcggttgcgcgacgacactgaggcggccatccgcgcgctgcgcaaagacatcgaggaggcgtcgctggtcaaggtggagctggacaagaaggtgcagtcgctgcaggatgaggtggccttcctgcggagcaaccacgaggaggaggtggccgaccttctggcccagatccaggcatcgcacatcacggtggagcgcaaagactacctgaagacagacatctcgacggcgctgaaggaaatccgctcccagctcgaaagccactcagaccagaatatgcaccaggccgaagagtggttcaaatgccgctacgccaagctcaccgaggcggccgagcagaacaaggaggccatccgctccgccaaggaagagatcgccgagtaccggcgccagctgcagtccaagagcatcgagctagagtcggtgcgcggcaccaaggagtccctggagcggcagctcagcgacatcgaggagcgccacaaccacgacctcagcagctaccaggacaccatccagcagctggaaaatgagcttcggggcacaaagtgggaaatggctcgtcatttgcgcgaataccaggacctcctcaacgtcaagatggctctggatatagaaatcgctgcgtacagaaaactcctggagggtgaagagactagatttagcacatttgcaggaagcatcactgggccactgtatacacaccgacccccaatcacaatatccagtaagattcagaaacccaaggtggaagctcccaagcttaaggtccaacacaaatttgtcgaggagatcatagaggaaaccaaagtggaggatgagaagtcagaaatggaagaggccctgacagccattacagaggaattggccgtttccatgaaggaagagaagaaagaagcagcagaagaaaaggaagaggaacccgaagctgaagaagaagaagtagctgccaaaaagtctccagtgaaagcaactgcacctgaagttaaagaagaggaaggggaaaaggaggaagaagaaggccaggaagaagaggaggaagaagatgagggagctaagtcagaccaagccgaagagggaggatccgagaaggaaggctctagtgaaaaagaggaaggtgagcaggaagaaggagaaacagaagctgaagctgaaggagaggaagccgaagctaaagaggaaaagaaagtggaggaaaagagtgaggaagtggctaccaaggaggagctggtggcagatgccaaggtggaaaagccagaaaaagccaagtctcctgtgccaaaatcaccagtggaagagaaaggcaagtctcctgtgcccaagtcaccagtggaagagaaaggcaagtctcctgtgcccaagtcaccagtggaagagaaaggcaagtctcctgtgccgaaatcaccagtggaagagaaaggcaagtctcctgtgtcaaaatcaccagtggaagagaaagccaaatctcctgtgccaaaatcaccagtggaagaggcaaagtcaaaagcagaagtggggaaaggtgaacagaaagaggaagaagaaaaggaagtcaaggaagctcccaaggaagagaaggtagagaaaaaggaagagaaaccaaaggatgtgccagagaagaagaaagctgagtcccctgtaaaggaggaagctgtggcagaggtggtcaccatcaccaaatcggtaaaggtgcacttggagaaagagaccaaagaagaggggaagccactgcagcaggagaaagagaaggagaaagcgggaggagagggaggaagtgaggaggaagggagtgataaaggtgccaagggatccaggaaggaagacatagctgtcaatggggaggtagaaggaaaagaggaggtagagcaggagaccaaggaaaaaggcagtgggagggaagaggagaaaggcgttgtcaccaatggcctagacttgagcccagcagatgaaaagaaggggggtgataaaagtgaggagaaagtggtggtgaccaaaacggtagaaaaaatcaccagtgaggggggagatggtgctaccaaatacatcactaaatctgtaaccgtcactcaaaaggttgaagagcatgaagagacctttgaggagaaactagtgtctactaaaaaggtagaaaaagtcacttcacacgccatagtaaaggaagtcacccagagtgactaagatttgagtccattgcaaaaggttaagccatatgacaatttcaaaatgcatgtgattggcagcttcaaaacagaacgggttctcccatgggggctccagacattgtattttactttgtgcaatatgaggggactgcatgcaagctcagggtgctccctcctcagtctttgggggattcaaatgcatgatattgtatgtacctgggaaatttgccgatttcctaagctgttggaagggggtcacttaaggggggatgtcttgagatgtattatgcaaagtaccaactgagccaaaaacaataaacgaaacacagaactcagccttaagaaagctatatatgaataattatgtttacctcactggtgcatttaaaatggacttttgttcatgggagaacctcgttgacatgcacagtttgcaatcttatgttgatcgatgttaaacgtcacagcagtacttgctcaataaaggtcatattggaaacata

SEQ ID NO: 158859 - DNA, 3148 bp, Homo sapiens
  Payload ID: 11076
  Gene Symbol: NEFM
  Gene Name: neurofilament, medium polypeptide
  ENST ID: ENST00000437366
  CDS Start-End: 31-2664
gtgacagccacacgccccaaggcctccaagatgagctacacgttggactcgctgggcaacccgtccgcctaccggcgggtaaccgagacccgctcgagcttcagccgcgtcagcggctccccgtccagtggcttccgctcgcagtcgtggtcccgcggctcgcccagcaccgtgtcctcctcctataagcgcagcatgctcgccccgcgcctcgcttacagctcggccatgctcagctccgccgagagcagccttgacttcagccagtcctcgtccctgctcaacggcggctccggacccggcggcgactacaagctgtcccgctccaacgagaaggagcagctgcaggggctgaacgaccgctttgccggctacatagagaaggtgcactacctggagcagcagaataaggagattgaggcggagatccaggcgctgcggcagaagcaggcctcgcacgcccagctgggcgacgcgtacgaccaggagatccgcgagctgcgcgccaccctggagatggtgaaccacgagaaggctcaggtgcagctggactcggaccacctggaggaagacatccaccggctcaaggagcgctttgaggaggaggcgcggttgcgcgacgacactgaggcggccatccgcgcgctgcgcaaagacatcgaggaggcgtcgctggtcaaggtggagctggacaagaaggtgcagtcgctgcaggatgaggtggccttcctgcggagcaaccacgaggaggaggtggccgaccttctggcccagatccaggcatcgcacatcacggtggagcgcaaagactacctgaagacagacatctcgacggcgctgaaggaaatccgctcccagctcgaaagccactcagaccagaatatgcaccaggccgaagagtggttcaaatgccgctacgccaagctcaccgaggcggccgagcagaacaaggaggccatccgctccgccaaggaagagatcgccgagtaccggcgccagctgcagtccaagagcatcgagctagagtcggtgcgcggcaccaaggagtccctggagcggcagctcagcgacatcgaggagcgccacaaccacgacctcagcagctaccaggacaccatccagcagctggaaaatgagcttcggggcacaaagtgggaaatggctcgtcatttgcgcgaataccaggacctcctcaacgtcaagatggctctggatatagaaatcgctgcgtacagaaaactcctggagggtgaagagactagatttagcacatttgcaggaagcatcactgggccactgtatacacaccgacccccaatcacaatatccagtaagattcagaaacccaaggtggaagctcccaagcttaaggtccaacacaaatttgtcgaggagatcatagaggaaaccaaagtggaggatgagaagtcagaaatggaagaggccctgacagccattacagaggaattggccgtttccatgaaggaagagaagaaagaagcagcagaagaaaaggaagaggaacccgaagctgaagaagaagaagtagctgccaaaaagtctccagtgaaagcaactgcacctgaagttaaagaagaggaaggggaaaaggaggaagaagaaggccaggaagaagaggaggaagaagatgagggagctaagtcagaccaagccgaagagggaggatccgagaaggaaggctctagtgaaaaagaggaaggtgagcaggaagaaggagaaacagaagctgaagctgaaggagaggaagccgaagctaaagaggaaaagaaagtggaggaaaagagtgaggaagtggctaccaaggaggagctggtggcagatgccaaggtggaaaagccagaaaaagccaagtctcctgtgccaaaatcaccagtggaagagaaaggcaagtctcctgtgtcaaaatcaccagtggaagagaaagccaaatctcctgtgccaaaatcaccagtggaagaggcaaagtcaaaagcagaagtggggaaaggtgaacagaaagaggaagaagaaaaggaagtcaaggaagctcccaaggaagagaaggtagagaaaaaggaagagaaaccaaaggatgtgccagagaagaagaaagctgagtcccctgtaaaggaggaagctgtggcagaggtggtcaccatcaccaaatcggtaaaggtgcacttggagaaagagaccaaagaagaggggaagccactgcagcaggagaaagagaaggagaaagcgggaggagagggaggaagtgaggaggaagggagtgataaaggtgccaagggatccaggaaggaagacatagctgtcaatggggaggtagaaggaaaagaggaggtagagcaggagaccaaggaaaaaggcagtgggagggaagaggagaaaggcgttgtcaccaatggcctagacttgagcccagcagatgaaaagaaggggggtgataaaagtgaggagaaagtggtggtgaccaaaacggtagaaaaaatcaccagtgaggggggagatggtgctaccaaatacatcactaaatctgtaaccgtcactcaaaaggttgaagagcatgaagagacctttgaggagaaactagtgtctactaaaaaggtagaaaaagtcacttcacacgccatagtaaaggaagtcacccagagtgactaagatttgagtccattgcaaaaggttaagccatatgacaatttcaaaatgcatgtgattggcagcttcaaaacagaacgggttctcccatgggggctccagacattgtattttactttgtgcaatatgaggggactgcatgcaagctcagggtgctccctcctcagtctttgggggattcaaatgcatgatattgtatgtacctgggaaatttgccgatttcctaagctgttggaagggggtcacttaaggggggatgtcttgagatgtattatgcaaagtaccaactgagccaaaaacaataaacgaaacacagaactcagccttaagaaagctatatatgaataattatgtttacctcactggtgcatttaaaatggacttttgttcatgggagaacctcgttgacatgcacagtttgcaatcttatgttgatcgatgttaaacgtcacagcagtacttgctcaataaaggtcatattggaaac

SEQ ID NO: 158860 - DNA, 2519 bp, Homo sapiens
  Payload ID: 11076
  Gene Symbol: NEFM
  Gene Name: neurofilament, medium polypeptide
  Uniprot ID: P07197
  ENST ID: ENST00000433454
  CDS Start-End: 405-2027
gtgcccaggcgccctctccgccgcgctccctggtggccgctcgctagagcacgcgcgccgcagacctagggtatttgcggatcagcgtcctcgcccatctcatcctccacactccgcccccacccacctgccccagctgctaagggtcttgacctttttcagaaacgtgcatcttttccagttctaattttgcacgcttgcacgtttaaagcaggagggatgaattcggtagtggataaatcagcaactttaggatagcttatgcagaaacgcgtgtattctctacttttccggcagtgatcggaagagctctcaaaattggcttcagcccaaagggctcagatgggaatggccaggacaccatccagcagctggaaaatgagcttcggggcacaaagtgggaaatggctcgtcatttgcgcgaataccaggacctcctcaacgtcaagatggctctggatatagaaatcgctgcgtacagaaaactcctggagggtgaagagactagatttagcacatttgcaggaagcatcactgggccactgtatacacaccgacccccaatcacaatatccagtaagattcagaaacccaaggtggaagctcccaagcttaaggtccaacacaaatttgtcgaggagatcatagaggaaaccaaagtggaggatgagaagtcagaaatggaagaggccctgacagccattacagaggaattggccgtttccatgaaggaagagaagaaagaagcagcagaagaaaaggaagaggaacccgaagctgaagaagaagaagtagctgccaaaaagtctccagtgaaagcaactgcacctgaagttaaagaagaggaaggggaaaaggaggaagaagaaggccaggaagaagaggaggaagaagatgagggagctaagtcagaccaagccgaagagggaggatccgagaaggaaggctctagtgaaaaagaggaaggtgagcaggaagaaggagaaacagaagctgaagctgaaggagaggaagccgaagctaaagaggaaaagaaagtggaggaaaagagtgaggaagtggctaccaaggaggagctggtggcagatgccaaggtggaaaagccagaaaaagccaagtctcctgtgccaaaatcaccagtggaagagaaaggcaagtctcctgtgcccaagtcaccagtggaagagaaaggcaagtctcctgtgcccaagtcaccagtggaagagaaaggcaagtctcctgtgccgaaatcaccagtggaagagaaaggcaagtctcctgtgtcaaaatcaccagtggaagagaaagccaaatctcctgtgccaaaatcaccagtggaagaggcaaagtcaaaagcagaagtggggaaaggtgaacagaaagaggaagaagaaaaggaagtcaaggaagctcccaaggaagagaaggtagagaaaaaggaagagaaaccaaaggatgtgccagagaagaagaaagctgagtcccctgtaaaggaggaagctgtggcagaggtggtcaccatcaccaaatcggtaaaggtgcacttggagaaagagaccaaagaagaggggaagccactgcagcaggagaaagagaaggagaaagcgggaggagagggaggaagtgaggaggaagggagtgataaaggtgccaagggatccaggaaggaagacatagctgtcaatggggaggtagaaggaaaagaggaggtagagcaggagaccaaggaaaaaggcagtgggagggaagaggagaaaggcgttgtcaccaatggcctagacttgagcccagcagatgaaaagaaggggggtgataaaagtgaggagaaagtggtggtgaccaaaacggtagaaaaaatcaccagtgaggggggagatggtgctaccaaatacatcactaaatctgtaaccgtcactcaaaaggttgaagagcatgaagagacctttgaggagaaactagtgtctactaaaaaggtagaaaaagtcacttcacacgccatagtaaaggaagtcacccagagtgactaagatttgagtccattgcaaaaggttaagccatatgacaatttcaaaatgcatgtgattggcagcttcaaaacagaacgggttctcccatgggggctccagacattgtattttactttgtgcaatatgaggggactgcatgcaagctcagggtgctccctcctcagtctttgggggattcaaatgcatgatattgtatgtacctgggaaatttgccgatttcctaagctgttggaagggggtcacttaaggggggatgtcttgagatgtattatgcaaagtaccaactgagccaaaaacaataaacgaaacacagaactcagccttaagaaagctatatatgaataattatgtttacctcactggtgcatttaaaatggacttttgttcatgggagaacctcgttgacatgcacagtttgcaatcttatgttgatcgatgttaaacgtcacagcagtacttgctcaataaaggtcatattggaaacatagtcaa

SEQ ID NO: 158861 - DNA, 2500 bp, Homo sapiens
  Payload ID: 11076
  Gene Symbol: NEFM
  Gene Name: neurofilament, medium polypeptide
  ENST ID: ENST00000518131
  CDS Start-End: 34-2130
gctgtgacagccacacgccccaaggcctccaagatgagctacacgttggactcgctgggcaacccgtccgcctaccggcgggtaaccgagacccgctcgagcttcagccgcgtcagcggctccccgtccagtggcttccgctcgcagtcgtggtcccgcggctcgcccagcaccgtgtcctcctcctataagcgcagcatgctcgccccgcgcctcgcttacagctcggccatgctcagctccgccgagagcagccttgacttcagccagtcctcgtccctgctcaacggcggctccggacccggcggcgactacaagctgtcccgctccaacgagaaggagcagctgcaggggctgaacgaccgctttgccggctacatagagaaggtgcactacctggagcagcagaataaggagattgaggcggagatccaggcgctgcggcagaagcaggcctcgcacgcccagctgggcgacgcgtacgaccaggagatccgcgagctgcgcgccaccctggagatggtgaaccacgagaaggctcaggtgcagctggactcggaccacctggaggaagacatccaccggctcaaggagcgctttgaggaggaggcgcggttgcgcgacgacactgaggcggccatccgcgcgctgcgcaaagacatcgaggaggcgtcgctggtcaaggtggagctggacaagaaggtgcagtcgctgcaggatgaggtggccttcctgcggagcaaccacgaggaggaggtggccgaccttctggcccagatccaggcatcgcacatcacggtggagcgcaaagactacctgaagacagacatctcgacggcgctgaaggaaatccgctcccagctcgaaagccactcagaccagaatatgcaccaggccgaagagtggttcaaatgccgctacgccaagctcaccgaggcggccgagcagaacaaggaggccatccgctccgccaaggaagagatcgccgagtaccggcgccagctgcagtccaagagcatcgagctagagtcggtgcgcggcaccaaggagtccctggagcggcagctcagcgacatcgaggagcgccacaaccacgacctcagcagctaccaggacaccatccagcagctggaaaatgagcttcggggcacaaagtgggaaatggctcgtcatttgcgcgaataccaggacctcctcaacgtcaagatggctctggatatagaaatcgctgcgtacagaaaactcctggagggtgaagagactagatttagcacatttgcaggaagcatcactgggccactgtatacacaccgacccccaatcacaatatccagtaagattcagaaacccaaggtggaagctcccaagcttaaggtccaacacaaatttgtcgaggagatcatagaggaaaccaaagtggaggatgagaagtcagaaatggaagaggccctgacagccattacagaggaattggccgtttccatgaaggaagagaagaaagaagcagcagaagaaaaggaagaggaacccgaagctgaagaagaagaagtagctgccaaaaagtctccagtgaaagcaactgcacctgaagttaaagaagaggaaggggaaaaggaggaagaagaaggccaggaagaagaggaggaagaagatgagggagctaagtcagaccaagccgaagagggaggatccgagaaggaaggctctagtgaaaaagaggaaggtgagcaggaagaaggagaaacagaagctgaagctgaaggagaggaagccgaagctaaagaggaaaagaaagtagaaggaaaagaggaggtagagcaggagaccaaggaaaaaggcagtgggagggaagaggagaaaggcgttgtcaccaatggcctagacttgagcccagcagatgaaaagaaggggggtgataaaagtgaggagaaagtggtggtgaccaaaacggtagaaaaaatcaccagtgaggggggagatggtgctaccaaatacatcactaaatctgtaaccgtcactcaaaaggttgaagagcatgaagagacctttgaggagaaactagtgtctactaaaaaggtagaaaaagtcacttcacacgccatagtaaaggaagtcacccagagtgactaagatttgagtccattgcaaaaggttaagccatatgacaatttcaaaatgcatgtgattggcagcttcaaaacagaacgggttctcccatgggggctccagacattgtattttactttgtgcaatatgaggggactgcatgcaagctcagggtgctccctcctcagtctttgggggattcaaatgcatgatattgtatgtacctgggaaatttgccgatttcctaagctgttggaagggggtcacttaaggggggatgtcttgagatgtattatgcaaagtaccaactgagccaaaaacaataaacgaaacacagaactcagccttaagaaagctatatatgaataattatgtttacctcactggtgcattt

SEQ ID NO: 158862 - DNA, 1668 bp, Homo sapiens
  Payload ID: 11077
  Gene Symbol: NEUROG1
  Gene Name: neurogenin 1
  Uniprot ID: Q92886
  ENST ID: ENST00000314744
  CDS Start-End: 260-973
cacacgagctgatctgatcgccggcgacatcactcaggagaccggccgggcgcgtggcccctgcaggcgaggcgaggaggccaggccaagttctccgtgcgcccctgcacccttccaggctctcgcacccgcaactggcacagagtaacaaccccaggctgttgggaacgtaagtgcgccctggcggctctgccctcagtccgggctgcagcgctctgagcgcctttctatctgtccgtcggtcctgcacagcgcaacgatgccagcccgccttgagacctgcatctccgacctcgactgcgccagcagcagcggcagtgacctatccggcttcctcaccgacgaggaagactgtgccagactccaacaggcagcctccgcttcggggccgcccgcgccggcccgcaggggcgcgcccaatatctcccgggcgtctgaggttccaggggcacaggacgacgagcaggagaggcggcggcgccgcggccggacgcgggtccgctccgaggcgctgctgcactcgctgcgcaggagccggcgcgtcaaggccaacgatcgcgagcgcaaccgcatgcacaacttgaacgcggccctggacgcactgcgcagcgtgctgccctcgttccccgacgacaccaagctcaccaaaatcgagacgctgcgcttcgcctacaactacatctgggctctggccgagacactgcgcctggcggatcaagggctgcccggaggcggtgcccgggagcgcctcctgccgccgcagtgcgtcccctgcctgcccggtcccccaagccccgccagcgacgcggagtcctggggctcaggtgccgccgccgcctccccgctctctgaccccagtagcccagccgcctccgaagacttcacctaccgccccggcgaccctgttttctccttcccaagcctgcccaaagacttgctccacacaacgccctgtttcattccttaccactaggccctttgtagacactgttactttccccctcccctagtcagcaggcaatagatggggccccagctgccgcctcgggaccccctctccaggcggagggaggaagcgggagctttaaagcagtcggggatacctgagccgcttgttaggtcgccgcaccctcgcggcggatgtctcttggtctgtttctccggccctcagcccagcgcccctcctgcccgcccctagacggcctttccttttgcactttctgaactccacaaaacctcctttgtgactggctcagaactgaccccagccaccacttcagtgtgatttagaaaagggacagatcagcccctgaagacgaggtgaaaagtcaattttacaatttgtagaactctaatgaagaaaaacgagcatgaaaattcggtttgagccggctgacaatacaatgaaaaggcttaaaaagcagagacaaggagtgggcttcatgcattatggatcccgacccccaccactgcagactcgctctaggaagaactggagactcttgcttagctattcaggcacagggctggagagtactttaatttattcaagatgcttcattcatatgaaaatgtatttttgtacataaagagtttattctattatgagctatcaaagtttacatttttgtactgcagacgcttcatgtaaataaaaactaaaaataa

SEQ ID NO: 158863 - DNA, 2287 bp, Homo sapiens
  Payload ID: 11078
  Gene Symbol: NEUROG2
  Gene Name: neurogenin 2
  Uniprot ID: Q9H2A3
  ENST ID: ENST00000313341
  CDS Start-End: 328-1146
cgcagccactgaaccacaagcagcttcgcgttaactggagtgcctgggagtcgcgtgccaggagccgcacggccagggactgactgacagacagacacgcaccaccaccacaacacacgagacccgggcgggccgccgccgccgccgccggggctcttggcaaactcgccggtcgcagaggtcccccgcggagctgcgccacagtagcgccgggcttgcagctttcacgccgggcgaaggacccggcgctgcgctcgcagctgcgcggagattcccggcacaggccaaagtcacagcaacgctgaggcacagttagagccaactaagatgttcgtcaaatccgagaccttggagttgaaggaggaagaggacgtgttagtgctgctcggatcggcctcccccgccttggcggccctgaccccgctgtcatccagcgccgacgaagaagaggaggaggagccgggcgcgtcaggcggggcgcgtcggcagcgcggggctgaggccgggcagggggcgcggggcggcgtggctgcgggtgcggagggctgccggcccgcacggctgctgggtctggtacacgattgcaaacggcgcccttcccgggcgcgggccgtctcccgaggcgccaagacggccgagacggtgcagcgcatcaagaagacccgtagactgaaggccaacaaccgcgagcgaaaccgcatgcacaacctcaacgcggcactggacgcgctgcgcgaggtgctccccacgttccccgaggacgccaagctcaccaagatcgagaccctgcgcttcgcccacaactacatctgggcactcaccgagaccctgcgcctggcggatcactgcgggggcggcggcgggggcctgccgggggcgctcttctccgaggcagtgttgctgagcccgggaggagccagcgccgccctgagcagcagcggagacagcccctcgcccgcctccacgtggagttgcaccaacagccccgcgccgtcctcctccgtgtcctccaattccacctccccctacagctgcactttatcgcccgccagcccggccgggtcagacatggactattggcagcccccacctcccgacaagcaccgctatgcacctcacctccccatagccagggattgtatctagagctgccatttctgctacccacgccaggccttagtgggttccctttcctgtccccagtcgagccctcctcccttcccctgcccctcctttccacgccctggaaaccatctcacttcacagggcaggtgtagcctttctgattcctcggttgtttcttgcatttcttggctttgggtatccttcattcagacgggctctgatttactgaaggtgtgatggagcttattgtcaaagccaagggtggcgttttgggggcgcttcttgagacgaaaaagaccctgggaagagatgatggtggcatatctaaagagtttgcagagcggactgacgctcctcccctttctctttaacgccgaaggacttggtgcagttcgtgtgaatctcacagggggaatgcaactggttcctgtgatctcttcacctttgcttctacatagagatgttaatgtcgagtagaaagaaatgtatcttagcatctgaatgattttgctggtaataatattatccacagatttgcaatggctggcatctgctttattcccattgctgtctgcaggctgtgggaatttcacctgtcaaaccaaacttccctctctgatgtgcactttgttctgtttcccagattcgtcacaatgcctattgtcctgtccttctctttcctttttcttccccattttgccatctgtctcttatgatttataaggggaaaaaaacttgttttgttagaggggcaggttagaagtcattgtataatttgtaggctttgtaatgattgaatgcaagcgtggaaatttaggctgaactctctatcaaaaggaaaaatgtggaggaaaagggaaaaatcaggagggaggattgcctcatgtattatttatttcgaccttttaggggagaaggaactcccccattctttcaagagattaaaaataaatcaacagtctgaaaacctaagcagacacggagcattatccggatcagccacacacgtgttcccttctatttattataaagaaatttttcatgggaaaatatgtattttttgtatattctacagagtttattctagtatgtatttacatcttgaagaacaagaaagttgttcttgtgattaaactataaataaactatctaattttcataa

SEQ ID NO: 158864 - DNA, 1376 bp, Homo sapiens
  Payload ID: 11079
  Gene Symbol: NEUROG3
  Gene Name: neurogenin 3
  Uniprot ID: Q9Y4Z2
  ENST ID: ENST00000242462
  CDS Start-End: 31-675
gctctctattcttttgcgccggtagaaaggatgacgcctcaaccctcgggtgcgcccactgtccaagtgacccgtgagacggagcggtccttccccagagcctcggaagacgaagtgacctgccccacgtccgccccgcccagccccactcgcacacgggggaactgcgcagaggcggaagagggaggctgccgaggggccccgaggaagctccgggcacggcgcgggggacgcagccggcctaagagcgagttggcactgagcaagcagcgacggagtcggcgaaagaaggccaacgaccgcgagcgcaatcgaatgcacaacctcaactcggcactggacgccctgcgcggtgtcctgcccaccttcccagacgacgcgaagctcaccaagatcgagacgctgcgcttcgcccacaactacatctgggcgctgactcaaacgctgcgcatagcggaccacagcttgtacgcgctggagccgccggcgccgcactgcggggagctgggcagcccaggcggttcccccggggactgggggtccctctactccccagtctcccaggctggcagcctgagtcccgccgcgtcgctggaggagcgacccgggctgctgggggccaccttttccgcctgcttgagcccaggcagtctggctttctcagattttctgtgaaaggacctgtctgtcgctgggctgtgggtgctaagggtaagggagagggagggagccgggagccgtagagggtggccgacggcggcggccctcaaaagcacttgttccttctgcttctccctggctgacccctggccggcccaggcctccacgggggcggcaggctgggttcattccccggccctccgagccgcgccaacgcacgcaacccttgctgctgcccgcgcgaagtgggcattgcaaagtgcgctcattttaggcctcctctctgccaccaccccataatctcattcaaagaatactagaatggtagcactacccggccggagccgcccaccgtcttgggtcgccctaccctcactcaagtctgtctgcctctcagtctcttaccacccctcctccaatgtgattcaatccaatgtttggtctctcagcgcttactccccttgccttgctccaaagacgctgccgatctgctctactcccaatcaggtccgggatttcagggcgcctcactctgccttaaagccacgaaggcgaccctctgccttctcctcgtgcacttttcggagccattgccctcccggggcggaagaccaggctgtgaactgggaaagcgctagcccggccagggagcatctccccagcctccctgcgaactgcgcctgaaacgtgagctgcgctgcaggtgcctggagcac

SEQ ID NO: 158865 - DNA, 1884 bp, Homo sapiens
  Payload ID: 11080
  Gene Symbol: NGB
  Gene Name: neuroglobin
  Uniprot ID: Q9NPG2
  ENST ID: ENST00000298352
  CDS Start-End: 376-831
ttcccaggccaccatagcggctggcggagggagcgcgcgccttgctggcctggagggggcgggggccgtggcggctttaaagcgcccagcccaggcgtcgcggggtggggcggctctggcggctgcggggcgcagggcgcagcggccaagcggggtccccggaagcacagctggggtgtctccacctacgactggccgcgcgccttttctctcccgcgccagggaaggagcggctgcggcccccgccgggcggaggcacggggggcgtacgaggggcggaggggaccgcgtcgcggaggagatggcgcggcacgtgcggtgacggcacccgagccctgagggtcccagccccgcgctccgcgtccccgggacagcatggagcgcccggagcccgagctgatccggcagagctggcgggcagtgagccgcagcccgctggagcacggcaccgtcctgtttgccaggctgtttgccctggagcctgacctgctgcccctcttccagtacaactgccgccagttctccagcccagaggactgtctctcctcgcctgagttcctggaccacatcaggaaggtgatgctcgtgattgatgctgcagtgaccaatgtggaagacctgtcctcactggaggagtaccttgccagcctgggcaggaagcaccgggcagtgggtgtgaagctcagctccttctcgacagtgggtgagtctctgctctacatgctggagaagtgtctgggccctgccttcacaccagccacacgggctgcctggagccaactctacggggccgtagtgcaggccatgagtcgaggctgggatggcgagtaagaggcgaccccgcccggcagcccccatccatctgtgtctgtctgttggcctgtatctgttgtagcccaggctccccaagcttccctgcatcttggtccttgtccccttggccacactggagaggtgatggggcagggctgggtctcagtatcctagagtccagctgcagaaggagtggcttttcctccaggaaggggcttctgggtgtcccctcatccccagtagcctctttcttgcgtttctttttaccttttttggcactccctctgaccccgcgatgagtgttttggtggcagaggtgggatgagctggaaaggtatggaggtgggagaggatggggctcttctgtctgtcctgcttcttcaggtgagtgcaggccaaggcgggggtgagatggctgagcttccagcgccttctgtcctgcctgcccagtcccttcactgctttcctgccccaagatggcttgcttttcacaaataaagagaaagagcagctttagccttcttggtggaatcccaggcagtgggagcagaatcagaactgccagggaagggaagggggacctgggtctcaatgggtctcatttgagtctcgcgggctgtgcagatgccctgacagagtcggtttcctttggcggcattccctttccctcattcagcacttctgctgggaactccctgactattccgctgctgcaggaacccagctagctggccaggtggggaggggctggggaccggccaggaaggaggggtgacttcatcccagagagacccgagttcccccagcccttcatcaccaacccgctcctgcaggagtgagtcttacctcccctggccctcctttctggctcagcctgcagcgactgtgaggccacagctcctcagattcactgcccgctgtgtgccagtactcaggcagctggagagaagagaaggcagcagcagaggcccccgccctcaccccagccatctgcacttgtaccatttgctctgtgctgactgtggtcctataaattcatgagaaataaactggttctgtgtgcctctctga

SEQ ID NO: 158866 - DNA, 1306 bp, Homo sapiens
  Payload ID: 11081
  Gene Symbol: NRGN
  Gene Name: neurogranin (protein kinase C substrate, RC3)
  Uniprot ID: Q92686
  ENST ID: ENST00000284292
  CDS Start-End: 240-476
ctccacttctccccgcccaccctgccggaggctgctcctgattggcttcccggccgcggggctcaggttacattcgcgagcggagccgagcgcgggagaccggacccgagagcagagctgctgtttcggcgcgggtcggctggcggccgactgccccagagcccccacccggcaccacacagaccccacccccgccctgcgccagccttcgtccccgcagaggaccccccgacaccagcatggactgctgcaccgagaacgcctgctccaagccggacgacgacattctagacatcccgctggacgatcccggcgccaacgcggccgccgccaaaatccaggcgagttttcggggccacatggcgcggaagaagataaagagcggagagcgcggccggaagggcccgggccctggggggcctggcggagctggggtggcccggggaggcgcgggcggcggccccagcggagactaggccagaactgagcattttcaaagttcccgaggagagatggatgccgcgtccccttcgcagcgacgagacttccctgccgtgtttgtgaccccctcctgcccagcaacctgccagctacaggagccccctgcgtcccagagactccctcacccaggcaggctccgtcgcggagtcgctgagtccgtgcccttttagttagttctgcagtctagtatggtccccatttgcccttccactccaccccaccctaaaccatgcgctcccaatcttccttcttttgcttctcgcccacctcttcccgcacccagcatgcagctctgcctccgcagcctcagtgcgctttcctgcgcgcactgcggagggcgccctaagcgtcacccaagcacactcacttaaagaaaaaacgagttctttcgttctgtgcgcagctaaaaggggcgccctacatctccgtgccactcccgccccagcctagccccaagactttggatccggggcgagatgaagggaagagggttgttttggtttcggacgacccttgctctgaccggaagagaagtccctatcccacacctgcctgtcacgttccctcccctttccccagcgcactgttgagggcagcctctccagctctcttgtttatgcaaacgccgagcgcctgggaggctcggtaggaggagtcttccacggccccgccccgcccctgtcggtcccgccctcccccccgccgggctcctggggctgtggccgaaaggtttctgatctccgtgtgtgcatgtgactgtgctgggttggaatgtgaacaataaagaggaatgtccaagtgttca

SEQ ID NO: 158867 - DNA, 1106 bp, Homo sapiens
  Payload ID: 11081
  Gene Symbol: NRGN
  Gene Name: neurogranin (protein kinase C substrate, RC3)
  Uniprot ID: Q92686
  ENST ID: ENST00000412681
  CDS Start-End: 41-277
cgccagccttcgtccccgcagaggaccccccgacaccagcatggactgctgcaccgagaacgcctgctccaagccggacgacgacattctagacatcccgctggacgatcccggcgccaacgcggccgccgccaaaatccaggcgagttttcggggccacatggcgcggaagaagataaagagcggagagcgcggccggaagggcccgggccctggggggcctggcggagctggggtggcccggggaggcgcgggcggcggccccagcggagactaggccagaagaactgagcattttcaaagttcccgaggagagatggatgccgcgtccccttcgcagcgacgagacttccctgccgtgtttgtgaccccctcctgcccagcaacctgccagctacaggagccccctgcgtcccagagactccctcacccaggcaggctccgtcgcggagtcgctgagtccgtgcccttttagttagttctgcagtctagtatggtccccatttgcccttccactccaccccaccctaaaccatgcgctcccaatcttccttcttttgcttctcgcccacctcttcccgcacccagcatgcagctctgcctccgcagcctcagtgcgctttcctgcgcgcactgcggagggcgccctaagcgtcacccaagcacactcacttaaagaaaaaacgagttctttcgttctgtgcgcagctaaaaggggcgccctacatctccgtgccactcccgccccagcctagccccaagactttggatccggggcgagatgaagggaagagggttgttttggtttcggacgacccttgctctgaccggaagagaagtccctatcccacacctgcctgtcacgttccctcccctttccccagcgcactgttgagggcagcctctccagctctcttgtttatgcaaacgccgagcgcctgggaggctcggtaggaggagtcttccacggccccgccccgcccctgtcggtcccgccctcccccccgccgggctcctggggctgtggccgaaaggtttctgatctccgtgtgtgcatgtgactgtgctgggttggaatgtgaacaataaagaggaatgtccaagtg

SEQ ID NO: 158868 - DNA, 2204 bp, Homo sapiens
  Payload ID: 11082
  Gene Symbol: NGDN
  Gene Name: neuroguidin, EIF4E binding protein
  Uniprot ID: Q8NEJ9
  ENST ID: ENST00000397154
  CDS Start-End: 14-949
gggctttgcgaagatggcggcgctgggggtgctggagtccgacctgccaagtgccgtgacacttctgaaaaatctccaggagcaagtgatggctgtaactgcacaagtgaaatcactgacacaaaaagttcaagctggtgcctatcctacagaaaagggtctcagcttcttggaagtgaaagaccagctgctgctcatgtaccttatggatttgacccacctcattctggacaaagcctcaggaggatctcttcagggacatgatgcagttttgagactggtggagattcgcacggttttggaaaagcttcgtcccttggaccaaaagctgaagtatcaaattgacaagctgatcaagactgcagtgacaggcagccttagtgagaatgacccacttcgttttaagcctcatcccagcaatatgatgagcaagttgagctctgaggatgaggaggaagatgaagcagaagatgaccagtctgaggcttcagggaagaaatctgtgaagggagtgtctaagaaatatgttcctccacgcttggttccagtacattatgatgaaacagaagctgagcgggagaagaagcgtctagaacgagccaagagacgggcattgagcagctctgtcattcgtgaacttaaggagcagtactcagatgctccagaggaaatccgtgatgctcggcatccccatgttacccgccagagtcaggaggaccaacacaggattaactatgaggagagcatgatggtgcgtttgagcgtcagtaagcgagagaaaggacggcgaaaacgagcaaatgtcatgagctcacaacttcattcccttacacacttcagtgacatcagtgctttgacagggggaactgttcatcttgatgaggatcagaatcctattaagaagcggaagaagatacctcagaaaggtcggaagaaaaaaggtcagtgaactgctgggacttaggtgatcaggtgcaaggtggggagtacaaattgagtctctttggatttgccattctgggtctcaccaagccctgtagtatctcttccatactgggcaataatctccttaggtgggcttttattttttgctttcctgagctggaaatcagcatcattcacaaaatgaatctctggattctgcctctaaggtcccacagctcctgttcaggcttccctaaatagaactggtaaagtgtcacttgaaggaaccattatcccatttcaattttattcctacttctcgtcttttgtcctgggaagatattcagggtactgcctaggagaccccacccctgtgagcccttccctctagatgtcctgttttcctgtccctttagcttttccaactgtcctttgcctcattcttggtttcccttcctttcaggttttcggaggcggcggtgattatgggtgtacatatttgtatattttttgtcatcctgagatacttctaatttcattgtatataggtggttttccctggaattcattaattgtttgctttggacatgtggaaagagccttactaataaaattgattttgcttatgaattaaagcccctttttgcacatgtattgtacgactggagtcgttgggtttgggatatttttggtgagtggttggtgaaaagggaaattttttttggaagtgcaaaacatttgtattgttttctttgataatatatttttcccaaaaactaaaaattggttacgtcacaaaaagtattgagagacgaggctggtataatcaactctttcaacccatgttgccacaacttcctgtatgatttgttataatacaatacagattgagatattaacacatgaattttaggttttattagtgttatctgggctggccaccaggtggcataagtggttcaagaaacttgagcttggctgtaatcaaaagcaagatagaacctttccacatcagcaagattattcttatctccacttctctgaatgtttttcatttctttctgaaatagcatgaacataaggctgatctttggtcagttactgagggagtttgtagaaaatagtagagtgagtaagaaggctagagtgaagagtcagtatagtcttgtgtttttcagactctgacccccacccccccgccttcaactgagggtcattttaccagagtcaataaaggccaacccttctataaagagctggcaaaaaaaaaaaaaaaaaaa

SEQ ID NO: 158869 - DNA, 1143 bp, Homo sapiens
  Payload ID: 11082
  Gene Symbol: NGDN
  Gene Name: neuroguidin, EIF4E binding protein
  Uniprot ID: Q8NEJ9
  ENST ID: ENST00000408901
  CDS Start-End: 29-976
gacaccggaaggggtgggctttgcgaagatggcggcgctgggggtgctggagtccgacctgccaagtgccgtgacacttctgaaaaatctccaggagcaagtgatggctgtaactgcacaagtgaaatcactgacacaaaaagttcaagctggtgcctatcctacagaaaagggtctcagcttcttggaagtgaaagaccagctgctgctcatgtaccttatggatttgacccacctcattctggacaaagcctcaggaggatctcttcagggacatgatgcagttttgagactggtggagattcgcacggttttggaaaagcttcgtcccttggaccaaaagctgaagtatcaaattgacaagctgatcaagactgcagtgacaggcagccttagtgagaatgacccacttcgttttaagcctcatcccagcaatatgatgagcaagttgagctctgaggatgaggaggaagatgaagcagaagatgaccagtctgaggcttcagggaagaaatctgtgaagggagtgtctaagaaatatgttcctccacgcttggttccagtacattatgatgaaacagaagctgagcgggagaagaagcgtctagaacgagccaagagacgggcattgagcagctctgtcattcgtgaacttaaggagcagtactcagatgctccagaggaaatccgtgatgctcggcatccccatgttacccgccagagtcaggaggaccaacacaggattaactatgaggagagcatgatggtgcgtttgagcgtcagtaagcgagagaaaggacggcgaaaacgagcaaatgtcatgagctcacaacttcattcccttacacacttcagtgacatcagtgctttgacagggggaactgttcatcttgatgaggatcagaatcctattaagaagcggaagaagatacctcagaaaggtcggaagaaaaaaggttttcggaggcggcggtgattatgggtgtacatatttgtatattttttgtcatcctgagatacttctaatttcattgtatataggtggttttccctggaattcattaattgtttgctttggacatgtggaaagagccttactaataaaattgattttgcttatgaattaaagcccctttttgcaca

SEQ ID NO: 158870 - DNA, 838 bp, Homo sapiens
  Payload ID: 11082
  Gene Symbol: NGDN
  Gene Name: neuroguidin, EIF4E binding protein
  ENST ID: ENST00000556483
  CDS Start-End: 1-790
ggagtccgacctgccaagtgccgtgacacttctgaaaaatctccaggagcaagtgatggctgtaactgcacaagtgaaatcactgacacaaaaagttcaagctggtgcctatcctacagaaaagggtctcagcttcttggaagtgaaagaccagctgctgctcatgtaccttatggatttgacccacctcattctggacaaagcctcaggaggatctcttcagggacatgatgcagttttgagactggtggagattcgcacgttgagctctgaggatgaggaggaagatgaagcagaagatgaccagtctgaggcttcagggaagaaatctgtgaagggagtgtctaagaaatatgttcctccacgcttggttccagtacattatgatgaaacagaagctgagcgggagaagaagcgtctagaacgagccaagagacgggcattgagcagctctgtcattcgtgaacttaaggagcagtactcagatgctccagaggaaatccgtgatgctcggcatccccatgttacccgccagagtcaggaggaccaacacaggattaactatgaggagagcatgatggtgcgtttgagcgtcagtaagcgagagaaaggacggcgaaaacgagcaaatgtcatgagctcacaacttcattcccttacacacttcagtgacatcagtgctttgacagggggaactgttcatcttgatgaggatcagaatcctattaagaagcggaagaagatacctcagaaaggtcggaagaaaaaaggttttcggaggcggcggtgattatgggtgtacatatttgtatattttttgtcatcctgagatacttct

SEQ ID NO: 158871 - DNA, 786 bp, Homo sapiens
  Payload ID: 11082
  Gene Symbol: NGDN
  Gene Name: neuroguidin, EIF4E binding protein
  ENST ID: ENST00000555128
  CDS Start-End: 362-786
ttcttcctcgcgtagctattgtggagttgtcctttgccttcagcggctggaggcaaactgttggtaccagggaagggtggtgatgaaagttgcttcagggaggcggcctccctagagttaccgttcctgtccggtaacccaaggggctggctttaaggcgagtctgtgaacccgagtgtgaaggccccgagtctgggtgtctgacggagagagggcagtttcccaccctagacgttccactttcctataatcctgaggaaagaatgacttttctttacgcctcctctcccttctgtagggggtgctggagtccgacctgccaagtgccgtgacacttctgaaaaatctccaggagcaagtgatggctgtaactgcacaagtgaaatcactgacacaaaaagttcaagctggtgcctatcctacagaaaagggtctcagcttcttggaagtgaaagaccagctgctgctcatgtaccttatggatttgacccacctcattctggacaaagcctcaggaggatctcttcagggacatgatgcagttttgagactggtggagattcgcacggttttggaaaagcttcgtcccttggaccaaaagctgaagtatcaaattgacaagctgatcaagactgcagtgacaggcagccttagtgagaatgacccacttcgttttaagcctcatcccagcaatatgatgagcaagttgagctctgaggatgaggaggaagatgaagcagaagatgaccagtctgaggcttcagggaagaaatctgtgaagggagt

SEQ ID NO: 158872 - DNA, 725 bp, Homo sapiens
  Payload ID: 11082
  Gene Symbol: NGDN
  Gene Name: neuroguidin, EIF4E binding protein
  ENST ID: ENST00000556699
  CDS Start-End: 1-225
gagagcatgatggtgcgtttgagcgtcagtaagcgagagaaaggacggcgaaaacgagcaaatgtcatgagctcacaacttcattcccttacacacttcagtgacatcagtgctttgacagggggaactgttcatcttgatgaggatcagaatcctattaagaagcggaagaagatacctcagaaaggtcggaagaaaaaagctctggagtgcctctgctactgacaactgctcagtatctgagtgttggagagataaaacaggctctagaagagaaagtgaaccaggatggaatctacaaccctggcaaactgagtattggcttctctcactgaccactgaggggataatttatcaaagatgtcacccaatgataaaagcagccctaaaatgctttctttaaaaaatgtgtcctctgagaacatttaggttttgcctctagactctggttaggtgagtgacttcactttgtgcccctttatcctatggttcctcagctagaggagtagtcagcaggtgggacagtgagtcacactctgaaatggctctgtcattcctgtgccataggctgtcaggagtctgggacttctacaggaggctttagagagggagggaggagatggggtcagctgggacattgataggctttcagagtttggagggaccttatcacctggaaatatggcaaatcaaatttgtattttaaagctattctgtctttgaaa

SEQ ID NO: 158873 - DNA, 5092 bp, Homo sapiens
  Payload ID: 11083
  Gene Symbol: NLGN1
  Gene Name: neuroligin 1
  Uniprot ID: Q8N2Q7
  ENST ID: ENST00000361589
  CDS Start-End: 801-3272
gaattcatttttgaggtcaatttccaatcgagataaatctattggattagtaggattatctgattgcagccgaaagaagtaacgttgtttgatcatttgtatttcttgcctgatggtcggatttacatggaggtggctttgggtccccaggattctggatcgtggttgcatctggagagaaaaaaggatcaatcgacacgttttagaagtgtccgtgggtgaataaaaaaggaggggggggtgcaaaactggggttgcggatgcttaaagcaaaaaaagagaaaaggaagcgtcttgaatcctggaacaagaattaccgggtgctcgagatttcaaaaaagcgtctagaaactggtaaatacttggaccatttcagcttgaatttgacggcgaagtgttgtagagaccgtctccttgaatcattgcaaagggaccggggaaagatgagggggctccctctgtggatttatcttgctgagggatatagacctgcagctaactggatttgatttataagagagaaatctgcagtcaatgcccactcttgccacactgctaatatggaaaacagaatgttcaataggatatggtctgataaatagtgatgattgaagatgctgctccaatacatgtgaaatcaatgggagatatctgctgtctgaagatctttcagagcttttctcgacaagctcccctgtaagaaatcggaggtatattctaccattatacagtctttctcaagtggatataaatacgtttgcctcactgtaaccagacaactagacaactaatgtgggaccatggcactgcccagatgcacgtggccaaattatgtttggagagcagtgatggcatgcttggtacaccggggattgggtgccccattgactctctgtatgttgggatgtttgcttcaggctggccatgtgctatcacaaaaattggatgatgtggacccactggtggctaccaactttggaaagataagagggattaagaaggaactcaataatgaaattttggggcctgttattcaatttcttggggttccatatgcagccccaccaacaggggaacgtcgttttcagcctccagaaccaccatctccctggtcagatatcagaaatgccactcaatttgctcctgtgtgtccccagaatatcattgatggcagattgccagaagtcatgcttcctgtgtggtttactaataacttggatgtggtttcatcatatgtgcaagaccagagcgaagactgcctatatttaaatatatatgtcccgactgaggatgatattcgggacagtgggggtcccaaaccagtgatggtgtatatccatggtggctcatatatggaaggtactggaaatttatatgatggaagtgtcttggcaagttatggcaatgtgatcgtcatcacagtcaactatcgacttggagtactcggtttcttgagtacaggcgatcaggctgcaaaggggaactatggactccttgatctcatacaagctttaagatggactagtgaaaacattggattctttggtggtgaccccttaagaatcactgtttttggatctggtgctgggggttcatgtgtcaacctgctgactttatcccattattctgaaggtaaccgttggagcaattcaaccaaaggactttttcaacgagcaatagctcaaagtggaacagccctttccagctgggctgttagttttcaacctgcaaaatatgctagaatgttggccacaaaagttggttgcaatgtttcagatacagtagagttagtggaatgcctacagaagaagccttacaaagaacttgttgaccaagatattcaaccagctcgataccacatagcctttggacctgtgattgatggtgatgtaataccagacgacccccagatattgatggagcaaggagagtttctcaactatgatataatgttaggagtgaaccaaggggaagggttaaaatttgttgaaaatatagtagatagcgatgatggtatatcagctagtgattttgactttgctgtttcaaattttgttgataatttatatggatatcctgaaggcaaagatgttttgagagaaaccattaagttcatgtatactgactgggctgaccgtcataaccctgaaaccagaagaaagacattactggctttgtttacggaccatcagtgggtggcaccagctgtagccacagcggatcttcactcaaactttggttcacctacgtacttctatgccttttaccatcattgccaaacagatcaggttccagcttgggctgatgcagcccacggagacgaggttccctatgtactgggaatccccatgattggccctacagagttatttccttgcaatttctccaaaaatgatgtgatgctgagtgcagttgtaatgacatactggacaaattttgctaaaactggtgacccaaatcaaccagtccctcaagacacgaaattcattcataccaaacccaaccgttttgaagaagtagcatggaccagatattcccagaaagaccaactttatctccatattggattaaaaccaagagttaaagaacattacagagccaataaggtgaacctctggttggagttggtacctcatctgcataatctcaatgacatttctcagtatacctctacaacaactaaagtgccatcaactgacatcactttcagacctacgagaaaaaattctgtacctgtcacgtcagcctttcccactgccaagcaggatgatcccaaacaacaaccaagtccattttcagtggatcaaagggactactcaacagagctgagtgtcactattgcagttggagcatcactgctgtttctgaacatcttggcctttgcagccctgtactacaaaaaggataagaggagacatgatgttcacaggagatgcagccctcagcgcactactaccaatgatctaacccatgcacaagaagaggaaatcatgtccctccaaatgaagcacactgatttggatcatgaatgtgagtccattcatccacatgaggtggttcttcggaccgcctgtcccccagattacacactagctatgaggaggtcacctgatgatgttcccttaatgacacccaacaccattacaatgattcccaacactataccagggattcagcccttacacacattcaatacatttactggaggacagaacaatactctgccccatccccatccccacccccattcacattcaacaaccagggtatagccagataagagaaacaaactattttttttgatggattgcagtaaacgatcactgaagattccttggctttcaacctacaagacttactatttaaataaggaggaatattatgtgaatatacatatcaagaactttgggggttttgaaaaaaatgaattgtatatatacaaatcaactttaaaaacaaatttcaattgcttgaagcaattgttctgaatgatactttttcattcacattcaagaattaattttttgaagatttaagttacataatggaattaggcatgtggaacaccaaacaggaaagaactatgtctgaaatataaaaaataaaaataaaaaaacaactatgaatatgcacaagggacacaccagtggaatgtcagataattttcaccagtttttatttggagccgttttattgtgtagaccatatttacatatttggataagtacacaaagcgtcaatgctgttaatggccttagcaaaggctcatgctgaaatttgccagtaaaacaaagaagtttaaagactggcaggtacaccattatcacataagtgctgtcagtataaagttgtggggataaaggaaactggatatttttagcacgatgtgcatgataatttatatgcttggtggctgtgctgctgattaagccgtaattaaaattcttctcatcccattggagtttttaatagaagcttcctccatcaattggcagaacctaaagaagattttaaggggcaaaagtaattacaataaaataattcacagtagtttcaatatagaaggaattagctattaaaggtatttgaagaaactataggtatagtggtgaatactcgctgatatgaatcccagaaaaaaatttcctgtttttaatgttcttttcaatcccatctagataatttatagaaatataaccctaattggacatgtggtacaggatctataagttgctgtgtttttttgttactctgtattttgttccttttggtaaggtgaagtgtgtccaaagagttacttgcaacagtctttcatgatatgaggatgcccccgtattaccactctgattatagttctgagttctttgatttactcatgctgcatgacaaaatgtttactaataacaattcattataaagttatatccctctttacatcacttatctttctcactgaggttcattcactggaatttactcacgcaatctcagtagagtacaacgtagatacagaacctaggagagtcaacatctggaggattttagtctttcttacacatatgtgtgattttaaacgaatattctcagaccacaggaaactcttcatccccctgttgtttaccagtaacagtatatcacagacctttccaaatgtttgtatatgtaatcagatgtacatttatattgaaaaacaaatgagatggacttaaagagcacatcctgataaatactttctctctcacctgtactatatttctattagactaaagttatgtgattttttttttacattttttcagatgactagcaattttgatagtttataagataatgcaaagaactttctctgacaaactaactgcagtaacagaaacctttcttttcagttactctttttcaagaatgaaagattattatacaaaaaattgtatactacttgatggaaccaactttgtacatcttggccatgtcactggtcattgtgtgaaataaagataatctggataatgactattagtccaatgctaagaaacatgatctttgctcattaaagagctaaaatgtttattgctgttttgtctttcttttttct

SEQ ID NO: 158874 - DNA, 1827 bp, Homo sapiens
  Payload ID: 11083
  Gene Symbol: NLGN1
  Gene Name: neuroligin 1
  ENST ID: ENST00000401917
  CDS Start-End: 1-1827
ggtttcttgagtacaggcgatcaggctgcaaaggggaactatggactccttgatctcatacaagctttaagatggactagtgaaaacattggattctttggtggtgaccccttaagaatcactgtttttggatctggtgctgggggttcatgtgtcaacctgctgactttatcccattattctgaaggtaaccgttggagcaattcaaccaaaggactttttcaacgagcaatagctcaaagtggaacagccctttccagctgggctgttagttttcaacctgcaaaatatgctagaatgttggccacaaaagttggttgcaatgtttcagatacagtagagttagtggaatgcctacagaagaagccttacaaagaacttgttgaccaagatattcaaccagctcgataccacatagcctttggacctgtgattgatggtgatgtaataccagacgacccccagatattgatggagcaaggagagtttctcaactatgatataatgttaggagtgaaccaaggggaagggttaaaatttgttgaaaatatagtagatagcgatgatggtatatcagctagtgattttgactttgctgtttcaaattttgttgataatttatatggatatcctgaaggcaaagatgttttgagagaaaccattaagttcatgtatactgactgggctgaccgtcataaccctgaaaccagaagaaagacattactggctttgtttacggaccatcagtgggtggcaccagctgtagccacagcggatcttcactcaaactttggttcacctacgtacttctatgccttttaccatcattgccaaacagatcaggttccagcttgggctgatgcagcccacggagacgaggttccctatgtactgggaatccccatgattggccctacagagttatttccttgcaatttctccaaaaatgatgtgatgctgagtgcagttgtaatgacatactggacaaattttgctaaaactggtgacccaaatcaaccagtccctcaagacacgaaattcattcataccaaacccaaccgttttgaagaagtagcatggaccagatattcccagaaagaccaactttatctccatattggattaaaaccaagagttaaagaacattacagagccaataaggtgaacctctggttggagttggtacctcatctgcataatctcaatgacatttctcagtatacctctacaacaactaaagtgccatcaactgacatcactttcagacctacgagaaaaaattctgtacctgtcacgtcagcctttcccactgccaagcaggatgatcccaaacaacaaccaagtccattttcagtggatcaaagggactactcaacagagctgagtgtcactattgcagttggagcatcactgctgtttctgaacatcttggcctttgcagccctgtactacaaaaaggataagaggagacatgatgttcacaggagatgcagccctcagcgcactactaccaatgatctaacccatgcacaagaagaggaaatcatgtccctccaaatgaagcacactgatttggatcatgaatgtgagtccattcatccacatgaggtggttcttcggaccgcctgtcccccagattacacactagctatgaggaggtcacctgatgatgttcccttaatgacacccaacaccattacaatgattcccaacactataccagggattcagcccttacacacattcaatacatttactggaggacagaacaatactctgccccatccccatccccacccccattcacattcaacaaccagggtatag

SEQ ID NO: 158875 - DNA, 8242 bp, Homo sapiens
  Payload ID: 11083
  Gene Symbol: NLGN1
  Gene Name: neuroligin 1
  Uniprot ID: Q8N2Q7
  ENST ID: ENST00000457714
  CDS Start-End: 430-2901
cgttctccaccgactcctgcccgcctcaacacaatgccttacctgtgaagcttgaggccactcaagttccaaatttgtgacaaatcccccagggctcactggagtggcagatatagacctgcagctaactggatttgatttataagagagaaatctgcagtcaatgcccactcttgccacactgctaatatggaaaacagaatgttcaataggatatggtctgataaatagtgatgattgaagatgctgctccaatacatgtgaaatcaatgggagatatctgctgtctgaagatctttcagagcttttctcgacaagctcccctgtaagaaatcggaggtatattctaccattatacagtctttctcaagtggatataaatacgtttgcctcactgtaaccagacaactagacaactaatgtgggaccatggcactgcccagatgcacgtggccaaattatgtttggagagcagtgatggcatgcttggtacaccggggattgggtgccccattgactctctgtatgttgggatgtttgcttcaggctggccatgtgctatcacaaaaattggatgatgtggacccactggtggctaccaactttggaaagataagagggattaagaaggaactcaataatgaaattttggggcctgttattcaatttcttggggttccatatgcagccccaccaacaggggaacgtcgttttcagcctccagaaccaccatctccctggtcagatatcagaaatgccactcaatttgctcctgtgtgtccccagaatatcattgatggcagattgccagaagtcatgcttcctgtgtggtttactaataacttggatgtggtttcatcatatgtgcaagaccagagcgaagactgcctatatttaaatatatatgtcccgactgaggatgatattcgggacagtgggggtcccaaaccagtgatggtgtatatccatggtggctcatatatggaaggtactggaaatttatatgatggaagtgtcttggcaagttatggcaatgtgatcgtcatcacagtcaactatcgacttggagtactcggtttcttgagtacaggcgatcaggctgcaaaggggaactatggactccttgatctcatacaagctttaagatggactagtgaaaacattggattctttggtggtgaccccttaagaatcactgtttttggatctggtgctgggggttcatgtgtcaacctgctgactttatcccattattctgaaggtaaccgttggagcaattcaaccaaaggactttttcaacgagcaatagctcaaagtggaacagccctttccagctgggctgttagttttcaacctgcaaaatatgctagaatgttggccacaaaagttggttgcaatgtttcagatacagtagagttagtggaatgcctacagaagaagccttacaaagaacttgttgaccaagatattcaaccagctcgataccacatagcctttggacctgtgattgatggtgatgtaataccagacgacccccagatattgatggagcaaggagagtttctcaactatgatataatgttaggagtgaaccaaggggaagggttaaaatttgttgaaaatatagtagatagcgatgatggtatatcagctagtgattttgactttgctgtttcaaattttgttgataatttatatggatatcctgaaggcaaagatgttttgagagaaaccattaagttcatgtatactgactgggctgaccgtcataaccctgaaaccagaagaaagacattactggctttgtttacggaccatcagtgggtggcaccagctgtagccacagcggatcttcactcaaactttggttcacctacgtacttctatgccttttaccatcattgccaaacagatcaggttccagcttgggctgatgcagcccacggagacgaggttccctatgtactgggaatccccatgattggccctacagagttatttccttgcaatttctccaaaaatgatgtgatgctgagtgcagttgtaatgacatactggacaaattttgctaaaactggtgacccaaatcaaccagtccctcaagacacgaaattcattcataccaaacccaaccgttttgaagaagtagcatggaccagatattcccagaaagaccaactttatctccatattggattaaaaccaagagttaaagaacattacagagccaataaggtgaacctctggttggagttggtacctcatctgcataatctcaatgacatttctcagtatacctctacaacaactaaagtgccatcaactgacatcactttcagacctacgagaaaaaattctgtacctgtcacgtcagcctttcccactgccaagcaggatgatcccaaacaacaaccaagtccattttcagtggatcaaagggactactcaacagagctgagtgtcactattgcagttggagcatcactgctgtttctgaacatcttggcctttgcagccctgtactacaaaaaggataagaggagacatgatgttcacaggagatgcagccctcagcgcactactaccaatgatctaacccatgcacaagaagaggaaatcatgtccctccaaatgaagcacactgatttggatcatgaatgtgagtccattcatccacatgaggtggttcttcggaccgcctgtcccccagattacacactagctatgaggaggtcacctgatgatgttcccttaatgacacccaacaccattacaatgattcccaacactataccagggattcagcccttacacacattcaatacatttactggaggacagaacaatactctgccccatccccatccccacccccattcacattcaacaaccagggtatagccagataagagaaacaaactattttttttgatggattgcagtaaacgatcactgaagattccttggctttcaacctacaagacttactatttaaataaggaggaatattatgtgaatatacatatcaagaactttgggggttttgaaaaaaatgaattgtatatatacaaatcaactttaaaaacaaatttcaattgcttgaagcaattgttctgaatgatactttttcattcacattcaagaattaattttttgaagatttaagttacataatggaattaggcatgtggaacaccaaacaggaaagaactatgtctgaaatataaaaaataaaaataaaaaaacaactatgaatatgcacaagggacacaccagtggaatgtcagataattttcaccagtttttatttggagccgttttattgtgtagaccatatttacatatttggataagtacacaaagcgtcaatgctgttaatggccttagcaaaggctcatgctgaaatttgccagtaaaacaaagaagtttaaagactggcaggtacaccattatcacataagtgctgtcagtataaagttgtggggataaaggaaactggatatttttagcacgatgtgcatgataatttatatgcttggtggctgtgctgctgattaagccgtaattaaaattcttctcatcccattggagtttttaatagaagcttcctccatcaattggcagaacctaaagaagattttaaggggcaaaagtaattacaataaaataattcacagtagtttcaatatagaaggaattagctattaaaggtatttgaagaaactataggtatagtggtgaatactcgctgatatgaatcccagaaaaaaatttcctgtttttaatgttcttttcaatcccatctagataatttatagaaatataaccctaattggacatgtggtacaggatctataagttgctgtgtttttttgttactctgtattttgttccttttggtaaggtgaagtgtgtccaaagagttacttgcaacagtctttcatgatatgaggatgcccccgtattaccactctgattatagttctgagttctttgatttactcatgctgcatgacaaaatgtttactaataacaattcattataaagttatatccctctttacatcacttatctttctcactgaggttcattcactggaatttactcacgcaatctcagtagagtacaacgtagatacagaacctaggagagtcaacatctggaggattttagtctttcttacacatatgtgtgattttaaacgaatattctcagaccacaggaaactcttcatccccctgttgtttaccagtaacagtatatcacagacctttccaaatgtttgtatatgtaatcagatgtacatttatattgaaaaacaaatgagatggacttaaagagcacatcctgataaatactttctctctcacctgtactatatttctattagactaaagttatgtgattttttttttacattttttcagatgactagcaattttgatagtttataagataatgcaaagaactttctctgacaaactaactgcagtaacagaaacctttcttttcagttactctttttcaagaatgaaagattattatacaaaaaattgtatactacttgatggaaccaactttgtacatcttggccatgtcactggtcattgtgtgaaataaagataatctggataatgactattagtccaatgctaagaaacatgatctttgctcattaaagagctaaaatgtttattgctgttttgtctttcttttttctaaaaaaagaaaaaaaagaaaaaaaggaaaagaagaacaaagaaacatgactgtctcaaagagtaatttttctagattagaccagtcaggtttttgaagacatataggtaacttccacagaaaacacaaacatgtatttaaaggcaagtctcatctaagatgaaactcataaaaattatttaatgtttgttatgaatttaaaagctccagaaatccatgaaaaaaagaaagattagctttgtgttgttaaatatctcttaggtacagatgttgtagaaataaagtgccaattgttttcagttagttagaaaaacaagttccaattctagtcatcaaggaaaaggtctattgaaaagaaatttgcaatatttcatggaatacaaataactaggttcataaaatgggggtgattaaactaccataaagtaatgaatagaaagttgccatgctaagagaatgtaaaagtgctgagcaagatattaaactgacactaaaagataaaaatctatttcaaggaatttatgtgattataatcccccctcccaattattatctatcaaagaaatgtaggtattcctccataattaaaaaaaagtctctgttagaagcaaaagtcttcaaaatccagagtgatctacatacagcttttgactgaggtggttatgcttttcaactgtgaactgccagtgtacacaaatacaaataattgtttagcatctgaagtattgttcaattggaacactgtattttactgtattaattaaacaaaacacaagaacagaatagaaatgacaacaaaataagatatgaatgaatactttcatatgcattgcttcatttggcaaaaccaaacattctattaaatagtatgttttaacgatggccatatttatatcatctacctaccaatctattgctctgcatttatcaatctgcctatatatagcataactgtcaccctctttatattaatttaggaaaatgattgaggaaaacaaagcatagccctattaattattttctctaaattagggtagaataactttatggaagataaagcagcctaggtttaattgttgttcaccagtcacgtgataaagtcattgtgaatgagtgttagttgctagttttataattgcagtctctagtttctgaatgaaaaaggatgccccacattatacagaacattaagaactgtttttaaagctgaaacataatctttatatgcaagaaaaataaatactgttactcaattttagcaaatatgtttaaaatgtatttatttagataattttctttgaaaaacaatgtaagtaacaaaattaaaataatatttttggcattatttgttaattcagattttcctgcctccgattaaaaattaggcaaagctgcttataatttatacaaagattacactaaaatgaactttatttcattgttttgctgttatataaaatttttaccaaatgtttaccaagagattaatgttttagagtatgaggatagaaaaataaaagtgacagatttcatagttttaaatctctactgaacatgttgactatgaacaaaatctaattggctaccacagatatataacaaagtttattactaactttatgcaaattggaaaataatttgctaaagcattaaaaatgtcagatttgtagacgtcttgctggcaactcaaagcagaaaatctgagtatatattattttattcctcatttcaaatataaaagttgaccaaagtgatgctttatttccgacttcctgatctgtatgtgaaaacagcaacatttttttaaaaattatcaagtatatataatattaaaaagaggaaaacagatggcactaattttcttacaggagtgaagtgctgaaactaaattgttacatctgtaacaacagttatttcacctcttgccacactcatcctgacatacgtattaatatcaaaaaatgatacaaagaatatgagaaatgtgttccagcattaaagacactactacatagaaattactgggattcttttctttggcgagtttcactgaaatagtttcacaggatgaaatgatgaattgaattcttaagaagctgtcaaatatggcagtcttttgatgttagtaattttgttttcttctgtgttattggttcaaagtactggccttttccttcatttccagtaattagttgttatagactatcactttttaatgtgagtggaaattagatgatttggttatacttgtgaaaacatgcttccaaataaattcaattaatgggcacttccctgctgagattttgttatcattcatttgattatcttgtcaagctttactgttacgacaaatgttttagctttctggtcaatagactaagggaatttctccagtagccttatacctctcctgcacttgatctgatagcaacatacacttcaaatttccatcagaagtctctaaagaaatttcctactgctatgaaacatttggtggccaacttgattctttttcataagcattctgatttgattttattctggcacgttgctgtatttggatgcaggccagaaatcaattccatttgataagggttgtggagaatacagactggaataaccgtgtgcagggcttaagtgccttttcctcctgagattttatttataaaacttagcttttttaaattttcagattcagataattcaatttaaagagtacaataggatgactatattataaattaccaataaagaaagtttatttggacatttttacatttaatttgatttttaaaataatatcagatgcatctaaatggcttccgggaaagactgaggtaaatttttgaaagtgacaattatataggcatctgacttgatggtacttaagaataaaaatttaaatctctagcaaactttaaaaattgtccaaatagtaagtttaatttgaaagaagtctgaagctattagagaaaatcatgtactagataggtatatatttttttctagtcagctattacgtacaccacataatatatataccctatatactatatggtttatataacatttataatggccctttcagacccatatacttacaaatgacattgtataactacctacatatgtattaatgtgacagaatttagtcctttatggaaagtcaaaccaaattgctagcagttttgagttgaaatgaatgataacaattaaagcttttaagaaattggtaaaggtaccgtaacaaaaactcagcagataaatttaaaagagagggaccatttttgaatgccattttcagagttgacatctaaactagatggtgtgtttaaaaggattttagtggttttgattcatcctttctctgcattcatatcatttagcaaattaatgggacatatgtcatggtttttgtaaaaaagaccattgggttgtcatgattcagtttgtgtttggacatctatggctttcattaaaaacgtgtttattatcatgaataaatattaccatgttttccaa

SEQ ID NO: 158876 - DNA, 635 bp, Homo sapiens
  Payload ID: 11083
  Gene Symbol: NLGN1
  Gene Name: neuroligin 1
  ENST ID: ENST00000413821
  CDS Start-End: 605-635
gagagcgcgcccgggcggccagcgccgagcgcgcggagctggcgtggggagacacggcaggaaaggcgagtcggagtgggtgatgagaggccgggagagcccgtccgagccggagagaccggagagaagggagcgagcgactgtgcggcgctcacgctgccagagcccgggcggagtgcagtcgcctccaaagccttagagcggcgccccagtcactgcagctcttcaccctagagctgtgccctgggaccacagagaccaagagcatggaaatcggctgagaggatatagacctgcagctaactggatttgatttataagagagaaatctgcagtcaatgcccactcttgccacactgctaatatggaaaacagaatgttcaataggatatggtctgataaatagtgatgattgaagatgctgctccaatacatgtgaaatcaatgggagatatctgctgtctgaagatctttcagagcttttctcgacaagctcccctgtaagaaatcggaggtatattctaccattatacagtctttctcaagtggatataaatacgtttgcctcactgtaaccagacaactagacaactaatgtgggaccatggcactgcccagatgcacgtggccaaatt

SEQ ID NO: 158877 - DNA, 771 bp, Homo sapiens
  Payload ID: 11083
  Gene Symbol: NLGN1
  Gene Name: neuroligin 1
  ENST ID: ENST00000423427
  CDS Start-End: 733-771
cggaaattctgcatattgaagcaggtggctcctggtacgaaatctctggatacatttggcttgccaagttttgctcttcgctgtcccctcccgtttacagaagcatctgtggtgcttttcattttggatttacatgcaggaaacgtatatatgtttatataccgaccgcataatatataaatacatatacgcgtgcccaagggcctggttttcgtctctcctccccacgaaacggaatgttttggagccgatggataacaagaacactattaacattcttttgagcctgttttttaaaagggggagggagcgtgaagaattgtttaacatttggccatcgtttggctgcacactaagcaccacgaagtatttatggttgcagatcaggtgcaaacggggcttagagagaaaggatatagacctgcagctaactggatttgatttataagagagaaatctgcagtcaatgcccactcttgccacactgctaatatggaaaacagaatgttcaataggatatggtctgataaatagtgatgattgaagatgctgctccaatacatgtgaaatcaatgggagatatctgctgtctgaagatctttcagagcttttctcgacaagctcccctgtaagaaatcggaggtatattctaccattatacagtctttctcaagtggatataaatacgtttgcctcactgtaaccagacaactagacaactaatgtgggaccatggcactgcccagatgcacgtggccaaattatgtttgg

SEQ ID NO: 158878 - DNA, 1536 bp, Homo sapiens
  Payload ID: 11083
  Gene Symbol: NLGN1
  Gene Name: neuroligin 1
  ENST ID: ENST00000415045
  CDS Start-End: 436-1536
gaccatttcagcttgaatttgacggcgaagtgttgtagagaccgtctccttgaatcattgcaaagggaccggggaaagatgagggggctccctctgtggatttatcttgctgagggatatagacctgcagctaactggatttgatttataagagagaaatctgcagtcaatgcccactcttgccacactgctaatatggaaaacagaatgttcaataggatatggtctgataaatagtgatgattgaagatgctgctccaatacatgtgaaatcaatgggagatatctgctgtctgaagatctttcagagcttttctcgacaagctcccctgtaagaaatcggaggtatattctaccattatacagtctttctcaagtggatataaatacgtttgcctcactgtaaccagacaactagacaactaatgtgggaccatggcactgcccagatgcacgtggccaaattatgtttggagagcagtgatggcatgcttggtacaccggggattgggtgccccattgactctctgtatgttgggatgtttgcttcaggctggccatgtgctatcacaaaaattggatgatgtggacccactggtggctaccaactttggaaagataagagggattaagaaggaactcaataatgaaattttggggcctgttattcaatttcttggggttccatatgcagccccaccaacaggggaacgtcgttttcagcctccagaaccaccatctccctggtcagatatcagaaatgccactcaatttgctcctgtgtgtccccagaatatcattgatggcagattgccagaagtcatgcttcctgtgtggtttactaataacttggatgtggtttcatcatatgtgcaagaccagagcgaagactgcctatatttaaatatatatgtcccgactgaggatgtaaaaagaatatccaaggaatgtgccagaaagcccggcaagaaaatatgtagaaaaggaggtccccttacaaagaaacagacagatgatttaggtgataatgacggtgctgaagatgaagatattcgggacagtgggggtcccaaaccagtgatggtgtatatccatggtggctcatatatggaaggtactggaaatttatatgatggaagtgtcttggcaagttatggcaatgtgatcgtcatcacagtcaactatcgacttggagtactcggtttcttgagtacaggcgatcaggctgcaaaggggaactatggactccttgatctcatacaagctttaagatggactagtgaaaacattggattctttggtggtgaccccttaagaatcactgtttttggatctggtgctgggggttcatgtgtcaacctgctgactttatcccattattctgaaggtaaccgttggagcaattcaaccaaaggactttttcaacgagcaatagctcaaagtggaacagccctttccagctgggctgttagttttcaacctgcaaaatatgctagaatgttggccacaaaagttggttgcaatgtttcagataca

SEQ ID NO: 158879 - DNA, 4642 bp, Homo sapiens
  Payload ID: 11084
  Gene Symbol: NLGN2
  Gene Name: neuroligin 2
  Uniprot ID: Q8NFZ4
  ENST ID: ENST00000302926
  CDS Start-End: 74-2581
tccctctcccccccttctctctctctccgaggggggggggtcccagggagggagggggggtcccccgatcagcatgtggctcctggcgctgtgtctggtggggctggcgggggctcaacgcgggggagggggtcccggcggcggcgccccgggcggccccggcctgggcctcggcagcctcggcgaggagcgcttcccggtggtgaacacggcctacgggcgagtgcgcggtgtgcggcgcgagctcaacaacgagatcctgggccccgtcgtgcagttcttgggcgtgccctacgccacgccgcccctgggcgcccgccgcttccagccgcctgaggcgcccgcctcgtggcccggcgtgcgcaacgccaccaccctgccgcccgcctgcccgcagaacctgcacggggcgctgcccgccatcatgctgcctgtgtggttcaccgacaacttggaggcggccgccacctacgtgcagaaccagagcgaggactgcctgtacctcaacctctacgtgcccaccgaggacggtccgctcacaaaaaaacgtgacgaggcgacgctcaatccgccagacacagatatccgtgaccctgggaagaagcctgtgatgctgtttctccatggcggctcctacatggaggggaccggaaacatgttcgatggctcagtcctggctgcctatggcaacgtcattgtagccacgctcaactaccgtcttggggtgctcggttttctcagcaccggggaccaggctgcaaaaggcaactatgggctcctggaccagatccaggccctgcgctggctcagtgaaaacatcgcccactttgggggcgaccccgagcgtatcaccatctttggttccggggcaggggcctcctgcgtcaaccttctgatcctctcccaccattcagaagggctgttccagaaggccatcgcccagagtggcaccgccatttccagctggtctgtcaactaccagccgctcaagtacacgcggctgctggcagccaaggtgggctgtgaccgagaggacagcgctgaagctgtggagtgtctgcgccggaagccctcccgggagctggtggaccaggacgtgcagcctgcccgctaccacatcgcctttgggcccgtggtggatggcgacgtggtccccgatgaccctgagatcctcatgcagcagggagaattcctcaactacgacatgctcatcggcgtcaaccagggagagggcctcaagttcgtggaggactctgcagagagcgaggacggtgtgtctgccagcgcctttgacttcactgtctccaactttgtggacaacctgtatggctacccggaaggcaaggatgtgcttcgggagaccatcaagtttatgtacacagactgggccgaccgggacaatggcgaaatgcgccgcaaaaccctgctggcgctctttactgaccaccaatgggtggcaccagctgtggccactgccaagctgcacgccgactaccagtctcccgtctacttttacaccttctaccaccactgccaggcggagggccggcctgagtgggcagatgcggcgcacggggatgaactgccctatgtctttggcgtgcccatggtgggtgccaccgacctcttcccctgtaacttctccaagaatgacgtcatgctcagtgccgtggtcatgacctactggaccaacttcgccaagactggggaccccaaccagccggtgccgcaggataccaagttcatccacaccaagcccaatcgcttcgaggaggtggtgtggagcaaattcaacagcaaggagaagcagtatctgcacataggcctgaagccacgcgtgcgtgacaactaccgcgccaacaaggtggccttctggctggagctcgtgccccacctgcacaacctgcacacggagctcttcaccaccaccacgcgcctgcctccctacgccacgcgctggccgcctcgtccccccgctggcgccccgggcacacgccggcccccgccgcctgccaccctgcctcccgagcccgagcccgagcccggcccaagggcctatgaccgcttccccggggactcacgggactactccacggagctgagcgtcaccgtggccgtgggtgcctccctcctcttcctcaacatcctggcctttgctgccctctactacaagcgggaccggcggcaggagctgcggtgcaggcggcttagcccacctggcggctcaggctctggcgtgcctggtgggggccccctgctccccgccgcgggccgtgagctgccaccagaggaggagctggtgtcactgcagctgaagcggggtggtggcgtcggggcggaccctgccgaggctctgcgccctgcctgcccgcccgactacaccctggccctgcgccgggcaccggacgatgtgcctctcttggcccccggggccctgaccctgctgcccagtggcctggggccaccgccacccccaccgcccccctcccttcatcccttcgggcccttccccccgccccctcccaccgccaccagccacaacaacacgctaccccacccccactccaccactcgggtatagggggtgggtggggaggccctcctccccggccctccctggcccggccactccgaaggcagggaggaggacttggcaactggcttttctcctgtggagtcgtcacacgccatccagcagcgctaaggtggacatgggattcctccctgcgatgcgtgtctttcccacgcagagaagcccagtctcttctctggatctgggcctttgaacaactggggggcgttttctcccccccattgggacaccagtcttcggtgtgtggaatgtggtattttcccgcgtggaggtgtgctttctcacaacggggtgtgttttcccatgtgcagggtgaggtttttttttgccaccctggacacatgttggccccctcaaagaatttctgtggggatttgtaccccagaatcctgttcccccatcccttctcccacctcctcccctctccctccccctggagaccctggaagtggtgtgttcacatacagtgacccttggccaccagaccacagaggatggagcctgggaagcagcgaggaaatcacagccccctcgcccctgcctcccttgcccctaccccggcgaagcatgttccccccgacgccccccttggcacaagtcagatgaagcacgttctgccggggaggccctcaccttccagagaggacagacacagatttcctgctgggggagggaggagtccacgcatcctgatgctgcctggaagcttattttcccgtggccaggacgcatttctctgagtggaaacaggttcttgcatgtggatgtgtgtttccccaggcagacggcccctctcttcccagcacttccctgcctcccccaggcctcaggcccagcacccagttcctcctcacatggcaggtgagcacagacttctagttggcaggagctgaggagggtgaacaaaccccgagggaggcccggcccttgctcccgagttggggggagggggtgtggcaacgtgccccccgcagaggccacgcatgtttgaccaaagccctcattgtggtccgaggacagccttttccccaggcctcagagcattgctcatccgtgccaaactgggtaggtggatttgagcggaaagactcccaaaatgtgccaagaatttcccagtcccaggcagggcaggggaaactaagggcaagcaggatacagggcgagggatgtggcaggtgagggggctcccgcctgtgccccttctcctcaccatgtctcccccaccctgcctcagttctccgttccccttcatctccgtccccctctttgaagctgtccccatctcagtgtcagaccagccttctcctcagctgaccaccctcctctgacccacgccccctccttgtctgaaagaaaggagccttgaatggtggagggaggcagtggggagaaaggtctcaccggacaggttgggagaatgaggtcagcggtgctggggaacagatggagggggcagtggggacagggcttgggcagacaccagcaggaataatttgaaatgtgtgaggtgactccccggagggccttgggcttgggcatttgggaaaagaatgatgtctggaagggcttaagggacacagtggacgaggggagagtcctcatctgctggcattttgtggggtgttagtgccaaacttgaataggggctggggtgctgtcttccactgacacccaaatccagaatccctggtcttgagtccccagaactttgcctcttgactgtcccttctcttcctacctccatccatggaaaattagttattttctgatcctttcccctgcctggtctagctcctctccaaacagccatgccctccaaatgctagagacctgggccctgaaccctgtagacagatgccctcagaattggggcatgggaggggggctgggggaccccatgattcagccacggactccaatgcccagctcctctccccaaaacaatcccgacaatcccttatccctaccccaaccctttgcggctctgtacacatttttaaacctggcaaaagatgaagagaatattgtaaatataaaagtttaactgtt

SEQ ID NO: 158880 - DNA, 581 bp, Homo sapiens
  Payload ID: 11084
  Gene Symbol: NLGN2
  Gene Name: neuroligin 2
  ENST ID: ENST00000570940
  CDS Start-End: 1-581
cggccgccacctacgtgcagaaccagagcgaggactgcctgtacctcaacctctacgtgcccaccgaggacgatatccgtgaccctgggaagaagcctgtgatgctgtttctccatggcggctcctacatggaggggaccggaaacatgttcgatggctcagtcctggctgcctatggcaacgtcattgtagccacgctcaactaccgtcttggggtgctcggttttctcagcaccggggaccaggctgcaaaaggcaactatgggctcctggaccagatccaggccctgcgctggctcagtgaaaacatcgcccactttgggggcgaccccgagcgtatcaccatctttggttccggggcaggggcctcctgcgtcaaccttctgatcctctcccaccattcagaagggctgttccagaaggccatcgcccagagtggcaccgccatttccagctggtctgtcaactaccagccgctcaagtacacgcggctgctggcagccaaggtgggctgtgaccgagaggacagcgctgaagctgtggagtgtctgcgccggaagccctcccgggagctggtggac

SEQ ID NO: 158881 - DNA, 4374 bp, Homo sapiens
  Payload ID: 11084
  Gene Symbol: NLGN2
  Gene Name: neuroligin 2
  Uniprot ID: Q8NFZ4
  ENST ID: ENST00000575301
  CDS Start-End: 982-3489
gacgcgcggggctgctgcggctgctccgccggcggatcatcactctcgggctgggatggacgcggggcgggccggccctggcgcgcggagccaggagtccgggcctcccggctgctgagcgtccctcgaagcctcccctcacccccgccttccctcctaggatccgcgctgacccccgccccggggctctggactcggctcccgccctcctctgactccccggacctccccctcacgcccgccctcgggatcgactagatccctccccctccccgaggattccggctggatccctgcccctgcaccgcggatcctgcgctcccgggccccgggcccctggggattaacgtggactcctcctccagcacccgatccttaggatcctccgcctggaccgccttctggtccctcgaagccggcccacggaaccagcggatcctcaatctagtcctgtcccgttgccccctcctttctctatcgtccctactgcggggttccctgttctcgggctccccctgatcccatcccctagctctccttttcccggggatcgactggatcccggccccgccccccggggctggggcgatccccctcccccgccgggtgaggcgctgcgggcgggggctgggcctgcggggccgcgggggctcagaggccgccgccccctcccgaaggcctttcgccccccactcggagccctggatggaggcaccacggccccagggctgagccaggtcgggcctgccttcaccttctcccatttccttccccttccccaccccgtgccccctccatggagaggaacagaccccttctctgtccagtctaacccaggtccctccccaaccccctcctccctcctttccccccgcccctcctccctcctggggcgaggggggcctccctccctctcccccccttctctctctctccgaggggggggggtcccagggagggagggggggtcccccgatcagcatgtggctcctggcgctgtgtctggtggggctggcgggggctcaacgcgggggagggggtcccggcggcggcgccccgggcggccccggcctgggcctcggcagcctcggcgaggagcgcttcccggtggtgaacacggcctacgggcgagtgcgcggtgtgcggcgcgagctcaacaacgagatcctgggccccgtcgtgcagttcttgggcgtgccctacgccacgccgcccctgggcgcccgccgcttccagccgcctgaggcgcccgcctcgtggcccggcgtgcgcaacgccaccaccctgccgcccgcctgcccgcagaacctgcacggggcgctgcccgccatcatgctgcctgtgtggttcaccgacaacttggaggcggccgccacctacgtgcagaaccagagcgaggactgcctgtacctcaacctctacgtgcccaccgaggacggtccgctcacaaaaaaacgtgacgaggcgacgctcaatccgccagacacagatatccgtgaccctgggaagaagcctgtgatgctgtttctccatggcggctcctacatggaggggaccggaaacatgttcgatggctcagtcctggctgcctatggcaacgtcattgtagccacgctcaactaccgtcttggggtgctcggttttctcagcaccggggaccaggctgcaaaaggcaactatgggctcctggaccagatccaggccctgcgctggctcagtgaaaacatcgcccactttgggggcgaccccgagcgtatcaccatctttggttccggggcaggggcctcctgcgtcaaccttctgatcctctcccaccattcagaagggctgttccagaaggccatcgcccagagtggcaccgccatttccagctggtctgtcaactaccagccgctcaagtacacgcggctgctggcagccaaggtgggctgtgaccgagaggacagcgctgaagctgtggagtgtctgcgccggaagccctcccgggagctggtggaccaggacgtgcagcctgcccgctaccacatcgcctttgggcccgtggtggatggcgacgtggtccccgatgaccctgagatcctcatgcagcagggagaattcctcaactacgacatgctcatcggcgtcaaccagggagagggcctcaagttcgtggaggactctgcagagagcgaggacggtgtgtctgccagcgcctttgacttcactgtctccaactttgtggacaacctgtatggctacccggaaggcaaggatgtgcttcgggagaccatcaagtttatgtacacagactgggccgaccgggacaatggcgaaatgcgccgcaaaaccctgctggcgctctttactgaccaccaatgggtggcaccagctgtggccactgccaagctgcacgccgactaccagtctcccgtctacttttacaccttctaccaccactgccaggcggagggccggcctgagtgggcagatgcggcgcacggggatgaactgccctatgtctttggcgtgcccatggtgggtgccaccgacctcttcccctgtaacttctccaagaatgacgtcatgctcagtgccgtggtcatgacctactggaccaacttcgccaagactggggaccccaaccagccggtgccgcaggataccaagttcatccacaccaagcccaatcgcttcgaggaggtggtgtggagcaaattcaacagcaaggagaagcagtatctgcacataggcctgaagccacgcgtgcgtgacaactaccgcgccaacaaggtggccttctggctggagctcgtgccccacctgcacaacctgcacacggagctcttcaccaccaccacgcgcctgcctccctacgccacgcgctggccgcctcgtccccccgctggcgccccgggcacacgccggcccccgccgcctgccaccctgcctcccgagcccgagcccgagcccggcccaagggcctatgaccgcttccccggggactcacgggactactccacggagctgagcgtcaccgtggccgtgggtgcctccctcctcttcctcaacatcctggcctttgctgccctctactacaagcgggaccggcggcaggagctgcggtgcaggcggcttagcccacctggcggctcaggctctggcgtgcctggtgggggccccctgctccccgccgcgggccgtgagctgccaccagaggaggagctggtgtcactgcagctgaagcggggtggtggcgtcggggcggaccctgccgaggctctgcgccctgcctgcccgcccgactacaccctggccctgcgccgggcaccggacgatgtgcctctcttggcccccggggccctgaccctgctgcccagtggcctggggccaccgccacccccaccgcccccctcccttcatcccttcgggcccttccccccgccccctcccaccgccaccagccacaacaacacgctaccccacccccactccaccactcgggtatagggggtgggtggggaggccctcctccccggccctccctggcccggccactccgaaggcagggaggaggacttggcaactggcttttctcctgtggagtcgtcacacgccatccagcagcgctaaggtggacatgggattcctccctgcgatgcgtgtctttcccacgcagagaagcccagtctcttctctggatctgggcctttgaacaactggggggcgttttctcccccccattgggacaccagtcttcggtgtgtggaatgtggtattttcccgcgtggaggtgtgctttctcacaacggggtgtgttttcccatgtgcagggtgaggtttttttttgccaccctggacacatgttggccccctcaaagaatttctgtggggatttgtaccccagaatcctgttcccccatcccttctcccacctcctcccctctccctccccctggagaccctggaagtggtgtgttcacatacagtgacccttggccaccagaccacagaggatggagcctgggaagcagcgaggaaatcacagccccctcgcccctgcctcccttgcccctaccccggcgaagcatgttccccccgacgccccccttggcacaagtcagatgaagcacgttctgccggggaggccctcaccttccagagaggacagacacagatttcctgctgggggagggaggagtccacgcatcctgatgctgcctggaagcttattttcccgtggccaggacgcatttctctgagtggaaacaggttcttgcatgtggatgtgtgtttccccaggcagacggcccctctcttcccagcacttccctgcctcccccaggcctcaggcccagcacccagttcctcctcacatggcaggtgagcacagac

SEQ ID NO: 158882 - DNA, 3046 bp, Homo sapiens
  Payload ID: 11085
  Gene Symbol: NLGN3
  Gene Name: neuroligin 3
  Uniprot ID: Q9NZ94
  ENST ID: ENST00000358741
  CDS Start-End: 304-2850
ccggagagctgatctcggggattcgggtgcggagcccttggcctggaggcgatatgggtggtccgtggcccggttcagtcgcttgcagcagcccggggaacaggcctgtctggccctgagggagtcccctttctgaagctgtggtgcttggacgacctgctctctacattgctgggcacctgtaggtgtccctcgagagctcagttttgaggttcaagtcagtgtggccatgaaggggctgcctattgggctgatgctgtgaccctggagtctgcctctcctgccagtccccctgcccggaacatgtggctgcggcttggcccgccctcgctgtccctgagccccaagcccacggttggcaggagcctgtgcctcaccctgtggttcctcagtttggcgctgagggccagtacccaggccccagcacccacagtcaacactcactttgggaagctaaggggtgcccgagtaccactgcccagtgagatcctggggcctgtggaccaatacctgggggtgccctacgcagctcccccgatcggcgagaaacgtttcctgccccctgaaccacccccatcctggtcgggcatccggaacgccacacactttcccccagtgtgcccccagaacatccacacagctgtgcccgaagtcatgctgccggtctggttcactgccaacttggatatcgtcgctacttacatccaggagcccaacgaagactgtctctacctgaacgtctatgtgccgacggaggatgtaaagcggatttccaaggaatgcgcccgaaagcccaacaagaaaatttgtaggaaaggaggatccggcgctaagaaacagggcgaggacttagcggataatgacggggatgaagatgaagacatccgggacagtggtgctaaacccgtcatggtctacatccacggaggctcttacatggaagggacaggcaacatgattgatggcagcatcctcgccagttatggcaatgtcatcgtcatcaccctcaactatcgggttggagtgctaggtttcctgagtactggagatcaggctgccaagggcaactatgggctccttgaccagatccaggccctccgctgggtgagcgagaatattgccttcttcgggggagacccccgccggatcactgtctttggctcgggcattggtgcatcctgcgtcagcctcctcacgttgtcacatcactcagagggacttttccagagagccatcatccaaagtggctctgctctgtccagctgggctgtgaactaccaaccagtgaagtacaccagcctgctggcagacaaagtgggctgtaatgtgctggacaccgtggatatggtggactgtcttcggcaaaagagtgccaaggagctggtagagcaggacatccagccagcccgctaccacgtggcctttggccctgtgattgatggtgatgtcattcctgatgaccctgagatcctcatggagcagggcgagttcctcaactatgacatcatgctaggtgtcaaccagggcgagggtctcaagtttgtggaaggggtggtggaccctgaggatggtgtctctggcactgactttgactattccgtctccaattttgtggacaatctgtatggctatcctgagggtaaggacaccctgcgagagaccatcaagttcatgtatacagactgggcagaccgtgacaaccctgagacccgccgtaaaacactggtggcactcttcactgaccaccagtgggtggagccctcagtggtgacagccgatctgcatgcccgctacggctcgcctacctacttctacgccttctatcatcactgccagagcctcatgaagcctgcttggtcagatgcagctcatggggatgaagtaccctatgtttttggggttcctatggtaggccccactgaccttttcccctgcaacttctccaagaatgatgttatgctcagtgctgtcgtcatgacctattggaccaactttgccaagactggggatcccaacaagccggtcccccaggacaccaagttcattcacaccaaggccaaccgctttgaggaagtggcctggtccaaatacaatccccgagaccagctctaccttcacatcgggctgaaaccaagggtccgagatcattaccgggccactaaggtggccttttggaaacatctggtgccccacctatacaacctgcatgacatgttccactatacgtccaccaccaccaaagtgccgcctccggataccacccacagctcccacatcacccgcaggcccaatggcaagacctggagcaccaagcggccagccatctcacctgcctacagcaacgagaatgcccaggggtcctggaacggggaccaggatgcagggccactcctggtggagaaccctcgtgactactccactgaattaagtgtcaccatcgccgtgggggcctccctcctgttccttaacgttctggccttcgctgccctctactaccgtaaggacaaacggcgccaggagcccctgcggcagcctagccctcagcggggagccggggccccggagttgggagctgctccagaggaggagctggcagcattacaactgggccccacccaccacgagtgtgaggccggtcccccccatgacacgctgcgcctcactgcattgcccgactacaccctgaccctgcggcgctccccggatgacatcccactcatgacccccaacaccatcactatgatccccaactccctggtagggctgcagacattgcacccctataacacctttgccgcagggttcaacagtaccgggctgccccactcacactccactacccgggtatagctccaactcagagcacagccaatctccaggctccctccctcccagatccaggaacacatgcacacacacacacacacacacgcagacacacacacacacacacatatatgtatacgcacgcacccacaccctacagcagatccacctgcacaaacatagacagatgtggacatgcacccgcatgtacaaaaacaca

SEQ ID NO: 158883 - DNA, 3913 bp, Homo sapiens
  Payload ID: 11085
  Gene Symbol: NLGN3
  Gene Name: neuroligin 3
  Uniprot ID: Q9NZ94
  ENST ID: ENST00000374051
  CDS Start-End: 323-2809
gggcacagcagccaggctgccggagagctgatctcggggattcgggtgcggagcccttggcctggaggcgatatgggtggtccgtggcccggttcagtcgcttgcagcagcccggggaacaggcctgtctggccctgagggagtcccctttctgaagctgtggtgcttggacgacctgctctctacattgctgggcacctgtaggtgtccctcgagagctcagttttgaggttcaagtcagtgtggccatgaaggggctgcctattgggctgatgctgtgaccctggagtctgcctctcctgccagtccccctgcccggaacatgtggctgcggcttggcccgccctcgctgtccctgagccccaagcccacggttggcaggagcctgtgcctcaccctgtggttcctcagtttggcgctgagggccagtacccaggccccagcacccacagtcaacactcactttgggaagctaaggggtgcccgagtaccactgcccagtgagatcctggggcctgtggaccaatacctgggggtgccctacgcagctcccccgatcggcgagaaacgtttcctgccccctgaaccacccccatcctggtcgggcatccggaacgccacacactttcccccagtgtgcccccagaacatccacacagctgtgcccgaagtcatgctgccggtctggttcactgccaacttggatatcgtcgctacttacatccaggagcccaacgaagactgtctctacctgaacgtctatgtgccgacggaggatggatccggcgctaagaaacagggcgaggacttagcggataatgacggggatgaagatgaagacatccgggacagtggtgctaaacccgtcatggtctacatccacggaggctcttacatggaagggacaggcaacatgattgatggcagcatcctcgccagttatggcaatgtcatcgtcatcaccctcaactatcgggttggagtgctaggtttcctgagtactggagatcaggctgccaagggcaactatgggctccttgaccagatccaggccctccgctgggtgagcgagaatattgccttcttcgggggagacccccgccggatcactgtctttggctcgggcattggtgcatcctgcgtcagcctcctcacgttgtcacatcactcagagggacttttccagagagccatcatccaaagtggctctgctctgtccagctgggctgtgaactaccaaccagtgaagtacaccagcctgctggcagacaaagtgggctgtaatgtgctggacaccgtggatatggtggactgtcttcggcaaaagagtgccaaggagctggtagagcaggacatccagccagcccgctaccacgtggcctttggccctgtgattgatggtgatgtcattcctgatgaccctgagatcctcatggagcagggcgagttcctcaactatgacatcatgctaggtgtcaaccagggcgagggtctcaagtttgtggaaggggtggtggaccctgaggatggtgtctctggcactgactttgactattccgtctccaattttgtggacaatctgtatggctatcctgagggtaaggacaccctgcgagagaccatcaagttcatgtatacagactgggcagaccgtgacaaccctgagacccgccgtaaaacactggtggcactcttcactgaccaccagtgggtggagccctcagtggtgacagccgatctgcatgcccgctacggctcgcctacctacttctacgccttctatcatcactgccagagcctcatgaagcctgcttggtcagatgcagctcatggggatgaagtaccctatgtttttggggttcctatggtaggccccactgaccttttcccctgcaacttctccaagaatgatgttatgctcagtgctgtcgtcatgacctattggaccaactttgccaagactggggatcccaacaagccggtcccccaggacaccaagttcattcacaccaaggccaaccgctttgaggaagtggcctggtccaaatacaatccccgagaccagctctaccttcacatcgggctgaaaccaagggtccgagatcattaccgggccactaaggtggccttttggaaacatctggtgccccacctatacaacctgcatgacatgttccactatacgtccaccaccaccaaagtgccgcctccggataccacccacagctcccacatcacccgcaggcccaatggcaagacctggagcaccaagcggccagccatctcacctgcctacagcaacgagaatgcccaggggtcctggaacggggaccaggatgcagggccactcctggtggagaaccctcgtgactactccactgaattaagtgtcaccatcgccgtgggggcctccctcctgttccttaacgttctggccttcgctgccctctactaccgtaaggacaaacggcgccaggagcccctgcggcagcctagccctcagcggggagccggggccccggagttgggagctgctccagaggaggagctggcagcattacaactgggccccacccaccacgagtgtgaggccggtcccccccatgacacgctgcgcctcactgcattgcccgactacaccctgaccctgcggcgctccccggatgacatcccactcatgacccccaacaccatcactatgatccccaactccctggtagggctgcagacattgcacccctataacacctttgccgcagggttcaacagtaccgggctgccccactcacactccactacccgggtatagctccaactcagagcacagccaatctccaggctccctccctcccagatccaggaacacatgcacacacacacacacacacacgcagacacacacacacacacacatatatgtatacgcacgcacccacaccctacagcagatccacctgcacaaacatagacagatgtggacatgcacccgcatgtacaaaaacacaaatacggaagtaaacctgaacaaaccctttaaatggggacgcagatgagtcctcggtaaaccgaggacccatgaaacagcagctgaagccagctccctgaatctgaccacagacactcctggggggcctgaaagcaacagctggacacccccttggtgctcgccttcggcctctcttggaactgcaccaccgaccaactccagacttgggagctttaaagagcaggatagctcttcctccccaggacttggtcttttttctgggtcttgttttgttgatttttcttttttaattttggaacaaatgcttttccaacccatgagtgctaagagcctctggaagggagggcttcaggcccgaaggtctctctggctctaggacccccagtgctcacacaatcagaccaaggaacaagacccccaggaaggaaacagatttaagcaagaccatggggtggaaggagaaaggggctagcactggatggagctggagggtcgtaggggagagatctccaactctctctgtgtccgtgtggagggctgcagagcctgcagggtgacctgcttccccaaaggccaacagcattggcctggccagaccaggtgaccttagatttggtgaacaacgtactatggaagccacatcactattgggcccccaggtctgatctgggttttgcctctgcccttggggaaatgctatcagaaattcgccccattttctttacagtcttttgtgtctgtcatttctctttcaaaaaggcggtgttttttgttgttgttggtttttttttttttttaaagaaaagttcttaaaacactaacggaaacccatggagtttgtcctttgtaaaaattttaaacacagtgtcttgatataaaaataaaaaatccagttagcactcccaa

SEQ ID NO: 158884 - DNA, 1862 bp, Homo sapiens
  Payload ID: 11085
  Gene Symbol: NLGN3
  Gene Name: neuroligin 3
  ENST ID: ENST00000395855
  CDS Start-End: 323-1862
gggcacagcagccaggctgccggagagctgatctcggggattcgggtgcggagcccttggcctggaggcgatatgggtggtccgtggcccggttcagtcgcttgcagcagcccggggaacaggcctgtctggccctgagggagtcccctttctgaagctgtggtgcttggacgacctgctctctacattgctgggcacctgtaggtgtccctcgagagctcagttttgaggttcaagtcagtgtggccatgaaggggctgcctattgggctgatgctgtgaccctggagtctgcctctcctgccagtccccctgcccggaacatgtggctgcggcttggcccgccctcgctgtccctgagccccaagcccacggttggcaggagcctgtgcctcaccctgtggttcctcagtttggcgctgagggccagtacccaggccccagcacccacagtcaacactcactttgggaagctaaggggtgcccgagtaccactgcccagtgagatcctggggcctgtggaccaatacctgggggtgccctacgcagctcccccgatcggcgagaaacgtttcctgccccctgaaccacccccatcctggtcgggcatccggaacgccacacactttcccccagtgtgcccccagaacatccacacagctgtgcccgaagtcatgctgccggtctggttcactgccaacttggatatcgtcgctacttacatccaggagcccaacgaagactgtctctacctgaacgtctatgtgccgacggaggatgacatccgggacagtggtgctaaacccgtcatggtctacatccacggaggctcttacatggaagggacaggcaacatgattgatggcagcatcctcgccagttatggcaatgtcatcgtcatcaccctcaactatcgggttggagtgctaggtttcctgagtactggagatcaggctgccaagggcaactatgggctccttgaccagatccaggccctccgctgggtgagcgagaatattgccttcttcgggggagacccccgccggatcactgtctttggctcgggcattggtgcatcctgcgtcagcctcctcacgttgtcacatcactcagagggacttttccagagagccatcatccaaagtggctctgctctgtccagctgggctgtgaactaccaaccagtgaagtacaccagcctgctggcagacaaagtgggctgtaatgtgctggacaccgtggatatggtggactgtcttcggcaaaagagtgccaaggagctggtagagcaggacatccagccagcccgctaccacgtggcctttggccctgtgattgatggtgatgtcattcctgatgaccctgagatcctcatggagcagggcgagttcctcaactatgacatcatgctaggtgtcaaccagggcgagggtctcaagtttgtggaaggggtggtggaccctgaggatggtgtctctggcactgactttgactattccgtctccaattttgtggacaatctgtatggctatcctgagggtaaggacaccctgcgagagaccatcaagttcatgtatacagactgggcagaccgtgacaaccctgagacccgccgtaaaacactggtggcactcttcactgaccaccagtgggtggagccctcagtggtgacagccgatctgcatgcccgctacggctcgcctacctacttctacgccttctatcatcactgccagagcctcatgaagcctgcttggtcagatgcagctcatggggatgaagtaccctatgtttttggggttcctatggtaggccccactgaccttttcccctgcaacttctccaagaatgatgttatgctca

SEQ ID NO: 158885 - DNA, 3863 bp, Homo sapiens
  Payload ID: 11085
  Gene Symbol: NLGN3
  Gene Name: neuroligin 3
  Uniprot ID: Q9NZ94
  ENST ID: ENST00000536169
  CDS Start-End: 335-2761
ccctcggtgcgcgggcacagcagccaggctgccggagagctgatctcggggattcgggtgcggagcccttggcctggaggcgatatgggtggtccgtggcccggttcagtcgcttgcagcagcccggggaacaggcctgtctggccctgagggagtcccctttctgaagctgtggtgcttggacgacctgctctctacattgctgggcacctgtaggtgtccctcgagagctcagttttgaggttcaagtcagtgtggccatgaaggggctgcctattgggctgatgctgtgaccctggagtctgcctctcctgccagtccccctgcccggaacatgtggctgcggcttggcccgccctcgctgtccctgagccccaagcccacggttggcaggagcctgtgcctcaccctgtggttcctcagtttggcgctgagggccagtacccaggccccagcacccacagtcaacactcactttgggaagctaaggggtgcccgagtaccactgcccagtgagatcctggggcctgtggaccaatacctgggggtgccctacgcagctcccccgatcggcgagaaacgtttcctgccccctgaaccacccccatcctggtcgggcatccggaacgccacacactttcccccagtgtgcccccagaacatccacacagctgtgcccgaagtcatgctgccggtctggttcactgccaacttggatatcgtcgctacttacatccaggagcccaacgaagactgtctctacctgaacgtctatgtgccgacggaggatgacatccgggacagtggtgctaaacccgtcatggtctacatccacggaggctcttacatggaagggacaggcaacatgattgatggcagcatcctcgccagttatggcaatgtcatcgtcatcaccctcaactatcgggttggagtgctaggtttcctgagtactggagatcaggctgccaagggcaactatgggctccttgaccagatccaggccctccgctgggtgagcgagaatattgccttcttcgggggagacccccgccggatcactgtctttggctcgggcattggtgcatcctgcgtcagcctcctcacgttgtcacatcactcagagggacttttccagagagccatcatccaaagtggctctgctctgtccagctgggctgtgaactaccaaccagtgaagtacaccagcctgctggcagacaaagtgggctgtaatgtgctggacaccgtggatatggtggactgtcttcggcaaaagagtgccaaggagctggtagagcaggacatccagccagcccgctaccacgtggcctttggccctgtgattgatggtgatgtcattcctgatgaccctgagatcctcatggagcagggcgagttcctcaactatgacatcatgctaggtgtcaaccagggcgagggtctcaagtttgtggaaggggtggtggaccctgaggatggtgtctctggcactgactttgactattccgtctccaattttgtggacaatctgtatggctatcctgagggtaaggacaccctgcgagagaccatcaagttcatgtatacagactgggcagaccgtgacaaccctgagacccgccgtaaaacactggtggcactcttcactgaccaccagtgggtggagccctcagtggtgacagccgatctgcatgcccgctacggctcgcctacctacttctacgccttctatcatcactgccagagcctcatgaagcctgcttggtcagatgcagctcatggggatgaagtaccctatgtttttggggttcctatggtaggccccactgaccttttcccctgcaacttctccaagaatgatgttatgctcagtgctgtcgtcatgacctattggaccaactttgccaagactggggatcccaacaagccggtcccccaggacaccaagttcattcacaccaaggccaaccgctttgaggaagtggcctggtccaaatacaatccccgagaccagctctaccttcacatcgggctgaaaccaagggtccgagatcattaccgggccactaaggtggccttttggaaacatctggtgccccacctatacaacctgcatgacatgttccactatacgtccaccaccaccaaagtgccgcctccggataccacccacagctcccacatcacccgcaggcccaatggcaagacctggagcaccaagcggccagccatctcacctgcctacagcaacgagaatgcccaggggtcctggaacggggaccaggatgcagggccactcctggtggagaaccctcgtgactactccactgaattaagtgtcaccatcgccgtgggggcctccctcctgttccttaacgttctggccttcgctgccctctactaccgtaaggacaaacggcgccaggagcccctgcggcagcctagccctcagcggggagccggggccccggagttgggagctgctccagaggaggagctggcagcattacaactgggccccacccaccacgagtgtgaggccggtcccccccatgacacgctgcgcctcactgcattgcccgactacaccctgaccctgcggcgctccccggatgacatcccactcatgacccccaacaccatcactatgatccccaactccctggtagggctgcagacattgcacccctataacacctttgccgcagggttcaacagtaccgggctgccccactcacactccactacccgggtatagctccaactcagagcacagccaatctccaggctccctccctcccagatccaggaacacatgcacacacacacacacacacacgcagacacacacacacacacacatatatgtatacgcacgcacccacaccctacagcagatccacctgcacaaacatagacagatgtggacatgcacccgcatgtacaaaaacacaaatacggaagtaaacctgaacaaaccctttaaatggggacgcagatgagtcctcggtaaaccgaggacccatgaaacagcagctgaagccagctccctgaatctgaccacagacactcctggggggcctgaaagcaacagctggacacccccttggtgctcgccttcggcctctcttggaactgcaccaccgaccaactccagacttgggagctttaaagagcaggatagctcttcctccccaggacttggtcttttttctgggtcttgttttgttgatttttcttttttaattttggaacaaatgcttttccaacccatgagtgctaagagcctctggaagggagggcttcaggcccgaaggtctctctggctctaggacccccagtgctcacacaatcagaccaaggaacaagacccccaggaaggaaacagatttaagcaagaccatggggtggaaggagaaaggggctagcactggatggagctggagggtcgtaggggagagatctccaactctctctgtgtccgtgtggagggctgcagagcctgcagggtgacctgcttccccaaaggccaacagcattggcctggccagaccaggtgaccttagatttggtgaacaacgtactatggaagccacatcactattgggcccccaggtctgatctgggttttgcctctgcccttggggaaatgctatcagaaattcgccccattttctttacagtcttttgtgtctgtcatttctctttcaaaaaggcggtgttttttgttgttgttggtttttttttttttttaaagaaaagttcttaaaacactaacggaaacccatggagtttgtcctttgtaaaaattttaaacacagtgtcttgatataaaaataaaaaatccagttagcactccc

SEQ ID NO: 158886 - DNA, 3319 bp, Homo sapiens
  Payload ID: 11085
  Gene Symbol: NLGN3
  Gene Name: neuroligin 3
  ENST ID: ENST00000612180
  CDS Start-End: 168-1223
ggtgcgcgggcacagcagccaggctgccggagagctgatctcggggattcgggtgcggagcccttggcctggaggcgatatgggtggtccgtggcccggttcagtcgcttgcagcagcccggggaacagtgtgcccccagaacatccacacagctgtgcccgaagtcatgctgccggtctggttcactgccaacttggatatcgtcgctacttacatccaggagcccaacgaagactgtctctacctgaacgtctatgtgccgacggaggatggatccggcgctaagaaacagggcgaggacttagcggataatgacggggatgaagatgaagacatccgggacagtggtgctaaacccgtcatggtctacatccacggaggctcttacatggaagggacaggcaacatgattgatggcagcatcctcgccagttatggcaatgtcatcgtcatcaccctcaactatcgggttggagtgctaggtttcctgagtactggagatcaggctgccaagggcaactatgggctccttgaccagatccaggccctccgctgggtgagcgagaatattgccttcttcgggggagacccccgccggatcactgtctttggctcgggcattggtgcatcctgcgtcagcctcctcacgttgtcacatcactcagagggacttttccagagagccatcatccaaagtggctctgctctgtccagctgggctgtgaactaccaaccagtgaagtacaccagcctgctggcagacaaagtgggctgtaatgtgctggacaccgtggatatggtggactgtcttcggcaaaagagtgccaaggagctggtagagcaggacatccagccagcccgctaccacgtggcctttggccctgtgattgatggtgatgtcattcctgatgaccctgagatcctcatggagcagggcgagttcctcaactatgacatcatgctaggtgtcaaccagggcgagggtctcaagtttgtggaaggggtggtggaccctgaggatggtgtctctggcactgactttgactattccgtctccattttgtggacaatctgtatggctatcctgagggtaaggacaccctgcgagagaccatcaagttcatgtatacagactgggcagaccgtgacaaccctgagacccgccgtaaaacactggtggcactcttcactgaccaccagtgggtggagccctcagtggtgacagccgatctgcatgcccgctacggctcgcctacctacttctacgccttctatcatcactgccagagcctcatgaagcctgcttggtcagatgcagctcatggggatgaagtaccctatgtttttggggttcctatggtaggccccactgaccttttcccctgcaacttctccaagaatgatgttatgctcagtgctgtcgtcatgacctattggaccaactttgccaagactggggatcccaacaagccggtcccccaggacaccaagttcattcacaccaaggccaaccgctttgaggaagtggcctggtccaaatacaatccccgagaccagctctaccttcacatcgggctgaaaccaagggtccgagatcattaccgggccactaaggtggccttttggaaacatctggtgccccacctatacaacctgcatgacatgttccactatacgtccaccaccaccaaagtgccgcctccggataccacccacagctcccacatcacccgcaggcccaatggcaagacctggagcaccaagcggccagccatctcacctgcctacagcaacgagaatgcccaggggtcctggaacggggaccaggatgcagggccactcctggtggagaaccctcgtgactactccactgaattaagtgtcaccatcgccgtgggggcctccctcctgttccttaacgttctggccttcgctgccctctactaccgtaaggacaaacggcgccaggagcccctgcggcagcctagccctcagcggggagccggggccccggagttgggagctgctccagaggaggagctggcagcattacaactgggccccacccaccacgagtgtgaggccggtcccccccatgacacgctgcgcctcactgcattgcccgactacaccctgaccctgcggcgctccccggatgacatcccactcatgacccccaacaccatcactatgatccccaactccctggtagggctgcagacattgcacccctataacacctttgccgcagggttcaacagtaccgggctgccccactcacactccactacccgggtatagctccaactcagagcacagccaatctccaggctccctccctcccagatccaggaacacatgcacacacacacacacacacacgcagacacacacacacacacacatatatgtatacgcacgcacccacaccctacagcagatccacctgcacaaacatagacagatgtggacatgcacccgcatgtacaaaaacacaaatacggaagtaaacctgaacaaaccctttaaatggggacgcagatgagtcctcggtaaaccgaggacccatgaaacagcagctgaagccagctccctgaatctgaccacagacactcctggggggcctgaaagcaacagctggacacccccttggtgctcgccttcggcctctcttggaactgcaccaccgaccaactccagacttgggagctttaaagagcaggatagctcttcctccccaggacttggtcttttttctgggtcttgttttgttgatttttcttttttaattttggaacaaatgcttttccaacccatgagtgctaagagcctctggaagggagggcttcaggcccgaaggtctctctggctctaggacccccagtgctcacacaatcagaccaaggaacaagacccccaggaaggaaacagatttaagcaagaccatggggtggaaggagaaaggggctagcactggatggagctggagggtcgtaggggagagatctccaactctctctgtgtccgtgtggagggctgcagagcctgcagggtgacctgcttccccaaaggccaacagcattggcctggccagaccaggtgaccttagatttggtgaacaacgtactatggaagccacatcactattgggcccccaggtctgatctgggttttgcctctgcccttggggaaatgctatcagaaattcgccccattttctttacagtcttttgtgtctgtcatttctctttcaaaaaggcggtgttttttgttgttgttggtttttttttttttttaaagaaaagttcttaaaacact

SEQ ID NO: 158887 - DNA, 5454 bp, Homo sapiens
  Payload ID: 11086
  Gene Symbol: NLGN4X
  Gene Name: neuroligin 4, X-linked
  Uniprot ID: Q8N0W4
  ENST ID: ENST00000275857
  CDS Start-End: 465-2915
atttaagcgattttttttccctccttcatctccgggcctcggataagatgacggcttgggtgatgcacgaaataacgcacgtgattgattagacctggcttggcttggctagggaacgatccaggcgcgctggagaccccgcgtgaagatgaaatgacggctgccttggagttttcataagaaattgtccctggaggtgttggatgatcacagcttccttggagcattgcagttgctggaatccagtttcaggattaagggagggctgcctccttgcaatgggctgccaagaaaacggctgtgcttgttcttaacctcaggctctgtctgtgatcagtctgagagtctctcccaggtctactgctccctggaaagccctatctctctgcaggctcgcctctgggctttgtctccttggagccacatcactgggacagctgtggatgtggatgcagatttgaaccatgtcacggccccagggactgctatggcttcctttgttgttcaccccggtctgcgtcatgttaaactccaatgtcctcctgtggttaactgctcttgccatcaagttcaccctcattgacagccaagcacagtatccagttgtcaacacaaattatggcaaaatccggggcctaagaacaccgttacccaatgagatcttgggtccagtggagcagtacttaggggtcccctatgcctcaccccccactggagagaggcggtttcagcccccagaacccccgtcctcctggactggcatccgaaatactactcagtttgctgctgtgtgcccccagcacctggatgagagatccttactgcatgacatgctgcccatctggtttaccgccaatttggatactttgatgacctatgttcaagatcaaaatgaagactgcctttacttaaacatctacgtgcccacggaagatgatattcatgatcagaacagtaagaagcccgtcatggtctatatccatgggggatcttacatggagggcaccggcaacatgattgacggcagcattttggcaagctacggaaacgtcatcgtgatcaccattaactaccgtctgggaatactagggtttttaagtaccggtgaccaggcagcaaaaggcaactatgggctcctggatcagattcaagcactgcggtggattgaggagaatgtgggagcctttggcggggaccccaagagagtgaccatctttggctcgggggctggggcctcctgtgtcagcctgttgaccctgtcccactactcagaaggtctcttccagaaggccatcattcagagcggcaccgccctgtccagctgggcagtgaactaccagccggccaagtacactcggatattggcagacaaggtcggctgcaacatgctggacaccacggacatggtagaatgcctgcggaacaagaactacaaggagctcatccagcagaccatcaccccggccacctaccacatagccttcgggccggtgatcgacggcgacgtcatcccagacgacccccagatcctgatggagcaaggcgagttcctcaactacgacatcatgctgggcgtcaaccaaggggaaggcctgaagttcgtggacggcatcgtggataacgaggacggtgtgacgcccaacgactttgacttctccgtgtccaacttcgtggacaacctttacggctaccctgaagggaaagacactttgcgggagactatcaagttcatgtacacagactgggccgataaggaaaacccggagacgcggcggaaaaccctggtggctctctttactgaccaccagtgggtggcccccgccgtggccaccgccgacctgcacgcgcagtacggctcccccacctacttctatgccttctatcatcactgccaaagcgaaatgaagcccagctgggcagattcggcccatggtgatgaggtcccctatgtcttcggcatccccatgatcggtcccaccgagctcttcagttgtaacttttccaagaacgacgtcatgctcagcgccgtggtcatgacctactggacgaacttcgccaaaactggtgatccaaatcaaccagttcctcaggataccaagttcattcacacaaaacccaaccgctttgaagaagtggcctggtccaagtataatcccaaagaccagctctatctgcatattggcttgaaacccagagtgagagatcactaccgggcaacgaaagtggctttctggttggaactcgttcctcatttgcacaacttgaacgagatattccagtatgtttcaacaaccacaaaggttcctccaccagacatgacatcatttccctatggcacccggcgatctcccgccaagatatggccaaccaccaaacgcccagcaatcactcctgccaacaatcccaaacactctaaggaccctcacaaaacagggcctgaggacacaactgtcctcattgaaaccaaacgagattattccaccgaattaagtgtcaccattgccgtcggggcgtcgctcctcttcctcaacatcttagcttttgcggcgctgtactacaaaaaggacaagaggcgccatgagactcacaggcgccccagtccccagagaaacaccacaaatgatatcgctcacatccagaacgaagagatcatgtctctgcagatgaagcagctggaacacgatcacgagtgtgagtcgctgcaggcacacgacacactgaggctcacctgcccgccagactacaccctcacgctgcgccggtcgccagatgacatcccacttatgacgccaaacaccatcaccatgattccaaacacactgacggggatgcagcctttgcacacttttaacaccttcagtggaggacaaaacagtacaaatttaccccacggacattccaccactagagtatagctttgccctatttcccttcctatccctctgccctacccgctcagcaacatagaagagggaaggaaagagagaaggaaagagagagagaaagaaagtctccagaccaggaatgtttttgtcccactgacttaagacaaaaatgcaaaaaggcagtcatcccatcccggcagacccttatcgttggtgttttccagtattacaagatcaacttctgaccctgtgaaatgtgagaagtacacatttctgttaaaataactgctttaagatctctaccactccaatcgatgtttagtgtgataggacatcaccatttcaaggccccgggtgtttccaacgtcatggaagcagctgacacttctgaaactcagccaaggacacttgatattttttaattacaatggaagtttaaacatttctttctgtgccacacaatggatggctctccttaagtgaagaaagagtcaatgagattttgcccagcacatggagctgtaatccagagagaaggaaacgtagaaatttattattaaaagaatggactgtgcagcgaaatctgtacggttctgtgcaaagaggtgttttgccagcctgaactatatttaagagactttgtaaaaaagaaaaatgtatatagctgtgagtttaaacaaaaaccacaaacagacaaacaagaaaaaaagcttttattggtgttttcactttgaaagagcttttagcaaggttgtgcttttcattgtgctctgtacgtatataaatatatatatatatacacacacacacacacattagtcatatcacctctgtttcctccccaacaaaagaggcttttcttcttaattacttgtggtaaacaaagacatgggattttcttacatgagattctcatttgtaggaggatgtgatgtcccacagaagacccagacggtctgtgtggcctatttcccccgtcaggttgcacaggtgcatgcaagagcattcttaggagaccactgttttgaaaaacttttgacttgtacgtgttagccttcatgaaattgcagtacagagatgggtccccaaagtggagtgtatttacagcttgttaaattagagacatgcacacacaaagaatcagtagggagaaacaaaaatacaagtcccgttctgtagctctggccctttgaatatgtttaggaagagttgcttcccatttcagggccctgccaaaaaaagaagaaagcttgcctttggtggggctatgccccttggagtaaatacggctctgtgttccctagcagctgcgggagggtttggccgatgaagtacctgctcagcttagctaatcagattgaaggaagacatgtgtctttcctttttgtttaagcactcggtcccttatttatcagtaagcaggtttttaaaaatcttttatatcatttatgggatcaaacatatgattgtctgaaaacatcactttttgtggatttgtgtatccggtcaccaaacggtgaatattatagaagaatgggggaagaaaggatagaatattaaaactgctttgcatgggttttctgggaaattaggataacttcactgagaagacattgaatggaaattattcacccattttaaattggtgacctagggatcagagatttgtctttccaacagcttgtcattttttcatttctcttctcatttttcaggaaagttttgagtgttataaggtggaaggaaacatagtagcaatggatacttttttgaaaaattattgcattaccaagaaacagtagccaaagatatttgaagatcatgttcctcggctccattgtgggttattctagaaatccagtcttaaatctctccgctaaagtggacattccccataaaaattgtccagctgcctggctcttttgcaataacaacctttgattactgaatccctacactcaaactatagtgatatatcagtgtttgagagtgacctctagaaaaaagaaaagtgtttttagaaatgcgtacaagtcacccccaaatcctattgcttatcttgggttaaatttgagagtgattctctgtatataaatatgtgaaatattattatctcaacttagcacacgtgaagcaacatttctttcctacagagaggtgtcatggtaagatttcattccgaattcattgtttcatagagctatgatcaggccatttctgcaagcaatgtatgaccccacctgagcaaccacaaataggctctctgtgaaactacaaaggaagttatgtgtggcatccatgttggtttcgtctgtctgtaatgtgaattccagtatttgtttagtatttccagttgtctcctgctagcaatatgtacagtaacgcgtcaggcttgtgacatttgaataaggaaaaacagagttcctgttaagtgaataactttagcttttacaggggattatgatcaaaagtgattttagtacatcttaaatgatatcttatttctacatggaaagaagttatagaatcttcatagagttctatgagaaaaaatatacttgctatctat

SEQ ID NO: 158888 - DNA, 3750 bp, Homo sapiens
  Payload ID: 11086
  Gene Symbol: NLGN4X
  Gene Name: neuroligin 4, X-linked
  Uniprot ID: Q8N0W4
  ENST ID: ENST00000381092
  CDS Start-End: 688-3138
gtttcgggttccctagaaaaatctggacgtgtaaaaagaactcttaacggccgatgcagctcttccaaagctaagggaccattcccctccaaaatcctacaaggtgggtccatgacatctgctagagaaaaagagggacatgttggagcgataggattcccatgggcactgacatactggcctctggggataggaagattaatgcttagtacaagaaagaaggaaaagaaggccttggcgaggactgttttatctcagcatttctcagaagctccttcagtggagacttcgcctgggaccttcgccccaccttcttctaatggcacttcctccctgtggggctccacgcgggacattacgtcggtgatgcgtagggcatcgggctgccttggagttttcataagaaattgtccctggaggtgttggatgatcacagcttccttggagcattgcagttgctggaatccagtttcaggattaagggagggctgcctccttgcaatgggctgccaagaaaacggctgtgcttgttcttaacctcaggctctgtctgtgatcagtctgagagtctctcccaggtctactgctccctggaaagccctatctctctgcaggctcgcctctgggctttgtctccttggagccacatcactgggacagctgtggatgtggatgcagatttgaaccatgtcacggccccagggactgctatggcttcctttgttgttcaccccggtctgcgtcatgttaaactccaatgtcctcctgtggttaactgctcttgccatcaagttcaccctcattgacagccaagcacagtatccagttgtcaacacaaattatggcaaaatccggggcctaagaacaccgttacccaatgagatcttgggtccagtggagcagtacttaggggtcccctatgcctcaccccccactggagagaggcggtttcagcccccagaacccccgtcctcctggactggcatccgaaatactactcagtttgctgctgtgtgcccccagcacctggatgagagatccttactgcatgacatgctgcccatctggtttaccgccaatttggatactttgatgacctatgttcaagatcaaaatgaagactgcctttacttaaacatctacgtgcccacggaagatgatattcatgatcagaacagtaagaagcccgtcatggtctatatccatgggggatcttacatggagggcaccggcaacatgattgacggcagcattttggcaagctacggaaacgtcatcgtgatcaccattaactaccgtctgggaatactagggtttttaagtaccggtgaccaggcagcaaaaggcaactatgggctcctggatcagattcaagcactgcggtggattgaggagaatgtgggagcctttggcggggaccccaagagagtgaccatctttggctcgggggctggggcctcctgtgtcagcctgttgaccctgtcccactactcagaaggtctcttccagaaggccatcattcagagcggcaccgccctgtccagctgggcagtgaactaccagccggccaagtacactcggatattggcagacaaggtcggctgcaacatgctggacaccacggacatggtagaatgcctgcggaacaagaactacaaggagctcatccagcagaccatcaccccggccacctaccacatagccttcgggccggtgatcgacggcgacgtcatcccagacgacccccagatcctgatggagcaaggcgagttcctcaactacgacatcatgctgggcgtcaaccaaggggaaggcctgaagttcgtggacggcatcgtggataacgaggacggtgtgacgcccaacgactttgacttctccgtgtccaacttcgtggacaacctttacggctaccctgaagggaaagacactttgcgggagactatcaagttcatgtacacagactgggccgataaggaaaacccggagacgcggcggaaaaccctggtggctctctttactgaccaccagtgggtggcccccgccgtggccaccgccgacctgcacgcgcagtacggctcccccacctacttctatgccttctatcatcactgccaaagcgaaatgaagcccagctgggcagattcggcccatggtgatgaggtcccctatgtcttcggcatccccatgatcggtcccaccgagctcttcagttgtaacttttccaagaacgacgtcatgctcagcgccgtggtcatgacctactggacgaacttcgccaaaactggtgatccaaatcaaccagttcctcaggataccaagttcattcacacaaaacccaaccgctttgaagaagtggcctggtccaagtataatcccaaagaccagctctatctgcatattggcttgaaacccagagtgagagatcactaccgggcaacgaaagtggctttctggttggaactcgttcctcatttgcacaacttgaacgagatattccagtatgtttcaacaaccacaaaggttcctccaccagacatgacatcatttccctatggcacccggcgatctcccgccaagatatggccaaccaccaaacgcccagcaatcactcctgccaacaatcccaaacactctaaggaccctcacaaaacagggcctgaggacacaactgtcctcattgaaaccaaacgagattattccaccgaattaagtgtcaccattgccgtcggggcgtcgctcctcttcctcaacatcttagcttttgcggcgctgtactacaaaaaggacaagaggcgccatgagactcacaggcgccccagtccccagagaaacaccacaaatgatatcgctcacatccagaacgaagagatcatgtctctgcagatgaagcagctggaacacgatcacgagtgtgagtcgctgcaggcacacgacacactgaggctcacctgcccgccagactacaccctcacgctgcgccggtcgccagatgacatcccacttatgacgccaaacaccatcaccatgattccaaacacactgacggggatgcagcctttgcacacttttaacaccttcagtggaggacaaaacagtacaaatttaccccacggacattccaccactagagtatagctttgccctatttcccttcctatccctctgccctacccgctcagcaacatagaagagggaaggaaagagagaaggaaagagagagagaaagaaagtctccagaccaggaatgtttttgtcccactgacttaagacaaaaatgcaaaaaggcagtcatcccatcccggcagacccttatcgttggtgttttccagtattacaagatcaacttctgaccctgtgaaatgtgagaagtacacatttctgttaaaataactgctttaagatctctaccactccaatcgatgtttagtgtgataggacatcaccatttcaaggccccgggtgtttccaacgtcatggaagcagctgacacttctgaaactcagccaaggacacttgatattttttaattacaatggaagtttaaacatttctttctgtgccacacaatggatggctctccttaagtgaagaaagagtcaatgagattttgcccagcacatggagctgtaatccagagagaaggaaacgtagaaatttattattaaaagaatggactgtgcagcgaaatctgtacggttctgtgcaaagaggtgttttgccagcctgaactatatttaagagactttg

SEQ ID NO: 158889 - DNA, 5865 bp, Homo sapiens
  Payload ID: 11086
  Gene Symbol: NLGN4X
  Gene Name: neuroligin 4, X-linked
  Uniprot ID: Q8N0W4
  ENST ID: ENST00000381093
  CDS Start-End: 630-3080
cttccatcccatcccaagcctctctgctgtcccgggccgatttcatctcgtctcttcccccgcctccccgcttccccgcctcccaattcccgcgcggctcggctcagccccttcccactccagtgggcagaactgatggagaagatccgccaagcgcgcagccggcggcggaggagacagtgcggggtgggcgaggggcttcgagaccacgcagagagagagtgaacttcagtcctgacccctccccaaggccgcggctggggcgcccacagcccgcgctggcacccgcgtggcctgacctgcggaagcgcgagcggggatgaggctgccttggagttttcataagaaattgtccctggaggtgttggatgatcacagcttccttggagcattgcagttgctggaatccagtttcaggattaagggagggctgcctccttgcaatgggctgccaagaaaacggctgtgcttgttcttaacctcaggctctgtctgtgatcagtctgagagtctctcccaggtctactgctccctggaaagccctatctctctgcaggctcgcctctgggctttgtctccttggagccacatcactgggacagctgtggatgtggatgcagatttgaaccatgtcacggccccagggactgctatggcttcctttgttgttcaccccggtctgcgtcatgttaaactccaatgtcctcctgtggttaactgctcttgccatcaagttcaccctcattgacagccaagcacagtatccagttgtcaacacaaattatggcaaaatccggggcctaagaacaccgttacccaatgagatcttgggtccagtggagcagtacttaggggtcccctatgcctcaccccccactggagagaggcggtttcagcccccagaacccccgtcctcctggactggcatccgaaatactactcagtttgctgctgtgtgcccccagcacctggatgagagatccttactgcatgacatgctgcccatctggtttaccgccaatttggatactttgatgacctatgttcaagatcaaaatgaagactgcctttacttaaacatctacgtgcccacggaagatgatattcatgatcagaacagtaagaagcccgtcatggtctatatccatgggggatcttacatggagggcaccggcaacatgattgacggcagcattttggcaagctacggaaacgtcatcgtgatcaccattaactaccgtctgggaatactagggtttttaagtaccggtgaccaggcagcaaaaggcaactatgggctcctggatcagattcaagcactgcggtggattgaggagaatgtgggagcctttggcggggaccccaagagagtgaccatctttggctcgggggctggggcctcctgtgtcagcctgttgaccctgtcccactactcagaaggtctcttccagaaggccatcattcagagcggcaccgccctgtccagctgggcagtgaactaccagccggccaagtacactcggatattggcagacaaggtcggctgcaacatgctggacaccacggacatggtagaatgcctgcggaacaagaactacaaggagctcatccagcagaccatcaccccggccacctaccacatagccttcgggccggtgatcgacggcgacgtcatcccagacgacccccagatcctgatggagcaaggcgagttcctcaactacgacatcatgctgggcgtcaaccaaggggaaggcctgaagttcgtggacggcatcgtggataacgaggacggtgtgacgcccaacgactttgacttctccgtgtccaacttcgtggacaacctttacggctaccctgaagggaaagacactttgcgggagactatcaagttcatgtacacagactgggccgataaggaaaacccggagacgcggcggaaaaccctggtggctctctttactgaccaccagtgggtggcccccgccgtggccaccgccgacctgcacgcgcagtacggctcccccacctacttctatgccttctatcatcactgccaaagcgaaatgaagcccagctgggcagattcggcccatggtgatgaggtcccctatgtcttcggcatccccatgatcggtcccaccgagctcttcagttgtaacttttccaagaacgacgtcatgctcagcgccgtggtcatgacctactggacgaacttcgccaaaactggtgatccaaatcaaccagttcctcaggataccaagttcattcacacaaaacccaaccgctttgaagaagtggcctggtccaagtataatcccaaagaccagctctatctgcatattggcttgaaacccagagtgagagatcactaccgggcaacgaaagtggctttctggttggaactcgttcctcatttgcacaacttgaacgagatattccagtatgtttcaacaaccacaaaggttcctccaccagacatgacatcatttccctatggcacccggcgatctcccgccaagatatggccaaccaccaaacgcccagcaatcactcctgccaacaatcccaaacactctaaggaccctcacaaaacagggcctgaggacacaactgtcctcattgaaaccaaacgagattattccaccgaattaagtgtcaccattgccgtcggggcgtcgctcctcttcctcaacatcttagcttttgcggcgctgtactacaaaaaggacaagaggcgccatgagactcacaggcgccccagtccccagagaaacaccacaaatgatatcgctcacatccagaacgaagagatcatgtctctgcagatgaagcagctggaacacgatcacgagtgtgagtcgctgcaggcacacgacacactgaggctcacctgcccgccagactacaccctcacgctgcgccggtcgccagatgacatcccacttatgacgccaaacaccatcaccatgattccaaacacactgacggggatgcagcctttgcacacttttaacaccttcagtggaggacaaaacagtacaaatttaccccacggacattccaccactagagtatagctttgccctatttcccttcctatccctctgccctacccgctcagcaacatagaagagggaaggaaagagagaaggaaagagagagagaaagaaagtctccagaccaggaatgtttttgtcccactgacttaagacaaaaatgcaaaaaggcagtcatcccatcccggcagacccttatcgttggtgttttccagtattacaagatcaacttctgaccctgtgaaatgtgagaagtacacatttctgttaaaataactgctttaagatctctaccactccaatcgatgtttagtgtgataggacatcaccatttcaaggccccgggtgtttccaacgtcatggaagcagctgacacttctgaaactcagccaaggacacttgatattttttaattacaatggaagtttaaacatttctttctgtgccacacaatggatggctctccttaagtgaagaaagagtcaatgagattttgcccagcacatggagctgtaatccagagagaaggaaacgtagaaatttattattaaaagaatggactgtgcagcgaaatctgtacggttctgtgcaaagaggtgttttgccagcctgaactatatttaagagactttgtaaaaaagaaaaatgtatatagctgtgagtttaaacaaaaaccacaaacagacaaacaagaaaaaaagcttttattggtgttttcactttgaaagagcttttagcaaggttgtgcttttcattgtgctctgtacgtatataaatatatatatatatacacacacacacacacattagtcatatcacctctgtttcctccccaacaaaagaggcttttcttcttaattacttgtggtaaacaaagacatgggattttcttacatgagattctcatttgtaggaggatgtgatgtcccacagaagacccagacggtctgtgtggcctatttcccccgtcaggttgcacaggtgcatgcaagagcattcttaggagaccactgttttgaaaaacttttgacttgtacgtgttagccttcatgaaattgcagtacagagatgggtccccaaagtggagtgtatttacagcttgttaaattagagacatgcacacacaaagaatcagtagggagaaacaaaaatacaagtcccgttctgtagctctggccctttgaatatgtttaggaagagttgcttcccatttcagggccctgccaaaaaaagaagaaagcttgcctttggtggggctatgccccttggagtaaatacggctctgtgttccctagcagctgcgggagggtttggccgatgaagtacctgctcagcttagctaatcagattgaaggaagacatgtgtctttcctttttgtttaagcactcggtcccttatttatcagtaagcaggtttttaaaaatcttttatatcatttatgggatcaaacatatgattgtctgaaaacatcactttttgtggatttgtgtatccggtcaccaaacggtgaatattatagaagaatgggggaagaaaggatagaatattaaaactgctttgcatgggttttctgggaaattaggataacttcactgagaagacattgaatggaaattattcacccattttaaattggtgacctagggatcagagatttgtctttccaacagcttgtcattttttcatttctcttctcatttttcaggaaagttttgagtgttataaggtggaaggaaacatagtagcaatggatacttttttgaaaaattattgcattaccaagaaacagtagccaaagatatttgaagatcatgttcctcggctccattgtgggttattctagaaatccagtcttaaatctctccgctaaagtggacattccccataaaaattgtccagctgcctggctcttttgcaataacaacctttgattactgaatccctacactcaaactatagtgatatatcagtgtttgagagtgacctctagaaaaaagaaaagtgtttttagaaatgcgtacaagtcacccccaaatcctattgcttatcttgggttaaatttgagagtgattctctgtatataaatatgtgaaatattattatctcaacttagcacacgtgaagcaacatttctttcctacagagaggtgtcatggtaagatttcattccgaattcattgtttcatagagctatgatcaggccatttctgcaagcaatgtatgaccccacctgagcaaccacaaataggctctctgtgaaactacaaaggaagttatgtgtggcatccatgttggtttcgtctgtctgtaatgtgaattccagtatttgtttagtatttccagttgtctcctgctagcaatatgtacagtaacgcgtcaggcttgtgacatttgaataaggaaaaacagagttcctgttaagtgaataactttagcttttacaggggattatgatcaaaagtgattttagtacatcttaaatgatatcttatttctacatggaaagaagttatagaatcttcatagagttctatgagaaaaaatatacttgctatctataaaaaagagaaaaaagaaaaaaaatgagaaaaaagtaagaaaaaaaaaaatcctgtcctaggcttttactcttgatcttcaaaggcacgcagggtttaatggttccttgggttattattttgcagttttgttttttattttgccttaagtaatgatagaagatatatatggccggacacatatgtataaacttttcagcagcatttttaataataaaatatcacagtattttctaatgctttgtgc

SEQ ID NO: 158890 - DNA, 5870 bp, Homo sapiens
  Payload ID: 11086
  Gene Symbol: NLGN4X
  Gene Name: neuroligin 4, X-linked
  Uniprot ID: Q8N0W4
  ENST ID: ENST00000381095
  CDS Start-End: 629-3079
aaccgtctctctcccttctctgtctcttagcacagagctcttattcagccactagcttggcccttcctgcttcaattgtaatgcttgttctgcccgtccacagactattggcggcagaaacaacgaatttcctccaaactaggcggtgttggtggctcttgcattcctctggatgaggaaatctagttggggggttccagaaggggaaggctcctgggctttcaatacatcctcctgaatcatacctcgtttcgggttccctagaaaaatctggacgtgtaaaaagaactcttaacggccgatgcagctcttccaaagctaaggctgccttggagttttcataagaaattgtccctggaggtgttggatgatcacagcttccttggagcattgcagttgctggaatccagtttcaggattaagggagggctgcctccttgcaatgggctgccaagaaaacggctgtgcttgttcttaacctcaggctctgtctgtgatcagtctgagagtctctcccaggtctactgctccctggaaagccctatctctctgcaggctcgcctctgggctttgtctccttggagccacatcactgggacagctgtggatgtggatgcagatttgaaccatgtcacggccccagggactgctatggcttcctttgttgttcaccccggtctgcgtcatgttaaactccaatgtcctcctgtggttaactgctcttgccatcaagttcaccctcattgacagccaagcacagtatccagttgtcaacacaaattatggcaaaatccggggcctaagaacaccgttacccaatgagatcttgggtccagtggagcagtacttaggggtcccctatgcctcaccccccactggagagaggcggtttcagcccccagaacccccgtcctcctggactggcatccgaaatactactcagtttgctgctgtgtgcccccagcacctggatgagagatccttactgcatgacatgctgcccatctggtttaccgccaatttggatactttgatgacctatgttcaagatcaaaatgaagactgcctttacttaaacatctacgtgcccacggaagatgatattcatgatcagaacagtaagaagcccgtcatggtctatatccatgggggatcttacatggagggcaccggcaacatgattgacggcagcattttggcaagctacggaaacgtcatcgtgatcaccattaactaccgtctgggaatactagggtttttaagtaccggtgaccaggcagcaaaaggcaactatgggctcctggatcagattcaagcactgcggtggattgaggagaatgtgggagcctttggcggggaccccaagagagtgaccatctttggctcgggggctggggcctcctgtgtcagcctgttgaccctgtcccactactcagaaggtctcttccagaaggccatcattcagagcggcaccgccctgtccagctgggcagtgaactaccagccggccaagtacactcggatattggcagacaaggtcggctgcaacatgctggacaccacggacatggtagaatgcctgcggaacaagaactacaaggagctcatccagcagaccatcaccccggccacctaccacatagccttcgggccggtgatcgacggcgacgtcatcccagacgacccccagatcctgatggagcaaggcgagttcctcaactacgacatcatgctgggcgtcaaccaaggggaaggcctgaagttcgtggacggcatcgtggataacgaggacggtgtgacgcccaacgactttgacttctccgtgtccaacttcgtggacaacctttacggctaccctgaagggaaagacactttgcgggagactatcaagttcatgtacacagactgggccgataaggaaaacccggagacgcggcggaaaaccctggtggctctctttactgaccaccagtgggtggcccccgccgtggccaccgccgacctgcacgcgcagtacggctcccccacctacttctatgccttctatcatcactgccaaagcgaaatgaagcccagctgggcagattcggcccatggtgatgaggtcccctatgtcttcggcatccccatgatcggtcccaccgagctcttcagttgtaacttttccaagaacgacgtcatgctcagcgccgtggtcatgacctactggacgaacttcgccaaaactggtgatccaaatcaaccagttcctcaggataccaagttcattcacacaaaacccaaccgctttgaagaagtggcctggtccaagtataatcccaaagaccagctctatctgcatattggcttgaaacccagagtgagagatcactaccgggcaacgaaagtggctttctggttggaactcgttcctcatttgcacaacttgaacgagatattccagtatgtttcaacaaccacaaaggttcctccaccagacatgacatcatttccctatggcacccggcgatctcccgccaagatatggccaaccaccaaacgcccagcaatcactcctgccaacaatcccaaacactctaaggaccctcacaaaacagggcctgaggacacaactgtcctcattgaaaccaaacgagattattccaccgaattaagtgtcaccattgccgtcggggcgtcgctcctcttcctcaacatcttagcttttgcggcgctgtactacaaaaaggacaagaggcgccatgagactcacaggcgccccagtccccagagaaacaccacaaatgatatcgctcacatccagaacgaagagatcatgtctctgcagatgaagcagctggaacacgatcacgagtgtgagtcgctgcaggcacacgacacactgaggctcacctgcccgccagactacaccctcacgctgcgccggtcgccagatgacatcccacttatgacgccaaacaccatcaccatgattccaaacacactgacggggatgcagcctttgcacacttttaacaccttcagtggaggacaaaacagtacaaatttaccccacggacattccaccactagagtatagctttgccctatttcccttcctatccctctgccctacccgctcagcaacatagaagagggaaggaaagagagaaggaaagagagagagaaagaaagtctccagaccaggaatgtttttgtcccactgacttaagacaaaaatgcaaaaaggcagtcatcccatcccggcagacccttatcgttggtgttttccagtattacaagatcaacttctgaccctgtgaaatgtgagaagtacacatttctgttaaaataactgctttaagatctctaccactccaatcgatgtttagtgtgataggacatcaccatttcaaggccccgggtgtttccaacgtcatggaagcagctgacacttctgaaactcagccaaggacacttgatattttttaattacaatggaagtttaaacatttctttctgtgccacacaatggatggctctccttaagtgaagaaagagtcaatgagattttgcccagcacatggagctgtaatccagagagaaggaaacgtagaaatttattattaaaagaatggactgtgcagcgaaatctgtacggttctgtgcaaagaggtgttttgccagcctgaactatatttaagagactttgtaaaaaagaaaaatgtatatagctgtgagtttaaacaaaaaccacaaacagacaaacaagaaaaaaagcttttattggtgttttcactttgaaagagcttttagcaaggttgtgcttttcattgtgctctgtacgtatataaatatatatatatatacacacacacacacacattagtcatatcacctctgtttcctccccaacaaaagaggcttttcttcttaattacttgtggtaaacaaagacatgggattttcttacatgagattctcatttgtaggaggatgtgatgtcccacagaagacccagacggtctgtgtggcctatttcccccgtcaggttgcacaggtgcatgcaagagcattcttaggagaccactgttttgaaaaacttttgacttgtacgtgttagccttcatgaaattgcagtacagagatgggtccccaaagtggagtgtatttacagcttgttaaattagagacatgcacacacaaagaatcagtagggagaaacaaaaatacaagtcccgttctgtagctctggccctttgaatatgtttaggaagagttgcttcccatttcagggccctgccaaaaaaagaagaaagcttgcctttggtggggctatgccccttggagtaaatacggctctgtgttccctagcagctgcgggagggtttggccgatgaagtacctgctcagcttagctaatcagattgaaggaagacatgtgtctttcctttttgtttaagcactcggtcccttatttatcagtaagcaggtttttaaaaatcttttatatcatttatgggatcaaacatatgattgtctgaaaacatcactttttgtggatttgtgtatccggtcaccaaacggtgaatattatagaagaatgggggaagaaaggatagaatattaaaactgctttgcatgggttttctgggaaattaggataacttcactgagaagacattgaatggaaattattcacccattttaaattggtgacctagggatcagagatttgtctttccaacagcttgtcattttttcatttctcttctcatttttcaggaaagttttgagtgttataaggtggaaggaaacatagtagcaatggatacttttttgaaaaattattgcattaccaagaaacagtagccaaagatatttgaagatcatgttcctcggctccattgtgggttattctagaaatccagtcttaaatctctccgctaaagtggacattccccataaaaattgtccagctgcctggctcttttgcaataacaacctttgattactgaatccctacactcaaactatagtgatatatcagtgtttgagagtgacctctagaaaaaagaaaagtgtttttagaaatgcgtacaagtcacccccaaatcctattgcttatcttgggttaaatttgagagtgattctctgtatataaatatgtgaaatattattatctcaacttagcacacgtgaagcaacatttctttcctacagagaggtgtcatggtaagatttcattccgaattcattgtttcatagagctatgatcaggccatttctgcaagcaatgtatgaccccacctgagcaaccacaaataggctctctgtgaaactacaaaggaagttatgtgtggcatccatgttggtttcgtctgtctgtaatgtgaattccagtatttgtttagtatttccagttgtctcctgctagcaatatgtacagtaacgcgtcaggcttgtgacatttgaataaggaaaaacagagttcctgttaagtgaataactttagcttttacaggggattatgatcaaaagtgattttagtacatcttaaatgatatcttatttctacatggaaagaagttatagaatcttcatagagttctatgagaaaaaatatacttgctatctataaaaaagagaaaaaagaaaaaaaatgagaaaaaagtaagaaaaaaaaaaatcctgtcctaggcttttactcttgatcttcaaaggcacgcagggtttaatggttccttgggttattattttgcagttttgttttttattttgccttaagtaatgatagaagatatatatggccggacacatatgtataaacttttcagcagcatttttaataataaaatatcacagtattttctaatgctttgtgcaaataa

SEQ ID NO: 158891 - DNA, 3116 bp, Homo sapiens
  Payload ID: 11086
  Gene Symbol: NLGN4X
  Gene Name: neuroligin 4, X-linked
  ENST ID: ENST00000538097
  CDS Start-End: 50-2503
gccccagggactgctatggcttcctttgttgttcaccccggtctgcgtcatgttaaactccaatgtcctcctgtggttaactgctcttgccatcaagttcaccctcattgacagccaagcacagtatccagttgtcaacacaaattatggcaaaatccggggcctaagaacaccgttacccaatgagatcttgggtccagtggagcagtacttaggggtcccctatgcctcaccccccactggagagaggcggtttcagcccccagaacccccgtcctcctggactggcatccgaaatactactcagtttgctgctgtgtgcccccagcacctggatgagagatccttactgcatgacatgctgcccatctggtttaccgccaatttggatactttgatgacctatgttcaagatcaaaatgaagactgcctttacttaaacatctacgtgcccacggaagatggagccaacacaaagaaaaacgcagatgatataacgagtaatgaccgtggtgaagacgaagatattcatgatcagaacagtaagaagcccgtcatggtctatatccatgggggatcttacatggagggcaccggcaacatgattgacggcagcattttggcaagctacggaaacgtcatcgtgatcaccattaactaccgtctgggaatactagggtttttaagtaccggtgaccaggcagcaaaaggcaactatgggctcctggatcagattcaagcactgcggtggattgaggagaatgtgggagcctttggcggggaccccaagagagtgaccatctttggctcgggggctggggcctcctgtgtcagcctgttgaccctgtcccactactcagaaggtctcttccagaaggccatcattcagagcggcaccgccctgtccagctgggcagtgaactaccagccggccaagtacactcggatattggcagacaaggtcggctgcaacatgctggacaccacggacatggtagaatgcctgcggaacaagaactacaaggagctcatccagcagaccatcaccccggccacctaccacatagccttcgggccggtgatcgacggcgacgtcatcccagacgacccccagatcctgatggagcaaggcgagttcctcaactacgacatcatgctgggcgtcaaccaaggggaaggcctgaagttcgtggacggcatcgtggataacgaggacggtgtgacgcccaacgactttgacttctccgtgtccaacttcgtggacaacctttacggctaccctgaagggaaagacactttgcgggagactatcaagttcatgtacacagactgggccgataaggaaaacccggagacgcggcggaaaaccctggtggctctctttactgaccaccagtgggtggcccccgccgtggccaccgccgacctgcacgcgcagtacggctcccccacctacttctatgccttctatcatcactgccaaagcgaaatgaagcccagctgggcagattcggcccatggtgatgaggtcccctatgtcttcggcatccccatgatcggtcccaccgagctcttcagttgtaacttttccaagaacgacgtcatgctcagcgccgtggtcatgacctactggacgaacttcgccaaaactggtgatccaaatcaaccagttcctcaggataccaagttcattcacacaaaacccaaccgctttgaagaagtggcctggtccaagtataatcccaaagaccagctctatctgcatattggcttgaaacccagagtgagagatcactaccgggcaacgaaagtggctttctggttggaactcgttcctcatttgcacaacttgaacgagatattccagtatgtttcaacaaccacaaaggttcctccaccagacatgacatcatttccctatggcacccggcgatctcccgccaagatatggccaaccaccaaacgcccagcaatcactcctgccaacaatcccaaacactctaaggaccctcacaaaacagggcctgaggacacaactgtcctcattgaaaccaaacgagattattccaccgaattaagtgtcaccattgccgtcggggcgtcgctcctcttcctcaacatcttagcttttgcggcgctgtactacaaaaaggacaagaggcgccatgagactcacaggcgccccagtccccagagaaacaccacaaatgatatcgctcacatccagaacgaagagatcatgtctctgcagatgaagcagctggaacacgatcacgagtgtgagtcgctgcaggcacacgacacactgaggctcacctgcccgccagactacaccctcacgctgcgccggtcgccagatgacatcccacttatgacgccaaacaccatcaccatgattccaaacacactgacggggatgcagcctttgcacacttttaacaccttcagtggaggacaaaacagtacaaatttaccccacggacattccaccactagagtatagctttgccctatttcccttcctatccctctgccctacccgctcagcaacatagaagagggaaggaaagagagaaggaaagagagagagaaagaaagtctccagaccaggaatgtttttgtcccactgacttaagacaaaaatgcaaaaaggcagtcatcccatcccggcagacccttatcgttggtgttttccagtattacaagatcaacttctgaccctgtgaaatgtgagaagtacacatttctgttaaaataactgctttaagatctctaccactccaatcgatgtttagtgtgataggacatcaccatttcaaggccccgggtgtttccaacgtcatggaagcagctgacacttctgaaactcagccaaggacacttgatattttttaattacaatggaagtttaaacatttctttctgtgccacacaatggatggctctccttaagtgaagaaagagtcaatgagattttgcccagcacatggagctgtaatccagagagaaggaaacgtagaaatttattattaaaagaatggactgtgcagcgaaatctgtacggttctgtgcaaagaggtgttttgccagcctgaactatatttaagagactttgt

SEQ ID NO: 158892 - DNA, 882 bp, Homo sapiens
  Payload ID: 11087
  Gene Symbol: NLGN4Y
  Gene Name: neuroligin 4, Y-linked
  Uniprot ID: Q8NFZ3
  ENST ID: ENST00000297967
  CDS Start-End: 100-870
ttttcgaaagacttatctttctgcaggctcgcctctgagctttgtctccttggagccacctcacttagacagcttcggatgtggatgcagatttgaaccatgttgcgtccccagggactgctatggctccctttgttgttcacctctgtctgtgtcatgttaaactccaatgttcttctgtggataactgctcttgccatcaagttcaccctcattgacagccaagcacagtatccagttgtcaacacaaattatggtaaaatccagggcctaagaacaccattacccagtgagatcttgggtccagtggagcagtacttaggggtcccctatgcctcacccccaactggagagaggcggtttcagccaccagaatccccatcctcctggactggcatccgaaatgctactcagttttctgctgtgtgcccccagcacctggatgaaagattcttattgcatgacatgctgcccatctggtttaccaccagtttggatactttgatgacctatgttcaagatcaaaatgaagactgcctttacttaaacatctatgtgcccatggaagatggaaccaacataaagagaaatgcagacgatataaccagtaatgaccatggtgaagataaagatattcatgaacagaacagtaagaagcctgttatggtctatatccatgggggatcttacatggagggaaccggtaacatgattgatggcagcattttggccagctatgggaacgtcatcgttatcaccattaactaccgtctgggaatactaggtatgcaagaggcacgtttgtgtgggagctcaaaaatgtttaattattttaaatctcctttcactaatttaataaattttttttgagttcagatgcaa

SEQ ID NO: 158893 - DNA, 5310 bp, Homo sapiens
  Payload ID: 11087
  Gene Symbol: NLGN4Y
  Gene Name: neuroligin 4, Y-linked
  Uniprot ID: Q8NFZ3
  ENST ID: ENST00000339174
  CDS Start-End: 475-2925
gagacgaagcagggagagagtgaacttcagccccgtcccctccccactgccacggctggggcaacccaacccgcgcctgaagcggcttggcttgacctgcggaagcgcgggccgggatggcgtggggagagggaggtaggtgccactgggctgcagatgacgagtgggttgggggcttgctgtgggacaagaggttcaggttccggcctgcgccttccactccgcggtggcgctctctgcctgcggttttccaggaggccgatctaccccagggacactctcatccttcaggcggtctcctggacgccctttcctccccttgcctcccagcctgacctggctctttcgcccctcggagaaccggttgcattggagttttcgaaagacttatctttctgcaggctcgcctctgagctttgtctccttggagccacctcacttagacagcttcggatgtggatgcagatttgaaccatgttgcgtccccagggactgctatggctccctttgttgttcacctctgtctgtgtcatgttaaactccaatgttcttctgtggataactgctcttgccatcaagttcaccctcattgacagccaagcacagtatccagttgtcaacacaaattatggtaaaatccagggcctaagaacaccattacccagtgagatcttgggtccagtggagcagtacttaggggtcccctatgcctcacccccaactggagagaggcggtttcagccaccagaatccccatcctcctggactggcatccgaaatgctactcagttttctgctgtgtgcccccagcacctggatgaaagattcttattgcatgacatgctgcccatctggtttaccaccagtttggatactttgatgacctatgttcaagatcaaaatgaagactgcctttacttaaacatctatgtgcccatggaagatgatattcatgaacagaacagtaagaagcctgttatggtctatatccatgggggatcttacatggagggaaccggtaacatgattgatggcagcattttggccagctatgggaacgtcatcgttatcaccattaactaccgtctgggaatactagggtttttaagtaccggtgaccaggcagcaaaaggcaactatgggctcctggatcagattcaagcactgaggtggattgaggagaatgtcggagcctttggcggggaccccaagagagtgactatctttggctcgggggctggggcctcctgtgtcagcctgttgaccctgtcccactactcagaaggtctcttccagaaggccatcattcagagcggcactgccctgtccagctgggcagtgaactaccagccggccaagtacactcggatattggcagacaaggtcggctgcaacatgctggacaccacggacatggtagaatgtctgaagaacaagaactacaaggagctcatccagcagaccatcaccccggccacctaccacatagcctttgggccggtgatcgacggcgacgtcatcccagacgacccccagatcctgatggagcaaggcgagttcctcaactacgacatcatgctgggcgtcaaccaaggggaaggcctgaagttcgtggacggcatcgtggataacgaggacggtgtgacgcccaacgactttgacttctccgtgtccaacttcgtggacaacctttacggctaccctgaagggaaagacactttgcgggagactatcaagttcatgtacacagactgggccgataaggaaaacccggagacgcggcggaaaaccctggtggctctctttactgaccatcagtgggtggcccccgccgtggccaccgccgacctgcacgcgcagtacggctcccccacctacttctatgccttctatcatcactgccaaagcgaaatgaagcccagctgggcagattcggcccatggcgatgaagtcccctatgtcttcggcatccccatgatcggtcccacagagctcttcagttgtaatttctccaagaacgacgtcatgctcagtgccgtggtgatgacctactggacgaacttcgccaaaactggtgatccaaaccaaccagttcctcaggataccaagttcattcatacaaaacccaatcgctttgaagaagtggcctggtccaagtataatcccaaagaccagctctatctgcatattggcttgaaacccagagtgagagatcactaccgggcaacgaaagtggctttctggttggaattggttcctcatttgcacaacttgaacgagatattccagtatgtttcaacaaccacaaaggttcctccaccagacatgacatcatttccctatggcacccggcgatctcccgccaagatatggccaaccaccaaacgcccagcaatcactcctgccaacaatcccaaacactctaaggaccctcacaaaacagggcccgaggacacaactgtcctcattgaaaccaaacgagattattccaccgaattaagtgtcaccattgccgtcggggcgtcgctcctcttcctcaacatcttagcctttgcggcgctgtactacaaaaaggacaagaggcgccatgagactcacaggcaccccagtccccagagaaacaccacaaatgatatcactcacatccagaacgaagagatcatgtctctgcagatgaagcagctggaacacgatcacgagtgtgagtcgctgcaggcacacgacacgctgaggctcacctgccctccagactacaccctcacgctgcgccggtcgccggatgacatcccatttatgacgccaaacaccatcaccatgattccaaacacattgatggggatgcagcctttacacacttttaaaaccttcagtggaggacaaaacagtacaaatttaccccacggacattccaccactagagtatagcttttccctatttcccctcctatccctctgcccctactgctcagcaatgtaaaagagacaaataaggagaaagaaaatctccaaaccaggaatgtttttgtgccactgactttagataaaaatgcaaaagggcagtcatcctgtcccagcagacccttctcattggcattttccagtattgtgagatcaatttctgaccatatgaaatgtgaaaagtatatgtttctgttacaatactgctttaagatctaaaccatgccaacagatgtttcgtgtgactaggacatcaccatttcaaggaactgtgtgtttccaacatcatggtagcagcacacacttccaaagctcagccagggacacttaatattttttaattacaatggaaatttaaacatttttatgtgggctacacaatggatggctcttcttaagtgaagaaagactctataggcttttacacagcacatgaagcagtaatccagaaagaaggaaatgcagaattttattatcaaagtaagcgaattgactgtgcagaaaaattgtagggttctgtggaaggaggtattctgccagcctgaactatatttaagaaactttgtaaaaaataaaaatgtatatagctgtgagctcaaacaaaaactgcagacaaacaaaaaagagaaaagcttttatttgtgttttcagtttgaaagaacttttagcaaggttgtgctttcaaacacatattagtcctaccaccttagttcctctacagcaaaagaggcttttcttcttaattacatgtaaacaaagacatgggattttctgacgtaagattttcatttgtaggaatatgtgatgtcaaatggaagactcagaagttttgtgtggcctatttctccctgtcaggttgcacagatgcatgtagagcattcttaggagaccattgttttagaaaactttgatttgtacatgttagttttcatgaaattgcaacacagagataggtcctaaaagtggaatgtatttaaaacttgttgaattagacacacacacacagacacacacaaagaatcagcagagaaaacaaaatacaagtcctgttctgtagttcttgccctttgaatatatttgggaagagttgcttcctatttcaggaccctgccaaaaaagaagaaagcttgcctttggtggggctatgccccttggagtaaatacagctctgtgttccctagcagctgccggaggatttggctgatgaagtacctgctcagcttagctaatcagattaaaggaagacatgtatgtcttttgtttaagcacctagtcccttatgtatcagtaaacaggtttttaaaaatcttttatgtcatttataggataaaacatatgcttgtctgaaaatatcaccttttgtggatttatctgatcaccaaataataaatattaagaagaatgggggaaaaaggatagaatattaaaactgctttgcataggtttttggggaaattaggatatcttcactgacaagacactgaatggaatttattcacccattttaaattggttacttggggatcagagatttgtctctccaacagcttgtggttttcttattactcattttcaggaaagtttgtagtattacaaggcagaaggaaacacagtagcaatggttgctctatattttgtctttcaaagattactgcattaccaagaaacagtagccaaagatgtttgaagatcatgtcccttagctgcattgtgggttattctagaaatccaatgttaaatgcctctactaaagtggggattccccataaaaattgtccagctacctgactcttttgcaataacaactttgattactgaatccatacactcaaactatagtgatatatcagtgtttgggagtgacctctagaaaaaagaaaactgtttttagaaatacataaaatcacttccaaatcctgttgcttatgttgggttaaatttgaaagcaattctctatatataaatatgtgaaatattatgatctgaacttagcacacatgaagcaacatttctttgctacacagaggtgtcttggaaagatttcattcccaattcatttttcatagatctataatcaggcaatttctgcaagcaatgtatgaccccacctgagcaaccacaaataggctctccatgaaactgcaaaggaactgatgtgtggcatccatgctggttttgtctgtctataatatgaattcaagtatctgttcatatttccaattgtctcctgctagcaatatgtgccacaacatgacagtcttgtgacatcttaaggaaaagaagagttcctgttaaatgaatagctttagcttttacaggggattatgattaaaagtgatttagtacatctta

SEQ ID NO: 158894 - DNA, 5167 bp, Homo sapiens
  Payload ID: 11087
  Gene Symbol: NLGN4Y
  Gene Name: neuroligin 4, Y-linked
  Uniprot ID: Q8NFZ3
  ENST ID: ENST00000355905
  CDS Start-End: 253-2703
tttttttcccttccttcatctcctggcctcggataagataaggcttgggggatgcacgaaataatccaagtgattgattagacctggcatggcttggttgggctggagaaagatcggggcgcgctggaaaccccgcgtgaagatgaaatgactttttcgaaagacttatctttctgcaggctcgcctctgagctttgtctccttggagccacctcacttagacagcttcggatgtggatgcagatttgaaccatgttgcgtccccagggactgctatggctccctttgttgttcacctctgtctgtgtcatgttaaactccaatgttcttctgtggataactgctcttgccatcaagttcaccctcattgacagccaagcacagtatccagttgtcaacacaaattatggtaaaatccagggcctaagaacaccattacccagtgagatcttgggtccagtggagcagtacttaggggtcccctatgcctcacccccaactggagagaggcggtttcagccaccagaatccccatcctcctggactggcatccgaaatgctactcagttttctgctgtgtgcccccagcacctggatgaaagattcttattgcatgacatgctgcccatctggtttaccaccagtttggatactttgatgacctatgttcaagatcaaaatgaagactgcctttacttaaacatctatgtgcccatggaagatgatattcatgaacagaacagtaagaagcctgttatggtctatatccatgggggatcttacatggagggaaccggtaacatgattgatggcagcattttggccagctatgggaacgtcatcgttatcaccattaactaccgtctgggaatactagggtttttaagtaccggtgaccaggcagcaaaaggcaactatgggctcctggatcagattcaagcactgaggtggattgaggagaatgtcggagcctttggcggggaccccaagagagtgactatctttggctcgggggctggggcctcctgtgtcagcctgttgaccctgtcccactactcagaaggtctcttccagaaggccatcattcagagcggcactgccctgtccagctgggcagtgaactaccagccggccaagtacactcggatattggcagacaaggtcggctgcaacatgctggacaccacggacatggtagaatgtctgaagaacaagaactacaaggagctcatccagcagaccatcaccccggccacctaccacatagcctttgggccggtgatcgacggcgacgtcatcccagacgacccccagatcctgatggagcaaggcgagttcctcaactacgacatcatgctgggcgtcaaccaaggggaaggcctgaagttcgtggacggcatcgtggataacgaggacggtgtgacgcccaacgactttgacttctccgtgtccaacttcgtggacaacctttacggctaccctgaagggaaagacactttgcgggagactatcaagttcatgtacacagactgggccgataaggaaaacccggagacgcggcggaaaaccctggtggctctctttactgaccatcagtgggtggcccccgccgtggccaccgccgacctgcacgcgcagtacggctcccccacctacttctatgccttctatcatcactgccaaagcgaaatgaagcccagctgggcagattcggcccatggcgatgaagtcccctatgtcttcggcatccccatgatcggtcccacagagctcttcagttgtaatttctccaagaacgacgtcatgctcagtgccgtggtgatgacctactggacgaacttcgccaaaactggtgatccaaaccaaccagttcctcaggataccaagttcattcatacaaaacccaatcgctttgaagaagtggcctggtccaagtataatcccaaagaccagctctatctgcatattggcttgaaacccagagtgagagatcactaccgggcaacgaaagtggctttctggttggaattggttcctcatttgcacaacttgaacgagatattccagtatgtttcaacaaccacaaaggttcctccaccagacatgacatcatttccctatggcacccggcgatctcccgccaagatatggccaaccaccaaacgcccagcaatcactcctgccaacaatcccaaacactctaaggaccctcacaaaacagggcccgaggacacaactgtcctcattgaaaccaaacgagattattccaccgaattaagtgtcaccattgccgtcggggcgtcgctcctcttcctcaacatcttagcctttgcggcgctgtactacaaaaaggacaagaggcgccatgagactcacaggcaccccagtccccagagaaacaccacaaatgatatcactcacatccagaacgaagagatcatgtctctgcagatgaagcagctggaacacgatcacgagtgtgagtcgctgcaggcacacgacacgctgaggctcacctgccctccagactacaccctcacgctgcgccggtcgccggatgacatcccatttatgacgccaaacaccatcaccatgattccaaacacattgatggggatgcagcctttacacacttttaaaaccttcagtggaggacaaaacagtacaaatttaccccacggacattccaccactagagtatagcttttccctatttcccctcctatccctctgcccctactgctcagcaatgtaaaagagacaaataaggagaaagaaaatctccaaaccaggaatgtttttgtgccactgactttagataaaaatgcaaaagggcagtcatcctgtcccagcagacccttctcattggcattttccagtattgtgagatcaatttctgaccatatgaaatgtgaaaagtatatgtttctgttacaatactgctttaagatctaaaccatgccaacagatgtttcgtgtgactaggacatcaccatttcaaggaactgtgtgtttccaacatcatggtagcagcacacacttccaaagctcagccagggacacttaatattttttaattacaatggaaatttaaacatttttatgtgggctacacaatggatggctcttcttaagtgaagaaagactctataggcttttacacagcacatgaagcagtaatccagaaagaaggaaatgcagaattttattatcaaagtaagcgaattgactgtgcagaaaaattgtagggttctgtggaaggaggtattctgccagcctgaactatatttaagaaactttgtaaaaaataaaaatgtatatagctgtgagctcaaacaaaaactgcagacaaacaaaaaagagaaaagcttttatttgtgttttcagtttgaaagaacttttagcaaggttgtgctttcaaacacatattagtcctaccaccttagttcctctacagcaaaagaggcttttcttcttaattacatgtaaacaaagacatgggattttctgacgtaagattttcatttgtaggaatatgtgatgtcaaatggaagactcagaagttttgtgtggcctatttctccctgtcaggttgcacagatgcatgtagagcattcttaggagaccattgttttagaaaactttgatttgtacatgttagttttcatgaaattgcaacacagagataggtcctaaaagtggaatgtatttaaaacttgttgaattagacacacacacacagacacacacaaagaatcagcagagaaaacaaaatacaagtcctgttctgtagttcttgccctttgaatatatttgggaagagttgcttcctatttcaggaccctgccaaaaaagaagaaagcttgcctttggtggggctatgccccttggagtaaatacagctctgtgttccctagcagctgccggaggatttggctgatgaagtacctgctcagcttagctaatcagattaaaggaagacatgtatgtcttttgtttaagcacctagtcccttatgtatcagtaaacaggtttttaaaaatcttttatgtcatttataggataaaacatatgcttgtctgaaaatatcaccttttgtggatttatctgatcaccaaataataaatattaagaagaatgggggaaaaaggatagaatattaaaactgctttgcataggtttttggggaaattaggatatcttcactgacaagacactgaatggaatttattcacccattttaaattggttacttggggatcagagatttgtctctccaacagcttgtggttttcttattactcattttcaggaaagtttgtagtattacaaggcagaaggaaacacagtagcaatggttgctctatattttgtctttcaaagattactgcattaccaagaaacagtagccaaagatgtttgaagatcatgtcccttagctgcattgtgggttattctagaaatccaatgttaaatgcctctactaaagtggggattccccataaaaattgtccagctacctgactcttttgcaataacaactttgattactgaatccatacactcaaactatagtgatatatcagtgtttgggagtgacctctagaaaaaagaaaactgtttttagaaatacataaaatcacttccaaatcctgttgcttatgttgggttaaatttgaaagcaattctctatatataaatatgtgaaatattatgatctgaacttagcacacatgaagcaacatttctttgctacacagaggtgtcttggaaagatttcattcccaattcatttttcatagatctataatcaggcaatttctgcaagcaatgtatgaccccacctgagcaaccacaaataggctctccatgaaactgcaaaggaactgatgtgtggcatccatgctggttttgtctgtctataatatgaattcaagtatctgttcatatttccaattgtctcctgctagcaatatgtgccacaacatgacagtcttgtgacatcttaaggaaaagaagagttcctgttaaatgaatagctttagcttttacaggggattatgattaaaagtgatttagtacatcttacatgatatctcatttctacgtgaaaagaagttatagaatcttcatagagttccatgagaaaaatatacttgctatttat

SEQ ID NO: 158895 - DNA, 5338 bp, Homo sapiens
  Payload ID: 11087
  Gene Symbol: NLGN4Y
  Gene Name: neuroligin 4, Y-linked
  ENST ID: ENST00000382868
  CDS Start-End: 253-2874
tttttttcccttccttcatctcctggcctcggataagataaggcttgggggatgcacgaaataatccaagtgattgattagacctggcatggcttggttgggctggagaaagatcggggcgcgctggaaaccccgcgtgaagatgaaatgactttttcgaaagacttatctttctgcaggctcgcctctgagctttgtctccttggagccacctcacttagacagcttcggatgtggatgcagatttgaaccatgttgcgtccccagggactgctatggctccctttgttgttcacctctgtctgtgtcatgttaaactccaatgttcttctgtggataactgctcttgccatcaagttcaccctcattgacagccaagcacagtatccagttgtcaacacaaattatggtaaaatccagggcctaagaacaccattacccagtgagatcttgggtccagtggagcagtacttaggggtcccctatgcctcacccccaactggagagaggcggtttcagccaccagaatccccatcctcctggactggcatccgaaatgctactcagttttctgctgtgtgcccccagcacctggatgaaagattcttattgcatgacatgctgcccatctggtttaccaccagtttggatactttgatgacctatgttcaagatcaaaatgaagactgcctttacttaaacatctatgtgcccatggaagatggaaccaacataaagagaaatgcagacgatataaccagtaatgaccatggtgaagataaagatattcatgaacagaacagtaagaagcctgttatggtctatatccatgggggatcttacatggagggaaccggtaacatgattgatggcagcattttggccagctatgggaacgtcatcgttatcaccattaactaccgtctgggaatactagcacaaaacaccctggctcatggaaactgcaagcatcgttgtcagctgcacctgcaggcaccacgggattgcaagtcagcataccctttcagaaatgaggatgaaattagagggtttttaagtaccggtgaccaggcagcaaaaggcaactatgggctcctggatcagattcaagcactgaggtggattgaggagaatgtcggagcctttggcggggaccccaagagagtgactatctttggctcgggggctggggcctcctgtgtcagcctgttgaccctgtcccactactcagaaggtctcttccagaaggccatcattcagagcggcactgccctgtccagctgggcagtgaactaccagccggccaagtacactcggatattggcagacaaggtcggctgcaacatgctggacaccacggacatggtagaatgtctgaagaacaagaactacaaggagctcatccagcagaccatcaccccggccacctaccacatagcctttgggccggtgatcgacggcgacgtcatcccagacgacccccagatcctgatggagcaaggcgagttcctcaactacgacatcatgctgggcgtcaaccaaggggaaggcctgaagttcgtggacggcatcgtggataacgaggacggtgtgacgcccaacgactttgacttctccgtgtccaacttcgtggacaacctttacggctaccctgaagggaaagacactttgcgggagactatcaagttcatgtacacagactgggccgataaggaaaacccggagacgcggcggaaaaccctggtggctctctttactgaccatcagtgggtggcccccgccgtggccaccgccgacctgcacgcgcagtacggctcccccacctacttctatgccttctatcatcactgccaaagcgaaatgaagcccagctgggcagattcggcccatggcgatgaagtcccctatgtcttcggcatccccatgatcggtcccacagagctcttcagttgtaatttctccaagaacgacgtcatgctcagtgccgtggtgatgacctactggacgaacttcgccaaaactggtgatccaaaccaaccagttcctcaggataccaagttcattcatacaaaacccaatcgctttgaagaagtggcctggtccaagtataatcccaaagaccagctctatctgcatattggcttgaaacccagagtgagagatcactaccgggcaacgaaagtggctttctggttggaattggttcctcatttgcacaacttgaacgagatattccagtatgtttcaacaaccacaaaggttcctccaccagacatgacatcatttccctatggcacccggcgatctcccgccaagatatggccaaccaccaaacgcccagcaatcactcctgccaacaatcccaaacactctaaggaccctcacaaaacagggcccgaggacacaactgtcctcattgaaaccaaacgagattattccaccgaattaagtgtcaccattgccgtcggggcgtcgctcctcttcctcaacatcttagcctttgcggcgctgtactacaaaaaggacaagaggcgccatgagactcacaggcaccccagtccccagagaaacaccacaaatgatatcactcacatccagaacgaagagatcatgtctctgcagatgaagcagctggaacacgatcacgagtgtgagtcgctgcaggcacacgacacgctgaggctcacctgccctccagactacaccctcacgctgcgccggtcgccggatgacatcccatttatgacgccaaacaccatcaccatgattccaaacacattgatggggatgcagcctttacacacttttaaaaccttcagtggaggacaaaacagtacaaatttaccccacggacattccaccactagagtatagcttttccctatttcccctcctatccctctgcccctactgctcagcaatgtaaaagagacaaataaggagaaagaaaatctccaaaccaggaatgtttttgtgccactgactttagataaaaatgcaaaagggcagtcatcctgtcccagcagacccttctcattggcattttccagtattgtgagatcaatttctgaccatatgaaatgtgaaaagtatatgtttctgttacaatactgctttaagatctaaaccatgccaacagatgtttcgtgtgactaggacatcaccatttcaaggaactgtgtgtttccaacatcatggtagcagcacacacttccaaagctcagccagggacacttaatattttttaattacaatggaaatttaaacatttttatgtgggctacacaatggatggctcttcttaagtgaagaaagactctataggcttttacacagcacatgaagcagtaatccagaaagaaggaaatgcagaattttattatcaaagtaagcgaattgactgtgcagaaaaattgtagggttctgtggaaggaggtattctgccagcctgaactatatttaagaaactttgtaaaaaataaaaatgtatatagctgtgagctcaaacaaaaactgcagacaaacaaaaaagagaaaagcttttatttgtgttttcagtttgaaagaacttttagcaaggttgtgctttcaaacacatattagtcctaccaccttagttcctctacagcaaaagaggcttttcttcttaattacatgtaaacaaagacatgggattttctgacgtaagattttcatttgtaggaatatgtgatgtcaaatggaagactcagaagttttgtgtggcctatttctccctgtcaggttgcacagatgcatgtagagcattcttaggagaccattgttttagaaaactttgatttgtacatgttagttttcatgaaattgcaacacagagataggtcctaaaagtggaatgtatttaaaacttgttgaattagacacacacacacagacacacacaaagaatcagcagagaaaacaaaatacaagtcctgttctgtagttcttgccctttgaatatatttgggaagagttgcttcctatttcaggaccctgccaaaaaagaagaaagcttgcctttggtggggctatgccccttggagtaaatacagctctgtgttccctagcagctgccggaggatttggctgatgaagtacctgctcagcttagctaatcagattaaaggaagacatgtatgtcttttgtttaagcacctagtcccttatgtatcagtaaacaggtttttaaaaatcttttatgtcatttataggataaaacatatgcttgtctgaaaatatcaccttttgtggatttatctgatcaccaaataataaatattaagaagaatgggggaaaaaggatagaatattaaaactgctttgcataggtttttggggaaattaggatatcttcactgacaagacactgaatggaatttattcacccattttaaattggttacttggggatcagagatttgtctctccaacagcttgtggttttcttattactcattttcaggaaagtttgtagtattacaaggcagaaggaaacacagtagcaatggttgctctatattttgtctttcaaagattactgcattaccaagaaacagtagccaaagatgtttgaagatcatgtcccttagctgcattgtgggttattctagaaatccaatgttaaatgcctctactaaagtggggattccccataaaaattgtccagctacctgactcttttgcaataacaactttgattactgaatccatacactcaaactatagtgatatatcagtgtttgggagtgacctctagaaaaaagaaaactgtttttagaaatacataaaatcacttccaaatcctgttgcttatgttgggttaaatttgaaagcaattctctatatataaatatgtgaaatattatgatctgaacttagcacacatgaagcaacatttctttgctacacagaggtgtcttggaaagatttcattcccaattcatttttcatagatctataatcaggcaatttctgcaagcaatgtatgaccccacctgagcaaccacaaataggctctccatgaaactgcaaaggaactgatgtgtggcatccatgctggttttgtctgtctataatatgaattcaagtatctgttcatatttccaattgtctcctgctagcaatatgtgccacaacatgacagtcttgtgacatcttaaggaaaagaagagttcctgttaaatgaatagctttagcttttacaggggattatgattaaaagtgatttagtacatcttacatgatatctcatttctacgtgaaaagaagttatagaatcttcatagagttccatgagaaaaatatacttgctatttat

SEQ ID NO: 158896 - DNA, 6617 bp, Homo sapiens
  Payload ID: 11087
  Gene Symbol: NLGN4Y
  Gene Name: neuroligin 4, Y-linked
  Uniprot ID: Q8NFZ3
  ENST ID: ENST00000382872
  CDS Start-End: 283-2229
tccaaacccggcaatgttggtggctcttgcattcctctggatgagcgaatctagttggggggttcccgaaggggaaggcgcctgggctttcaatacatcctcctgaatcatactgcgtttcaggttccttagaaaaatttggatgtgtaaaaagaactcttaacggcgatgcaggtcttccacagctaaggaaccaacataaagagaaatgcagacgatataaccagtaatgaccatggtgaagataaagatattcatgaacagaacagtaagaagcctgttatggtctatatccatgggggatcttacatggagggaaccggtaacatgattgatggcagcattttggccagctatgggaacgtcatcgttatcaccattaactaccgtctgggaatactagggtttttaagtaccggtgaccaggcagcaaaaggcaactatgggctcctggatcagattcaagcactgaggtggattgaggagaatgtcggagcctttggcggggaccccaagagagtgactatctttggctcgggggctggggcctcctgtgtcagcctgttgaccctgtcccactactcagaaggtctcttccagaaggccatcattcagagcggcactgccctgtccagctgggcagtgaactaccagccggccaagtacactcggatattggcagacaaggtcggctgcaacatgctggacaccacggacatggtagaatgtctgaagaacaagaactacaaggagctcatccagcagaccatcaccccggccacctaccacatagcctttgggccggtgatcgacggcgacgtcatcccagacgacccccagatcctgatggagcaaggcgagttcctcaactacgacatcatgctgggcgtcaaccaaggggaaggcctgaagttcgtggacggcatcgtggataacgaggacggtgtgacgcccaacgactttgacttctccgtgtccaacttcgtggacaacctttacggctaccctgaagggaaagacactttgcgggagactatcaagttcatgtacacagactgggccgataaggaaaacccggagacgcggcggaaaaccctggtggctctctttactgaccatcagtgggtggcccccgccgtggccaccgccgacctgcacgcgcagtacggctcccccacctacttctatgccttctatcatcactgccaaagcgaaatgaagcccagctgggcagattcggcccatggcgatgaagtcccctatgtcttcggcatccccatgatcggtcccacagagctcttcagttgtaatttctccaagaacgacgtcatgctcagtgccgtggtgatgacctactggacgaacttcgccaaaactggtgatccaaaccaaccagttcctcaggataccaagttcattcatacaaaacccaatcgctttgaagaagtggcctggtccaagtataatcccaaagaccagctctatctgcatattggcttgaaacccagagtgagagatcactaccgggcaacgaaagtggctttctggttggaattggttcctcatttgcacaacttgaacgagatattccagtatgtttcaacaaccacaaaggttcctccaccagacatgacatcatttccctatggcacccggcgatctcccgccaagatatggccaaccaccaaacgcccagcaatcactcctgccaacaatcccaaacactctaaggaccctcacaaaacagggcccgaggacacaactgtcctcattgaaaccaaacgagattattccaccgaattaagtgtcaccattgccgtcggggcgtcgctcctcttcctcaacatcttagcctttgcggcgctgtactacaaaaaggacaagaggcgccatgagactcacaggcaccccagtccccagagaaacaccacaaatgatatcactcacatccagaacgaagagatcatgtctctgcagatgaagcagctggaacacgatcacgagtgtgagtcgctgcaggcacacgacacgctgaggctcacctgccctccagactacaccctcacgctgcgccggtcgccggatgacatcccatttatgacgccaaacaccatcaccatgattccaaacacattgatggggatgcagcctttacacacttttaaaaccttcagtggaggacaaaacagtacaaatttaccccacggacattccaccactagagtatagcttttccctatttcccctcctatccctctgcccctactgctcagcaatgtaaaagagacaaataaggagaaagaaaatctccaaaccaggaatgtttttgtgccactgactttagataaaaatgcaaaagggcagtcatcctgtcccagcagacccttctcattggcattttccagtattgtgagatcaatttctgaccatatgaaatgtgaaaagtatatgtttctgttacaatactgctttaagatctaaaccatgccaacagatgtttcgtgtgactaggacatcaccatttcaaggaactgtgtgtttccaacatcatggtagcagcacacacttccaaagctcagccagggacacttaatattttttaattacaatggaaatttaaacatttttatgtgggctacacaatggatggctcttcttaagtgaagaaagactctataggcttttacacagcacatgaagcagtaatccagaaagaaggaaatgcagaattttattatcaaagtaagcgaattgactgtgcagaaaaattgtagggttctgtggaaggaggtattctgccagcctgaactatatttaagaaactttgtaaaaaataaaaatgtatatagctgtgagctcaaacaaaaactgcagacaaacaaaaaagagaaaagcttttatttgtgttttcagtttgaaagaacttttagcaaggttgtgctttcaaacacatattagtcctaccaccttagttcctctacagcaaaagaggcttttcttcttaattacatgtaaacaaagacatgggattttctgacgtaagattttcatttgtaggaatatgtgatgtcaaatggaagactcagaagttttgtgtggcctatttctccctgtcaggttgcacagatgcatgtagagcattcttaggagaccattgttttagaaaactttgatttgtacatgttagttttcatgaaattgcaacacagagataggtcctaaaagtggaatgtatttaaaacttgttgaattagacacacacacacagacacacacaaagaatcagcagagaaaacaaaatacaagtcctgttctgtagttcttgccctttgaatatatttgggaagagttgcttcctatttcaggaccctgccaaaaaagaagaaagcttgcctttggtggggctatgccccttggagtaaatacagctctgtgttccctagcagctgccggaggatttggctgatgaagtacctgctcagcttagctaatcagattaaaggaagacatgtatgtcttttgtttaagcacctagtcccttatgtatcagtaaacaggtttttaaaaatcttttatgtcatttataggataaaacatatgcttgtctgaaaatatcaccttttgtggatttatctgatcaccaaataataaatattaagaagaatgggggaaaaaggatagaatattaaaactgctttgcataggtttttggggaaattaggatatcttcactgacaagacactgaatggaatttattcacccattttaaattggttacttggggatcagagatttgtctctccaacagcttgtggttttcttattactcattttcaggaaagtttgtagtattacaaggcagaaggaaacacagtagcaatggttgctctatattttgtctttcaaagattactgcattaccaagaaacagtagccaaagatgtttgaagatcatgtcccttagctgcattgtgggttattctagaaatccaatgttaaatgcctctactaaagtggggattccccataaaaattgtccagctacctgactcttttgcaataacaactttgattactgaatccatacactcaaactatagtgatatatcagtgtttgggagtgacctctagaaaaaagaaaactgtttttagaaatacataaaatcacttccaaatcctgttgcttatgttgggttaaatttgaaagcaattctctatatataaatatgtgaaatattatgatctgaacttagcacacatgaagcaacatttctttgctacacagaggtgtcttggaaagatttcattcccaattcatttttcatagatctataatcaggcaatttctgcaagcaatgtatgaccccacctgagcaaccacaaataggctctccatgaaactgcaaaggaactgatgtgtggcatccatgctggttttgtctgtctataatatgaattcaagtatctgttcatatttccaattgtctcctgctagcaatatgtgccacaacatgacagtcttgtgacatcttaaggaaaagaagagttcctgttaaatgaatagctttagcttttacaggggattatgattaaaagtgatttagtacatcttacatgatatctcatttctacgtgaaaagaagttatagaatcttcatagagttccatgagaaaaatatacttgctatttatagaaaacgagaaaaaagaaaaaaatgagaaacaagtaagaaaaaatcctttcctaggcttttccttgatcttcagaggcacacagggtttaatggttccttaggttattattttgaggttttgttctttcttttgccttaagtaatgacagaagatatatatggccagacacatatgtataaacttttcagcagcattttaataataaaatatcacactattttctaatgctttgtacaaacaattatgcatctgttctttcttggtaggtggaatattttatttacttttgccattctttgaatgcctttttctttgtaaatgctacatggtagctctcacataggctacaaatggataaatacatttggtaatgggatggtttctttagctttggccagctgcacagttgaggaggctctgctggcctgattttggaaaaccaagccctgtttggtgaagctcctgagatgacactgcctgaaaatgagtatttggttgtgttatttctaccactgttcattcttgtgtctctgtgttttgatttgtgttcaacaaactgatgccttaatggtttcaaatagaaagccttaggtgagtaaaccttctagtgacagtaagaaattctactgaatgaaactccagaggcagaaaatcattgtcattccaatgggagctcaattgtcaattccttcctgtgcattcagccatcacgaacttatttcacattcacagtagctctaaggggcaggcacctgcattactcccctttcataatggaagatgttctgactttgaaacatgcccccttggacaggaaaatttgatggataacaggatagcatatcctcatatcccaatctttcaccaagaagttatacagcaaacacttgtaagtcaaggtcttgcatgataatctttgctaagtagcaagtaaagaaatatagcaaggacccagactctttggaatatgtgaactaaatccttcagatgttgttggcctcaatcatgttgtgaaggcacacaggagaatacatacacacacatatgcatatatgtatatatgtacatgtatgtgtacattatatatgagtatacatgtacctatcctatatatgtatgtatgtatagagtcacagactgcataatgttttggacaaatatagatcacatatatgatgatagtgtcttgagattaaaataccatgtttttattgtaccttttcagtgttcagatatgtttagacaaacaaatgcttatcattgtgttacagttgcctaaggtcttctctccagtcacatgctgtacaggtttgtagactggaagaactaggctataccatagagcctaggtgtgctataggctacacatcggttttgtgtaagtatactacatgatgtttgcacaatgatgaaattgcctaacgaaacttttctcagaaacctattgatacatgactgtgtatgtttacattatatatactgtatatgcacacatgcatatatgcatatatatgttatacatttacatatgtacatggatatcacatactttaaattcctgaagatgtcattttcattaaatacatatgcacacacactcataaacacacacagactcatatatacacacaaatctataacacatttgtgctcacatatacattcctctgtgtgtgtgtgtgtattacattactgctttttatctgtgaaatcacattctgcagtttcatttactgtgatcaactatgatctaaaaatatatgagtacttcaataagatattttgaaagaaaccacattcacataacatttatgacattataattgttctattttattagctattgttcatctcttactccatctactttataaattaagcttcataataagtgtgtatatttaataaaatatatagtata

SEQ ID NO: 158897 - DNA, 722 bp, Homo sapiens
  Payload ID: 11087
  Gene Symbol: NLGN4Y
  Gene Name: neuroligin 4, Y-linked
  ENST ID: ENST00000413217
  CDS Start-End: 1-710
taaactccaatgttcttctgtggataactgctcttgccatcaagttcaccctcattgacagccaagcacagtatccagttgtcaacacaaattatggtaaaatccagggcctaagaacaccattacccagtgagatcttgggtccagtggagcagtacttaggggtcccctatgcctcacccccaactggagagaggcggtttcagccaccagaatccccatcctcctggactggcatccgaaatgctactcagttttctgctgtgtgcccccagcacctggatgaaagattcttattgcatgacatgctgcccatctggtttaccaccagtttggatactttgatgacctatgttcaagatcaaaatgaagactgcctttacttaaacatctatgtgcccatggaagatggaaccaacataaagagaaatgcagacgatataaccagtaatgaccatggtgaagataaagatattcatgaacagaacagtaagaagcctgttatggtctatatccatgggggatcttacatggagggaaccggtaacatgattgatggcagcattttggccagctatgggaacgtcatcgttatcaccattaactaccgtctgggaatactaggtatgcaagaggcacgtttgtgtgggagctcaaaaatgtttaattattttaaatctcctttcactaatttaataaattttttttgagttcagatgcaa

SEQ ID NO: 158898 - DNA, 8661 bp, Homo sapiens
  Payload ID: 11088
  Gene Symbol: NLN
  Gene Name: neurolysin (metallopeptidase M3 family)
  Uniprot ID: Q9BYT8
  ENST ID: ENST00000380985
  CDS Start-End: 179-2293
ggggctggtaggcgccggcgtggagctgccgcacgtgggagggcgctggccaggcagccactgtggcctctgcggctaggccggctcgagactcccgggcgcccaggcgctgccgcccgcctcgccgccccacgccgaaggaccacgcgcccgccgccgccagcctctcagcgctcccatgatcgcccggtgccttttggctgtgcgaagcctccgcagagttggtggttccaggattttactcagaatgacgttaggaagagaagtgatgtctcctcttcaggcaatgtcttcctatactgtggctggcagaaatgttttaagatgggatctttcaccagagcaaattaaaacaagaactgaggagctcattgtgcagaccaaacaggtgtacgatgctgttggaatgctcggtattgaggaagtaacttacgagaactgtctgcaggcactggcagatgtagaagtaaagtatatagtggaaaggaccatgctagactttccccagcatgtatcctctgacaaagaagtacgagcagcaagtacagaagcagacaaaagactttctcgttttgatattgagatgagcatgagaggagatatatttgagagaattgttcatttacaggaaacctgtgatctggggaagataaaacctgaggccagacgatacttggaaaagtcaattaaaatggggaaaagaaatgggctccatcttcctgaacaagtacagaatgaaatcaaatcaatgaagaaaagaatgagtgagctatgtattgattttaacaaaaacctcaatgaggatgataccttccttgtattttccaaggctgaacttggtgctcttcctgatgatttcattgacagtttagaaaagacagatgatgacaagtataaaattaccttaaaatatccacactatttccctgtcatgaagaaatgttgtatccctgaaaccagaagaaggatggaaatggcttttaatacaaggtgcaaagaggaaaacaccataattttgcagcagctactcccactgcgaaccaaggtggccaaactactcggttatagcacacatgctgacttcgtccttgaaatgaacactgcaaagagcacaagccgcgtaacagcctttctagatgatttaagccagaagttaaaacccttgggtgaagcagaacgagagtttattttgaatttgaagaaaaaggaatgcaaagacaggggttttgaatatgatgggaaaatcaatgcctgggatctatattactacatgactcagacagaggaactcaagtattccatagaccaagagttcctcaaggaatacttcccaattgaggtggtcactgaaggcttgctgaacacctaccaggagttgttgggactttcatttgaacaaatgacagatgctcatgtttggaacaagagtgttacactttatactgtgaaggataaagctacaggagaagtattgggacagttctatttggacctctatccaagggaaggaaaatacaatcatgcggcctgcttcggtctccagcctggctgccttctgcctgatggaagccggatgatggcagtggctgccctcgtggtgaacttctcacagccagtggcaggtcgtccctctctcctgagacacgacgaggtgaggacttactttcatgagtttggtcacgtgatgcatcagatttgtgcacagactgattttgcacgatttagcggaacaaatgtggaaactgactttgtagaggtgccatcgcaaatgcttgaaaattgggtgtgggacgtcgattccctccgaagattgtcaaaacattataaagatggaagccctattgcagacgatctgcttgaaaaacttgttgcttctaggctggtcaacacaggtcttctgaccctgcgccagattgttttgagcaaagttgatcagtctcttcataccaacacatcgctggatgctgcaagtgaatatgccaaatactgctcagaaatattaggagttgcagctactccaggcacaaatatgccagctacctttggacatttggcagggggatacgatggccaatattatggatatctttggagtgaagtattttccatggatatgttttacagctgttttaaaaaagaagggataatgaatccagaggttggaatgaaatacagaaacctaatcctgaaacctgggggatctctggacggcatggacatgctccacaatttcttgaaacgtgagccaaaccaaaaagcgttcctaatgagtagaggcctgcatgctccgtgaactggggatctttggtagccgtccatgtctggaggacaagtcgacatcaccatgtgttactggcctggaaactgaagggagttttgcaagtgaaaatttagatttctattgacatccttttgttttctaattttaaaaattataaagatgtaaatggaattataaatactgtgacctaagaaaagacccactagaaagtaattgtactataaaatttcataaaactggatttgatttctttttatgaaagtttcatatgaatgtaacttgattttttactattataatctagataatatgatataagagggctaagaatttttaaattgaatcatatatatgatataatttgatccttcttgtatcttgaagttttgtacttgggatttctggactgataaatgaatcatcacattcttctggtaaatattttcttggagctctgtgtcaactttgatcctttgtctcccaggaaggtgtgacctctcctttgcctgcatacctcaaggccaggggaatatgcctcagtgatgcatttatctttgtatatcaggccgcatgattcccaactttctgccacacttaaattacgttcctccatttcagttttgtcttttctgtctaaagttcagtcaaagagtatcaaaaaattatgtttcagctagactggtgtaatgtataagtttttgtatcttgtattagaggatttcgtagcttttattagaggctcatttccacctcagcatacaagatcgttagtcttttggcatgtgtgccaattagaatactaaagcaagtccaagcacatttttctcttctcacgtttctaataagtgttagggactttgcctcttttacttaccacgtccccaaaagtgtcaggtagacatgtcacaaatggctctgtagagagccatgggaagagagaggaggtggatgtggaacataaagggttcagaaactccagaagaggagtgggttttggatagaagcatttgaggacagctgctccaaagccttatgtgtatgatgaaacttaaccacggggaagagactcttcagtagcctgttctgtctggtgatttttattttaagtgaacctttggatctatctttaactctctttattgtgagtctaaattccaattctgcagcagatcagtaaactcacagtatttttcctgtggaaatctattcaataaggaaaccaagacaggataataaaatttaaaaaaaaaacaactttgaattcccctgcctaggtcttccagttgttttccagcgcatacctcaggtatgactttgctagccggggacaaaattagcaccttccgattctctagtccaaatgaactttgtgctaaataaaaaattattatactacataataaagttacagatagcaggaaatgcaagagctaggagattcctagattatatctgccaagcaaataccttaaacatccacctgaaatcctactaccccctcttctgagataatttgcccagcccttctcttcccacacactcactcaatgtcacccccttctaatccccaaaactgtttttgtggtctttgtagcctatagtagttttctcacatctttccccctagacttttctgtttttcagtttcagacaaaaaaactcttcagctttttccagtgtgtctccttaacagtaactttaccacttgaaatcttatttcatagaaaaactaaattggtgtggaaaggctgcacacaataaagttatattattatccatgaaaatgaactcatatttctttcatactttaacgttaaaaccgaaatgcatgagagcaaaagcaccatggtgttctttctatttagggcctacctctaatatttaaaatctaccaaagagcagtcacaaaattaaaactcagcccgggcgcagtggctcatgcctgtaatcccagcactttgggaggccaaggcaggaggatcacctgaggtcagagttcaagaccagcatggtcaacatggtgaaaccctgtctctacaaaaatacaaaaagctgggcatgatgttgggttcctgtagtcccagctacttaggaggctgaggcaggagaatagcttgaacccgggaggtggaggttgcagtgagctgagatcatgccattgcactccagcctggacgacagagtgagattcagtctcaaaaaaaattaatactcaaagaattatctagcataatttaaaagaaaggactttttaaaaattctctagcataattcaaaagaaaggacttaacttttttttttttagtgtggtcatccgtctagttgttctttttttccagatcagagcagagaatatcactgacatgcttgaaatggtggataactatgtaaattgtaattggacaaatgtacactttagatttatggactgagccacatataataaggtctctcctggtaattgatccaggggatttaggcctctttcgggttttttgttttttttttaggcattgttatgttgtgaaggataaaatcttcaacatcttatgcaaatggatagtaggcatgatcctaaaggtttagttttacgatgctgcagagaagagaaatgtcttgacgttttgccacctgatgtagactttgtccccctctagtataaatgttgcatgttacctagataaacaactaaaaattgccttgagttatcacctgagctacttatgccaaggtcttgcctttctaaagctaataaggtgagaggtggatatctgtagctcttcggatgaaaaattgcattgtgggagataccaaaattgaggaaatagctcttcaaagaaaaattactgatatgatcattgtacttgtaaatgccttaagtagcaggcagtgactcaattttctactttaccattttacctttagcttttatgtatgaattataggtctgtggagattctgcctccccactaggccagtgtgtgtttaccatttattcattttctatcatacacaggtggattaaaatttacattaaaatttacattaaaataccatcatacttcaggcttctataacaaaatatcagactgggtggcttcaaaagcagacatttcttacagttctggaagctgggaagtcccacaatccacatgctggtaaatttggttcgtggtgaggcccctcttcctcttttactgaccacatccccaaaagtgtcaggtagacatgttacaaatagctctgtagagagccatgggaagagacaggaggcagatgtggaacataaagggtttagaaacttctgcaggcagcagtggcagggagcaagccctagagtgtctctttttacgagagcaggaatcccatcatgagagttccttcctcatgactttatctaaacccagtcacccccaacaaaggccccaccccctaaccccatcacattggctgttacggcttcaatgtaggggatggggcacaaacattcagtccataacgaatactgattcctcaaatagggtttaaacatagttaactgagcccccaaagaatgttaaaagagaaaatccattttatttgaatagatgcagtgaccacagcttcttccctcaaatcaacacattacagttagatgtctcccatctgaaattggatagcccactgaaattgaacatgccttctcttataaatgtgtggtgagaataaaagcaacaaagaaatgaatgtggtggctcacacctgtaatcctaacactttggaaggttgaggcaggaggatcctttgtgctcaagagtttgagaccagcctgagcaacacagtgagaccctgtctctacaaaaactaaaaaaattagctagggatggtggcacatgcctgtagtcccagctacttgggaggctgaggtgggaggattgcttgagcccaagaaggtcaaggctgccatgagccataatcacgccactgcactccagcctgggtgacagagaccctgtcttaaaataaaataaaaaaaaaaggaaaaggaaagacatacataccctcagttcttcgaaaaacagtcaacgtccaaaaagtttattttttgagtcacctttaatagagaaatttcccactggaaacagatccacctaagtgattatctagtatcagctgtatcaaggcaaaaggtaaaggttataagatgtaaatattagaccaaaatagccttttttaacaaacacaataatgctgtacgtctgtaacaaaacaaaatttgaaaaattgaggtaatgtacacagcgatgcacacacccccacaccacaccgtgattcctgagttttgatttggttgaattcaccttgtagttccctttcctgagaaaatacaggttcaacacatctagtccacgatgtacgtacaaggggaaggggtgaacaggaaatagactcccttattctgctcacatgagctggaacctgtactagctgcatatttcatagaccccagaggctcacctcaattgtactcctatgataaaatgtctctagcatttgtcatgagagaaactggctagaaatagtttgttcattgcgtccagcaagacacgcattgctgttgatatctttgtggctaagatggagaatgtgactggataatagttatccaggtggattactagctattgaaacagtctgagatagttgcatgatgattaacgttaaactgggagtaatttcaagtcatttggctaaaaatgaaaaaaaagtcccataaaaaggtatcaaatgtacagataatagggctggaattattaagtatgatgatgttattaacatctaaaattattttggccgggcaaggtgggtcacgcctgtaatctcagcactttgggatgccaagatgggtggatcacctgagttcaggagttcaagaccagcttggccaacatggcgaaacccgtctctactaaagaatacaaaaattagccaggtgttgtggcacatgcctgtactcccagctactcaggaggctgaggcagaagaatcatttgaaccccggaggtggaggttgcagtgagccgacattgtgccgcttcattccagcctgggcaacagagtgaaactcttgtctcaaaagtaaaaaaataataatgtttaaaaatatttcaatgtggagacaagctcaaaatgaaattagacacattccattacccaggtaaaagaaggggaagcctgacttgatagtagtattcaggaaaaaagagttggcagttttatttggccaaattccaatatcagctcatggtacagcacaccgggggagggggacgggaggcgagaactaaggctttttaagaatgtgttgatggaagtatgtgcctagatcaaaagaataatccccccggactccagtgtaagatcaattactgttggaatattgtgttcctttctagatatcacattttaagcagactttggccaagtagtacagtgtttgcaggagcagtaacaagatggtgataactttgaaaatacttctcaaaagaaaaataaaaaagaattagggaagttcagtctggagataattcagaaatacagatgataattgttttcaaattcttgaaggaaatgggagagagaataggctaattctgtattgcttcagaaaccaaatggaaacaattaaattccattagagaaacggttggaaaatatgaggaggatttagttcagtacgaggaagctgtttctaatactttttgttggttaaaaatacattccgctgctgtggaaagcctgtagctgccaggagtgttacagagggcattcctcccttgagttgacatttgtgccaaaccggcttttagggcttctccagcttttaagatgcgataatgataagatgatcatcgggaaaacatccctcagatgaaacgttcacaggctggctctgaaaactggcattcagatgattgcggctcccccatactgtaggaatattgtttatggcttaaggttgcctcgctcctcatctgtaatcagtgaaagtttatccagaggttaattaccggttttctggtgggtatctgggaactgaggatgggagattaactgttgtatatgaccatagtaaagcaaaagactgttagagaatgagtaaacgttcgttttcctccctacagaatttacagttactctctgtccattccactcactactgtcttcatcacacacacagaggcaaacgtctgattcagatagccaggtgtgccatgcatgcactccaccatattgtgatctcttcgaggcttgtttctgtcccctgtcctccacagtcctggattgttaatgaatagttcatacatgtttgttaaataaatataccttctttaaaatta

SEQ ID NO: 158899 - DNA, 564 bp, Homo sapiens
  Payload ID: 11088
  Gene Symbol: NLN
  Gene Name: neurolysin (metallopeptidase M3 family)
  ENST ID: ENST00000514991
  CDS Start-End: 128-274
aggcagccactgtggcctctgcggctaggccggctcgagactcccgggcgcccaggcgctgccgcccgcctcgccgccccacgccgaaggaccacgcgcccgccgccgccagcctctcagcgctcccatgatcgcccggtgccttttggctgtgcgaagcctccgcagatggagtctcgctctgttgcctaggctggtgtgcagtggcgtgatcttggctcactgcagcctctgcctccctggttcaagcgattctcctgcttcagccacctgaagttggtggttccaggattttactcagaatgacgttaggaagagaagtgatgtctcctcttcaggcaatgtcttcctatactgtggctggcagaaatgttttaagatgggatctttcaccagagcaaattaaaacaagaactgaggagctcattgtgcagaccaaacaggtgtacgatgctgttggaatgctcggtattgaggaagtaacttacgagaactgtctgcaggcactggcagatgtagaagtaaagtatatagtggaaaggaccatgctagactttccccagc

SEQ ID NO: 158900 - DNA, 8354 bp, Homo sapiens
  Payload ID: 11088
  Gene Symbol: NLN
  Gene Name: neurolysin (metallopeptidase M3 family)
  ENST ID: ENST00000502464
  CDS Start-End: 184-1986
ggccaggcagccactgtggcctctgcggctaggccggctcgagactcccgggcgcccaggcgctgccgcccgcctcgccgccccacgccgaaggaccacgcgcccgccgccgccagcctctcagcgctcccatgatcgcccggtgccttttggctgtgcgaagcctccgcagtggaaaggaccatgctagactttccccagcatgtatcctctgacaaagaagtacgagcagcaagtacagaagcagacaaaagactttctcgttttgatattgagatgagcatgagaggagatatatttgagagaattgttcatttacaggaaacctgtgatctggggaagataaaacctgaggccagacgatacttggaaaagtcaattaaaatggggaaaagaaatgggctccatcttcctgaacaagtacagaatgaaatcaaatcaatgaagaaaagaatgagtgagctatgtattgattttaacaaaaacctcaatgaggatgataccttccttgtattttccaaggctgaacttggtgctcttcctgatgatttcattgacagtttagaaaagacagatgatgacaagtataaaattaccttaaaatatccacactatttccctgtcatgaagaaatgttgtatccctgaaaccagaagaaggatggaaatggcttttaatacaaggtgcaaagaggaaaacaccataattttgcagcagctactcccactgcgaaccaaggtggccaaactactcggttatagcacacatgctgacttcgtccttgaaatgaacactgcaaagagcacaagccgcgtaacagcctttctagatgatttaagccagaagttaaaacccttgggtgaagcagaacgagagtttattttgaatttgaagaaaaaggaatgcaaagacaggggttttgaatatgatgggaaaatcaatgcctgggatctatattactacatgactcagacagaggaactcaagtattccatagaccaagagttcctcaaggaatacttcccaattgaggtggtcactgaaggcttgctgaacacctaccaggagttgttgggactttcatttgaacaaatgacagatgctcatgtttggaacaagagtgttacactttatactgtgaaggataaagctacaggagaagtattgggacagttctatttggacctctatccaagggaaggaaaatacaatcatgcggcctgcttcggtctccagcctggctgccttctgcctgatggaagccggatgatggcagtggctgccctcgtggtgaacttctcacagccagtggcaggtcgtccctctctcctgagacacgacgaggtgaggacttactttcatgagtttggtcacgtgatgcatcagatttgtgcacagactgattttgcacgatttagcggaacaaatgtggaaactgactttgtagaggtgccatcgcaaatgcttgaaaattgggtgtgggacgtcgattccctccgaagattgtcaaaacattataaagatggaagccctattgcagacgatctgcttgaaaaacttgttgcttctaggctggtcaacacaggtcttctgaccctgcgccagattgttttgagcaaagttgatcagtctcttcataccaacacatcgctggatgctgcaagtgaatatgccaaatactgctcagaaatattaggagttgcagctactccaggcacaaatatgccagctacctttggacatttggcagggggatacgatggccaatattatggatatctttggagtgaagtattttccatggatatgttttacagctgttttaaaaaagaagggataatgaatccagaggttggaatgaaatacagaaacctaatcctgaaacctgggggatctctggacggcatggacatgctccacaatttcttgaaacgtgagccaaaccaaaaagcgttcctaatgagtagaggcctgcatgctccgtgaactggggatctttggtagccgtccatgtctggaggacaagtcgacatcaccatgtgttactggcctggaaactgaagggagttttgcaagtgaaaatttagatttctattgacatccttttgttttctaattttaaaaattataaagatgtaaatggaattataaatactgtgacctaagaaaagacccactagaaagtaattgtactataaaatttcataaaactggatttgatttctttttatgaaagtttcatatgaatgtaacttgattttttactattataatctagataatatgatataagagggctaagaatttttaaattgaatcatatatatgatataatttgatccttcttgtatcttgaagttttgtacttgggatttctggactgataaatgaatcatcacattcttctggtaaatattttcttggagctctgtgtcaactttgatcctttgtctcccaggaaggtgtgacctctcctttgcctgcatacctcaaggccaggggaatatgcctcagtgatgcatttatctttgtatatcaggccgcatgattcccaactttctgccacacttaaattacgttcctccatttcagttttgtcttttctgtctaaagttcagtcaaagagtatcaaaaaattatgtttcagctagactggtgtaatgtataagtttttgtatcttgtattagaggatttcgtagcttttattagaggctcatttccacctcagcatacaagatcgttagtcttttggcatgtgtgccaattagaatactaaagcaagtccaagcacatttttctcttctcacgtttctaataagtgttagggactttgcctcttttacttaccacgtccccaaaagtgtcaggtagacatgtcacaaatggctctgtagagagccatgggaagagagaggaggtggatgtggaacataaagggttcagaaactccagaagaggagtgggttttggatagaagcatttgaggacagctgctccaaagccttatgtgtatgatgaaacttaaccacggggaagagactcttcagtagcctgttctgtctggtgatttttattttaagtgaacctttggatctatctttaactctctttattgtgagtctaaattccaattctgcagcagatcagtaaactcacagtatttttcctgtggaaatctattcaataaggaaaccaagacaggataataaaatttaaaaaaaaaacaactttgaattcccctgcctaggtcttccagttgttttccagcgcatacctcaggtatgactttgctagccggggacaaaattagcaccttccgattctctagtccaaatgaactttgtgctaaataaaaaattattatactacataataaagttacagatagcaggaaatgcaagagctaggagattcctagattatatctgccaagcaaataccttaaacatccacctgaaatcctactaccccctcttctgagataatttgcccagcccttctcttcccacacactcactcaatgtcacccccttctaatccccaaaactgtttttgtggtctttgtagcctatagtagttttctcacatctttccccctagacttttctgtttttcagtttcagacaaaaaaactcttcagctttttccagtgtgtctccttaacagtaactttaccacttgaaatcttatttcatagaaaaactaaattggtgtggaaaggctgcacacaataaagttatattattatccatgaaaatgaactcatatttctttcatactttaacgttaaaaccgaaatgcatgagagcaaaagcaccatggtgttctttctatttagggcctacctctaatatttaaaatctaccaaagagcagtcacaaaattaaaactcagcccgggcgcagtggctcatgcctgtaatcccagcactttgggaggccaaggcaggaggatcacctgaggtcagagttcaagaccagcatggtcaacatggtgaaaccctgtctctacaaaaatacaaaaagctgggcatgatgttgggttcctgtagtcccagctacttaggaggctgaggcaggagaatagcttgaacccgggaggtggaggttgcagtgagctgagatcatgccattgcactccagcctggacgacagagtgagattcagtctcaaaaaaaattaatactcaaagaattatctagcataatttaaaagaaaggactttttaaaaattctctagcataattcaaaagaaaggacttaacttttttttttttagtgtggtcatccgtctagttgttctttttttccagatcagagcagagaatatcactgacatgcttgaaatggtggataactatgtaaattgtaattggacaaatgtacactttagatttatggactgagccacatataataaggtctctcctggtaattgatccaggggatttaggcctctttcgggttttttgttttttttttaggcattgttatgttgtgaaggataaaatcttcaacatcttatgcaaatggatagtaggcatgatcctaaaggtttagttttacgatgctgcagagaagagaaatgtcttgacgttttgccacctgatgtagactttgtccccctctagtataaatgttgcatgttacctagataaacaactaaaaattgccttgagttatcacctgagctacttatgccaaggtcttgcctttctaaagctaataaggtgagaggtggatatctgtagctcttcggatgaaaaattgcattgtgggagataccaaaattgaggaaatagctcttcaaagaaaaattactgatatgatcattgtacttgtaaatgccttaagtagcaggcagtgactcaattttctactttaccattttacctttagcttttatgtatgaattataggtctgtggagattctgcctccccactaggccagtgtgtgtttaccatttattcattttctatcatacacaggtggattaaaatttacattaaaatttacattaaaataccatcatacttcaggcttctataacaaaatatcagactgggtggcttcaaaagcagacatttcttacagttctggaagctgggaagtcccacaatccacatgctggtaaatttggttcgtggtgaggcccctcttcctcttttactgaccacatccccaaaagtgtcaggtagacatgttacaaatagctctgtagagagccatgggaagagacaggaggcagatgtggaacataaagggtttagaaacttctgcaggcagcagtggcagggagcaagccctagagtgtctctttttacgagagcaggaatcccatcatgagagttccttcctcatgactttatctaaacccagtcacccccaacaaaggccccaccccctaaccccatcacattggctgttacggcttcaatgtaggggatggggcacaaacattcagtccataacgaatactgattcctcaaatagggtttaaacatagttaactgagcccccaaagaatgttaaaagagaaaatccattttatttgaatagatgcagtgaccacagcttcttccctcaaatcaacacattacagttagatgtctcccatctgaaattggatagcccactgaaattgaacatgccttctcttataaatgtgtggtgagaataaaagcaacaaagaaatgaatgtggtggctcacacctgtaatcctaacactttggaaggttgaggcaggaggatcctttgtgctcaagagtttgagaccagcctgagcaacacagtgagaccctgtctctacaaaaactaaaaaaattagctagggatggtggcacatgcctgtagtcccagctacttgggaggctgaggtgggaggattgcttgagcccaagaaggtcaaggctgccatgagccataatcacgccactgcactccagcctgggtgacagagaccctgtcttaaaataaaataaaaaaaaaaggaaaaggaaagacatacataccctcagttcttcgaaaaacagtcaacgtccaaaaagtttattttttgagtcacctttaatagagaaatttcccactggaaacagatccacctaagtgattatctagtatcagctgtatcaaggcaaaaggtaaaggttataagatgtaaatattagaccaaaatagccttttttaacaaacacaataatgctgtacgtctgtaacaaaacaaaatttgaaaaattgaggtaatgtacacagcgatgcacacacccccacaccacaccgtgattcctgagttttgatttggttgaattcaccttgtagttccctttcctgagaaaatacaggttcaacacatctagtccacgatgtacgtacaaggggaaggggtgaacaggaaatagactcccttattctgctcacatgagctggaacctgtactagctgcatatttcatagaccccagaggctcacctcaattgtactcctatgataaaatgtctctagcatttgtcatgagagaaactggctagaaatagtttgttcattgcgtccagcaagacacgcattgctgttgatatctttgtggctaagatggagaatgtgactggataatagttatccaggtggattactagctattgaaacagtctgagatagttgcatgatgattaacgttaaactgggagtaatttcaagtcatttggctaaaaatgaaaaaaaagtcccataaaaaggtatcaaatgtacagataatagggctggaattattaagtatgatgatgttattaacatctaaaattattttggccgggcaaggtgggtcacgcctgtaatctcagcactttgggatgccaagatgggtggatcacctgagttcaggagttcaagaccagcttggccaacatggcgaaacccgtctctactaaagaatacaaaaattagccaggtgttgtggcacatgcctgtactcccagctactcaggaggctgaggcagaagaatcatttgaaccccggaggtggaggttgcagtgagccgacattgtgccgcttcattccagcctgggcaacagagtgaaactcttgtctcaaaagtaaaaaaataataatgtttaaaaatatttcaatgtggagacaagctcaaaatgaaattagacacattccattacccaggtaaaagaaggggaagcctgacttgatagtagtattcaggaaaaaagagttggcagttttatttggccaaattccaatatcagctcatggtacagcacaccgggggagggggacgggaggcgagaactaaggctttttaagaatgtgttgatggaagtatgtgcctagatcaaaagaataatccccccggactccagtgtaagatcaattactgttggaatattgtgttcctttctagatatcacattttaagcagactttggccaagtagtacagtgtttgcaggagcagtaacaagatggtgataactttgaaaatacttctcaaaagaaaaataaaaaagaattagggaagttcagtctggagataattcagaaatacagatgataattgttttcaaattcttgaaggaaatgggagagagaataggctaattctgtattgcttcagaaaccaaatggaaacaattaaattccattagagaaacggttggaaaatatgaggaggatttagttcagtacgaggaagctgtttctaatactttttgttggttaaaaatacattccgctgctgtggaaagcctgtagctgccaggagtgttacagagggcattcctcccttgagttgacatttgtgccaaaccggcttttagggcttctccagcttttaagatgcgataatgataagatgatcatcgggaaaacatccctcagatgaaacgttcacaggctggctctgaaaactggcattcagatgattgcggctcccccatactgtaggaatattgtttatggcttaaggttgcctcgctcctcatctgtaatcagtgaaagtttatccagaggttaattaccggttttctggtgggtatctgggaactgaggatgggagattaactgttgtatatgaccatagtaaagcaaaagactgttagagaatgagtaaacgttcgttttcctccctacagaatttacagttactctctgtccattccactcactactgtcttcatcacacacacagaggcaaacgtctgattcagatagccaggtgtgccatgcatgcactccaccatattgtgatctcttcgaggcttgtttctgtcccctgtcctccacagtcctggattgttaatgaatagttcatacatgtttgttaaataaatataccttctttaaaatta

SEQ ID NO: 158901 - DNA, 1106 bp, Homo sapiens
  Payload ID: 11088
  Gene Symbol: NLN
  Gene Name: neurolysin (metallopeptidase M3 family)
  ENST ID: ENST00000509935
  CDS Start-End: 1-852
ggactttcatttgaacaaatgacagatgctcatgtttggaacaagagtgttacactttatactgtgaaggataaagctacaggagaagtattgggacagttctatttggacctctatccaagggaaggaaaatacaatcatgcggcctgcttcggtctccagcctggctgccttctgcctgatggaagccggatgatggcagtggctgccctcgtggtgaacttctcacagccagtggcaggtcgtccctctctcctgagacacgacgaggtgaggacttactttcatgagtttggtcacgtgatgcatcagatttgtgcacagactgattttgcacgatttagcggaacaaatgtggaaactgactttgtagaggtgccatcgcaaatgcttgaaaattgggtgtgggacgtcgattccctccgaagattgtcaaaacattataaagatggaagccctattgcagacgatctgcttgaaaaacttgttgcttctaggctggtcaacacaggtcttctgaccctgcgccagattgttttgagcaaagttgatcagtctcttcataccaacacatcgctggatgctgcaagtgaatatgccaaatactgctcagaaatattaggagttgcagctactccaggcacaaatatgccagctacctttggacatttggcagggggatacgatggccaatattatggatatctttggagtgaagtattttccatggatatgttttacagctgttttaaaaaagaagggataatgaatccagagacttctaaacatcatggaatctccttgatcatgtttcactattcaaagggagaggtggatcttgttcctttttgaagtaggagccaggctagccagtgttcccttctcctctaggagccatacacttgatggacataaaacattgcagagaaaacagaagccctttcttctaaaaagattacaactcatatttgcttcaaataagacctgaaatagctgctcactcctaaaagagtatctgaactttatgggaaaagaagagcaccatcaagtaggcaaccattcctggggagaagttgatttggctatcaggttaaataaacatcttt

SEQ ID NO: 158902 - DNA, 1658 bp, Homo sapiens
  Payload ID: 11088
  Gene Symbol: NLN
  Gene Name: neurolysin (metallopeptidase M3 family)
  ENST ID: ENST00000511299
  CDS Start-End: 1-1245
aaagaggaaaacaccataattttgcagcagctactcccactgcgaaccaaggtggccaaactactcggttatagcacacatgctgacttcgtccttgaaatgaacactgcaaagagcacaagccgcgtaacagcctttctagatgatttaagccagaagttaaaacccttgggtgaagcagaacgagagtttattttgaatttgaagaaaaaggaatgcaaagacaggggttttgaatatgatgggaaaatcaatgcctgggatctatattactacatgactcagacagaggaactcaagtattccatagaccaagagttcctcaaggaatacttcccaattgaggtggtcactgaaggcttgctgaacacctaccaggagttgttgggactttcatttgaacaaatgacagatgctcatgtttggaacaagagtgttacactttatactgtgaaggataaagctacaggagaagtattgggacagttctatttggacctctatccaagggaaggaaaatacaatcatgcggcctgcttcggtctccagcctggctgccttctgcctgatggaagccggatgatggcagtggctgccctcgtggtgaacttctcacagccagtggcaggtcgtccctctctcctgagacacgacgagactgattttgcacgatttagcggaacaaatgtggaaactgactttgtagaggtgccatcgcaaatgcttgaaaattgggtgtgggacgtcgattccctccgaagattgtcaaaacattataaagatggaagccctattgcagacgatctgcttgaaaaacttgttgcttctaggctggtcaacacaggtcttctgaccctgcgccagattgttttgagcaaagttgatcagtctcttcataccaacacatcgctggatgctgcaagtgaatatgccaaatactgctcagaaatattaggagttgcagctactccaggcacaaatatgccagctacctttggacatttggcagggggatacgatggccaatattatggatatctttggagtgaagtattttccatggatatgttttacagctgttttaaaaaagaagggataatgaatccagaggttggaatgaaatacagaaacctaatcctgaaacctgggggatctctggacggcatggacatgctccacaatttcttgaaacgtgagccaaaccaaaaagcgttcctaatgagtagaggcctgcatgctccgtgaactggggatctttggtagccgtccatgtctggaggacaagtcgacatcaccatgtgttactggcctggaaactgaagggagttttgcaagtgaaaatttagatttctattgacatccttttgttttctaattttaaaaattataaagatgtaaatggaattataaatactgtgacctaagaaaagacccactagaaagtaattgtactataaaatttcataaaactggatttgatttctttttatgaaagtttcatatgaatgtaacttgattttttactattataatctagataatatgatataagagggctaagaatttttaaattgaatcatatatatgatataatttgatccttcttgtatcttgaagttttgtacttgggatttctggactgataaatgaatcatcac

SEQ ID NO: 158903 - DNA, 1007 bp, Homo sapiens
  Payload ID: 11089
  Gene Symbol: NMB
  Gene Name: neuromedin B
  Uniprot ID: P08949
  ENST ID: ENST00000360476
  CDS Start-End: 397-762
gggctgaagtgcctatttggccgaaagccgtggcagagtggcaaggcagggccaggggaagcggctccgccgccggggccgggcccctgtttggccggtgcccggtccttagcctgaaggtggcgggcttccgccagaagcccctggcggaagcggtgcccgcgtgcgggccagagtgtgggtgtgcaggtctctgggcggcccaaagggggtgcccctgcctggtaacctagcgggagggtggggacggcggggagggcggcgggcgcggggcacggctccgctgctcagggcaggctccgcccccaggggcgcggatttaaaaggatcgaaggcagccccggagcccagcggccgggaagcgcgcccgaacgaagccgcggcccgggcacagccatggcccggcgggcggggggcgctcggatgttcggcagcctcctgctcttcgccctgctcgctgccggcgtcgccccgctcagctgggatctcccggagccccgcagccgagccagcaagatccgagtgcactcgcgaggcaacctctgggccaccggtcacttcatgggcaagaagagtctggagccttccagcccatccccattggggacagctccccacacctccctgagggaccagcgactgcagctgagtcatgatctgctcggaatcctcctgctaaagaaggctctgggcgtgagcctcagccgccccgcaccccaaatccagtacaggaggctgctggtacaaatactgcagaaatgacaccaataatggggcagacacaacagcgtggcttagattgtgcccacccagggaaggtgctgaatgggaccctgttgatggccccatctggatgtaaatcctgagctcaaatctctgttactccattactgtgatttctggctgggtcaccagaaatatcgctgatgcagacacagattatgttcctgctgtatttcctgcttccctgttgaattggtgaataaaaccttgctctttacatacaa

SEQ ID NO: 158904 - DNA, 1017 bp, Homo sapiens
  Payload ID: 11089
  Gene Symbol: NMB
  Gene Name: neuromedin B
  Uniprot ID: P08949
  ENST ID: ENST00000394588
  CDS Start-End: 412-876
gaagagaggctcagagggctgaagtgcctatttggccgaaagccgtggcagagtggcaaggcagggccaggggaagcggctccgccgccggggccgggcccctgtttggccggtgcccggtccttagcctgaaggtggcgggcttccgccagaagcccctggcggaagcggtgcccgcgtgcgggccagagtgtgggtgtgcaggtctctgggcggcccaaagggggtgcccctgcctggtaacctagcgggagggtggggacggcggggagggcggcgggcgcggggcacggctccgctgctcagggcaggctccgcccccaggggcgcggatttaaaaggatcgaaggcagccccggagcccagcggccgggaagcgcgcccgaacgaagccgcggcccgggcacagccatggcccggcgggcggggggcgctcggatgttcggcagcctcctgctcttcgccctgctcgctgccggcgtcgccccgctcagctgggatctcccggagccccgcagccgagccagcaagatccgagtgcactcgcgaggcaacctctgggccaccggtcacttcatgggcaagaagagtctggagccttccagcccatccccattggggacagctccccacacctccctgagggaccagcgactgcagctgagtcatgatctgctcggaatcctcctgctaaagaaggctctgggcgtgagcctcagccgccccgcaccccaaatccaggaggctgctggtacaaatactgcagaaatgacaccaataatggggcagacacaacagcgtggcttagattgtgcccacccagggaaggtgctgaatgggaccctgttgatggccccatctggatgtaaatcctgagctcaaatctctgttactccattactgtgatttctggctgggtcaccagaaatatcgctgatgcagacacagattatgttcctgctgtatttcctgcttccctgttgaattggtgaataaaaccttgctctttacatacaa

SEQ ID NO: 158905 - DNA, 1354 bp, Homo sapiens
  Payload ID: 11090
  Gene Symbol: NMBR
  Gene Name: neuromedin B receptor
  Uniprot ID: P28336
  ENST ID: ENST00000258042
  CDS Start-End: 142-1314
gtgctgtgaggcttgccccgcggacagtaaacttgcaggggcgagagggagggacatcgattaaacctaaatcgtgggcgttcagtcctcagggcaccggagcgcgtgaaaactccagcggactctgctggaaaggagatcatgccctctaagtctctttccaacctctcggtgaccaccggcgcgaatgagagcggttccgttcccgaggggtgggaaagggatttcctgccggcctcggacgggaccaccacggagttggtgatccgctgtgtgatcccgtccctctacctgctcatcatcaccgtgggcttgctgggcaacatcatgctggtgaagatcttcatcaccaacagcgccatgaggagcgtccccaacatcttcatctctaacctggcggccggggacttgctgctgctgctcacctgcgtcccggtggacgcctcgcgctacttcttcgacgagtggatgtttggcaaggtgggctgcaaactgatccctgtcatccagctcacttccgtgggggtttccgtgttcactctcactgccctcagcgccgacaggtacagagccatcgttaaccccatggacatgcagacgtcaggggcattgctgcggacctgtgtgaaggccatgggtatctgggtggtctccgtgttgctggcagttcccgaagcggtgttttcagaagtggctcgcatcagtagcttggataatagcagcttcacagcatgtatcccataccctcaaacagatgaattacatccaaagattcattcagtgctcattttcttggtctatttcctcataccacttgctattattagcatttattattatcatattgcaaagaccttaattaaaagcgcacacaatcttcctggagaatacaatgaacataccaaaaaacagatggaaacacggaaacgcctggctaaaattgtgcttgtctttgtgggctgtttcatcttctgttggtttccaaaccacatcctttacatgtatcggtctttcaactataatgagattgatccatctctaggccacatgattgtcaccttagttgcccgggttctcagttttggcaattcttgtgtcaacccatttgctctttacctactcagtgaaagcttcaggaggcatttcaacagccaactctgctgtgggaggaagtcctatcaagagagaggaaccagctacctactcagctcttcagcggtgcgtatgacatctctgaaaagcaatgctaagaacatggtgaccaattctgttttactaaatgggcacagcatgaagcaggaaatggcactgtgattttggccattcaactcactacctggagagaacttagtaa

SEQ ID NO: 158906 - DNA, 485 bp, Homo sapiens
  Payload ID: 11091
  Gene Symbol: NMS
  Gene Name: neuromedin S
  Uniprot ID: Q5H8A3
  ENST ID: ENST00000376865
  CDS Start-End: 8-469
tctcacaatgaaacatcttcgtccccagttccctctcatcttggccatctactgcttctgcatgctacagattccctcctcaggatttcctcaacctttagctgatccttcagatggcttggatattgtgcagcttgagcagctggcatattgtctgagtcagtgggcacctctttctcgccaacctaaggataatcaagacatatacaaaaggtttttgtttcactactccagaactcaggaggcaacacatccagttaaaactgggtttcctccagtgcatcctctaatgcacctggctgccaagctcgccaacaggcggatgaagagaattctgcagcgaggctcggggactgctgcagtggacttcaccaagaaggatcacactgcgacctggggacgaccctttttccttttcaggcccaggaatggaagaaacattgaagatgaggcccagattcagtggtgaaagaaagctggatctg

SEQ ID NO: 158907 - DNA, 816 bp, Homo sapiens
  Payload ID: 11092
  Gene Symbol: NMU
  Gene Name: neuromedin U
  Uniprot ID: P48645
  ENST ID: ENST00000264218
  CDS Start-End: 107-631
agtcctgtgtccgggccccgaggcacagccagggcaccaggtggagcaccagctacgcgtggcgcagcgcagcgtccctagcaccgagcctcccgcagccgccgagatgctgcgaacagagagctgccgccccaggtcgcccgccggacaggtggccgcggcgtccccgctcctgctgctgctgctgctgctcgcctggtgcgcgggcgcctgccgaggtgctccaatattacctcaaggattacagcctgaacaacagctacagttgtggaatgagatagatgatacttgttcgtcttttctgtccattgattctcagcctcaggcatccaacgcactggaggagctttgctttatgattatgggaatgctaccaaagcctcaggaacaagatgaaaaagataatactaaaaggttcttatttcattattcgaagacacagaagttgggcaagtcaaatgttgtgtcgtcagttgtgcatccgttgctgcagctcgttcctcacctgcatgagagaagaatgaagagattcagagtggacgaagaattccaaagtccctttgcaagtcaaagtcgaggatattttttattcaggccacggaatggaagaaggtcagcagggttcatttaaaatggatgccagctaattttccacagagcaatgctatggaatacaaaatgtactgacattttgttttcttctgaaaaaaatccttgctaaatgtactctgttgaaaatccctgtgttgtcaatgttctcagttgtaacaatgttgtaaatgttcaatttgttgaaaattaaaaaatctaaaaata

SEQ ID NO: 158908 - DNA, 756 bp, Homo sapiens
  Payload ID: 11092
  Gene Symbol: NMU
  Gene Name: neuromedin U
  ENST ID: ENST00000511469
  CDS Start-End: 93-569
gccccgaggcacagccagggcaccaggtggagcaccagctacgcgtggcgcagcgcagcgtccctagcaccgagcctcccgcagccgccgagatgctgcgaacagagagctgccgccccaggtcgcccgccggacaggtggccgcggcgtccccgctcctgctgctgctgctgctgctcgcctggtgcgcgggcgcctgccgaggtgctccaatattacctcaaggattacagcctgaacaacagctacagttgtggaatgaggcatccaacgcactggaggagctttgctttatgattatgggaatgctaccaaagcctcaggaacaagatgaaaaagataatactaaaaggttcttatttcattattcgaagacacagaagttgggcaagtcaaatgttgtgtcgtcagttgtgcatccgttgctgcagctcgttcctcacctgcatgagagaagaatgaagagattcagagtggacgaagaattccaaagtccctttgcaagtcaaagtcgaggatattttttattcaggccacggaatggaagaaggtcagcagggttcatttaaaatggatgccagctaattttccacagagcaatgctatggaatacaaaatgtactgacattttgttttcttctgaaaaaaatccttgctaaatgtactctgttgaaaatccctgtgttgtcaatgttctcagttgtaacaatgttgtaaatgttcaatttgttgaaaattaaaaaatctaaaaatatt

SEQ ID NO: 158909 - DNA, 658 bp, Homo sapiens
  Payload ID: 11092
  Gene Symbol: NMU
  Gene Name: neuromedin U
  ENST ID: ENST00000507338
  CDS Start-End: 77-526
agggcaccaggtggagcaccagctacgcgtggcgcagcgcagcgtccctagcaccgagcctcccgcagccgccgagatgctgcgaacagagagctgccgccccaggtcgcccgccggacaggtggccgcggcgtccccgctcctgctgctgctgctgctgctcgcctggtgcgcgggcgcctgccgaggtgctccaatattacctcaaggattacagcctgaacaacagctacagttgtggaatgagatagatgatacttgttcgtcttttctgtccattgattctcagcctcaggcatccaacgcactggaggagctttgctttatgattatgggaatgctaccaaagcctcaggaacaagatgaaaaagataatactaaaaggttcttatttcattattcgaagacacagaagttgggcaagtcaaatgttgtggaagaattccaaagtccctttgcaagtcaaagtcgaggatattttttattcaggccacggaatggaagaaggtcagcagggttcatttaaaatggatgccagctaattttccacagagcaatgctatggaatacaaaatgtactgacattttgttttcttctgaaaaaaatccttgctaaatgtactctgttgaaaatccctgtgttgtcaatgttctcagt

SEQ ID NO: 158910 - DNA, 693 bp, Homo sapiens
  Payload ID: 11092
  Gene Symbol: NMU
  Gene Name: neuromedin U
  ENST ID: ENST00000505262
  CDS Start-End: 68-511
ggtggagcaccagctacgcgtggcgcagcgcagcgtccctagcaccgagcctcccgcagccgccgagatgctgcgaacagagagctgccgccccaggtcgcccgccggacaggtggccgcggcgtccccgctcctgctgctgctgctgctgctcgcctggtgcgcgggcgcctgccgaggtgctccaatattacctcaaggattacagcctgaacaacagctacagttgtggaatgagatagatgatacttgttcgtcttttctgtccattgattctcagcctcaggcatccaacgcactggaggagctttgctttatgattatgggaatgctaccaaagcctcagtcgtcagttgtgcatccgttgctgcagctcgttcctcacctgcatgagagaagaatgaagagattcagagtggacgaagaattccaaagtccctttgcaagtcaaagtcgaggatattttttattcaggccacggaatggaagaaggtcagcagggttcatttaaaatggatgccagctaattttccacagagcaatgctatggaatacaaaatgtactgacattttgttttcttctgaaaaaaatccttgctaaatgtactctgttgaaaatccctgtgttgtcaatgttctcagttgtaacaatgttgtaaatgttcaatttgttgaaaattaaaaaatctaaaa

SEQ ID NO: 158911 - DNA, 3298 bp, Homo sapiens
  Payload ID: 11093
  Gene Symbol: NMUR1
  Gene Name: neuromedin U receptor 1
  Uniprot ID: Q9HB89
  ENST ID: ENST00000305141
  CDS Start-End: 135-1415
ggcgttcccggccggacaggcggggcgtcggggcgcgggctggggccgctgtcagtcagtccactggctcccgcgccgcgtctgtgtccgtcgctcggagggtggaagccggggtctcgcgggccgcgggccgcatgactcctctctgcctcaattgctctgtcctccctggagacctgtacccagggggtgcaaggaaccccatggcttgcaatggcagtgcggccagggggcactttgaccctgaggacttgaacctgactgacgaggcactgagactcaagtacctggggccccagcagacagagctgttcatgcccatctgtgccacatacctgctgatcttcgtggtgggcgctgtgggcaatgggctgacctgtctggtcatcctgcgccacaaggccatgcgcacgcctaccaactactacctcttcagcctggccgtgtcggacctgctggtgctgctggtgggcctgcccctggagctctatgagatgtggcacaactaccccttcctgctgggcgttggtggctgctatttccgcacgctactgtttgagatggtctgcctggcctcagtgctcaacgtcactgccctgagcgtggaacgctatgtggccgtggtgcacccactccaggccaggtccatggtgacgcgggcccatgtgcgccgagtgcttggggccgtctggggtcttgccatgctctgctccctgcccaacaccagcctgcacggcatccggcagctgcacgtgccctgccggggcccagtgccagactcagctgtttgcatgctggtccgcccacgggccctctacaacatggtagtgcagaccaccgcgctgctcttcttctgcctgcccatggccatcatgagcgtgctctacctgctcattgggctgcgactgcggcgggagaggctgctgctcatgcaggaggccaagggcaggggctctgcagcagccaggtccagatacacctgcaggctccagcagcacgatcggggccggagacaagtgaccaagatgctgtttgtcctggtcgtggtgtttggcatctgctgggccccgttccacgccgaccgcgtcatgtggagcgtcgtgtcacagtggacagatggcctgcacctggccttccagcacgtgcacgtcatctccggcatcttcttctacctgggctcggcggccaaccccgtgctctatagcctcatgtccagccgcttccgagagaccttccaggaggccctgtgcctcggggcctgctgccatcgcctcagaccccgccacagctcccacagcctcagcaggatgaccacaggcagcaccctgtgtgatgtgggctccctgggcagctgggtccaccccctggctgggaacgatggcccagaggcgcagcaagagaccgatccatcctgagtggagccttaaagtggcttcacctggaggggccagagggtcacctggagctggggagacacatctgccttcctctgcagggatgccttcacgtactgtccctagttcagcctagaaattctgaccagcacctcagtttccctcagagggaaacagcaggaggagggatccctgactgctgaggactcacactgaccagacgccacaccttgtgcttcttatctgtccactgccactcccccagttcaaatccttaccctgcagaaatatcacagttagctggggctcagcagtcctccctctggggactccctgccaccactgccagtttctgaaacggtcccactgggtcctcactgtccttcccagttcctgttcaggttctggcaggggcccagggatccaggggacctggttccaatctcagccctgctgtcaccaccttgtcatgcaccatcaagcatatcagtctacctttctttttttctgagacagagtctcactctgtcgcccaggctagagtgcagtggcgcgattttggctcactgcaacctccgcctccggggttcaagcgattctcctgcctcagcctcccgagtagctgggactacaggtgagccccagcatgcccagctaattttttttaatttttagtagagacggggtttcaccatgttggccaggctggtctcaaactcttgacctcaggtgatccgccgacctcggcctcccaaagtcctcggattacaggcatgagccaccacacccggccaatcagtccacctttctaggccttggttccttgcctgaaaaatgaaagaggcgctggctttccacagtgtcatgctttggcactttagctatggttttctttctgtgtgtgtgtaagccactgcttataataaaaccaacaataccctcagactgaaagggcggaagttattatctgcatctttatcaaccccaagccccacttcctccctgacctccccatgccctccccagcctctcccagcacaagtggggcaaagccagcatgcaagcagaccccaccaccacagcccacctccgtcctcacatacgtgcaggctggctcgggagtccagtgagcagagcattggacttggctggccagagggtctctgagggcaagagacatggccaaccaagggcaaggagtgaccctgtggagggttctgccgaactcaatgcagtgagaagagggacagggacaagtagtccttgaaactgagccccattctgaatccctgcaggccaagtcattgctcagccaggactcagttcatggaggaaacttgtcctgctgcagtccctgagtcttgtcctcctgagaggaagccctggcttccaaggctgggagctggaggatgaccttcggtcggtctgtctgggttctccctgcagacagcttcctagctcatgcccatagctcatgctccctgccgagaaagtggaggacgtggtacagggttgcagatgtttagttttaaaaattcaattataaaaataataaatgctcatgatagaaaatttggaaagtgcaaataagcaaaaatgaaaacaattttaaaaatgtaaaacctctcttgccagggaatgggggaagggcaagtgaggagttctttaatgggtgaagagtttcagttttgcaaaatgaaaaagttctggagatcagttgtgcaacaatatgaatatacataacaatactgaactatacactgaaatggttaagatggtacattttatgttatgtgtattttaccacaatttttataaaaagaggattaaatctaaaggaaagaaaaaattaaaaccacccataactttactctgaagcagtaacagtggcatgtttcctccta

SEQ ID NO: 158912 - DNA, 2073 bp, Homo sapiens
  Payload ID: 11094
  Gene Symbol: NMUR2
  Gene Name: neuromedin U receptor 2
  Uniprot ID: Q9GZQ4
  ENST ID: ENST00000255262
  CDS Start-End: 167-1414
aacctggagggtgaaacactcactctctcccagccttccttacgaagcctgtgactttcgtgactgctttctcttttttgttttccttttttcttttttttttttttttcctggctcagcttgaaacagagcctcgtaccaggggaggctcaggccttggattttaatgtcagggatggaaaaacttcagaatgcttcctggatctaccagcagaaactagaagatccattccagaaacacctgaacagcaccgaggagtatctggccttcctctgcggacctcggcgcagccacttcttcctccccgtgtctgtggtgtatgtgccaatttttgtggtgggggtcattggcaatgtcctggtgtgcctggtgattctgcagcaccaggctatgaagacgcccaccaactactacctcttcagcctggcggtctctgacctcctggtcctgctccttggaatgcccctggaggtctatgagatgtggcgcaactaccctttcttgttcgggcccgtgggctgctacttcaagacggccctctttgagaccgtgtgcttcgcctccatcctcagcatcaccaccgtcagcgtggagcgctacgtggccatcctacacccgttccgcgccaaactgcagagcacccggcgccgggccctcaggatcctcggcatcgtctggggcttctccgtgctcttctccctgcccaacaccagcatccatggcatcaagttccactacttccccaatgggtccctggtcccaggttcggccacctgtacggtcatcaagcccatgtggatctacaatttcatcatccaggtcacctccttcctattctacctcctccccatgactgtcatcagtgtcctctactacctcatggcactcagactaaagaaagacaaatctcttgaggcagatgaagggaatgcaaatattcaaagaccctgcagaaaatcagtcaacaagatgctgtttgtcttggtcttagtgtttgctatctgttgggccccgttccacattgaccgactcttcttcagctttgtggaggagtggagtgaatccctggctgctgtgttcaacctcgtccatgtggtgtcaggtgtcttcttctacctgagctcagctgtcaaccccattatctataacctactgtctcgccgcttccaggcagcattccagaatgtgatctcttctttccacaaacagtggcactcccagcatgacccacagttgccacctgcccagcggaacatcttcctgacagaatgccactttgtggagctgaccgaagatataggtccccaattcccatgtcagtcatccatgcacaactctcacctcccagcagccctctctagtgaacagatgtcaagaacaaactatcaaagcttccactttaacaaaacctgaattctttcagagctgactctcctctatgcctcaaaacttcagagaggaacatcccataatgtatgccttctcatatgatattagagaggtagaatggctcttacaactcatgtacccattgctagtttttttttttttaataaacgtgaaaactgagagttagatctggtttcaaaacccaagactgcctgatttttagttatctttccactatcctaactgcctcatgccccttcactagttcatgccaagaacgtgactggaaaggcatggcacctataccttgattaatttccattaatggaaatggttcgtcctgagtcatctacgttccgagtcaggctgtcactcctactaccaatggccactgtgagccacagaaggaagacatgtacgtgctgttctactttatatgatgtgagaagccaacatcagtgtcccttggcagcagtctacaggcataacttgttttattgtgctgaattttattgtgcttctcaaatattgcacttttaaaaaaattgaaagtttgtggcaatgctgttgagcaaatctgctggcatctttcttcccaaaggcatgtgctcacttcatgtctctgtatcaattgtcataattttcgcaataaacttgattattattatatgtgcttatggtga

SEQ ID NO: 158913 - DNA, 11645 bp, Homo sapiens
  Payload ID: 11095
  Gene Symbol: NAV1
  Gene Name: neuron navigator 1
  Uniprot ID: Q8NEY1
  ENST ID: ENST00000367295
  CDS Start-End: 157-4608
ggagaaaagggagcggagggcaggcgagggttaggtttccgaccctccgcgtggcccacagctcataccttttcgggtgtccccgggtgtcaggcgagagcggtcctggggggcgctgggtgcccacccggtgaatggccgcctgagccggggaagatgcttcatctgcccctgcccagatccggaagaacggtgaatttcccccgcagctgggatgaaagcagctccatcagtagtggactcagcgatgcctcagacaatctcagttcagaagaattcaatgccagctcctcactcaactccctcccaagtactcccactgcttctcgcaggaactcaacaatagtgctacgcacagactcagagaagcgctcactggcagaaagtgggctgagctggtttagtgaatcagaggagaaagcccctaaaaaactggagtacgacagtggtagcctgaagatggaacctgggacttctaagtggcggagggagcggcctgagagctgtgatgattcatccaagggtggagaactgaaaaagcccatcagcctgggccaccctggttccctgaagaagggcaagaccccacctgtggctgtaacttcccccatcactcacacagcccagagtgccctcaaagtcgcaggcaaacctgagggcaaagctacagacaagggtaagcttgcagtgaagaatactgggctccaacgctcctcctctgatgctggtcgggaccgcctgagtgatgctaagaagcccccctcgggcattgctcgcccctccacttcgggatcctttggctacaagaagcctcctcctgccacaggcacagccactgtcatgcaaactggtggttcagccactctcagcaagatccagaagtcctcaggcatccctgtcaagccagtaaatgggcgcaagactagcttagatgtttccaacagtgcagagccaggattcctggctcctggagcccgttctaacatccagtaccgcagcctgccccggccagccaagtcaagttctatgagcgtgaccggcgggcggggtggacctcgccctgtgagcagcagcattgaccccagtctcctcagcaccaagcagggaggccttacgccttccagactgaaggagcctaccaaggtagccagtgggcggaccactccagcccctgtcaatcagacagatcgggaaaaggagaaggccaaagccaaggcagtggccttggactcagacaacatctccttgaagagtattggctccccagaaagtactcccaagaaccaagcaagccaccccacagccaccaagctggcagagctgccaccaacccctctcagggccacagcgaagagctttgtcaaaccaccctcactagccaatcttgacaaggtcaactccaacagtctggatctaccatcatccagtgataccacccatgcttcaaaggtcccagatctgcatgctacaagctcagcatctgggggccctctcccttcctgcttcacccccagtccggcacccatcctcaatattaactcagccagcttctcccagggcctggagctaatgagtggtttcagtgtgccaaaagagacccgcatgtaccccaaactctcaggcctgcacaggagcatggagtccctccagatgccaatgagcctccccagtgccttccccagcagtactcccgtccccaccccacctgctccccctgctgctcccacagaagaagagacggaagagctgacttggagtggaagccccagagctgggcaactggacagtaatcagcgggatcggaacactcttcccaagaaagggctcaggtaccagcttcagtcccaggaggagaccaaggagaggcgacattcccataccattggtgggctgcctgaatccgatgaccagtcagagctgccttctccccctgcacttcccatgtctctgagtgcaaagggccaacttaccaacatagtgagtcccactgcggccaccacgccaagaatcacccgctccaacagcatccccacccacgaggcggccttcgagctgtacagcggctcccaaatggggagcaccctgtccctggccgagagacccaagggaatgattcggtcaggatccttccgagaccccacggacgatgttcacggctcagtgctgtccctggcctccagtgcctcctccacctactcctcagctgaggagaggatgcaatctgagcaaatccggaagcttcgtagggaactggaatcatcccaggaaaaagtggccaccttgacgtctcagctttctgccaatgctaatctggtggctgcttttgagcagagcctggtgaatatgacatcccgcctgcgacacctggcagagacggccgaggagaaggacactgagctgctggatttgcgagaaaccatagactttctgaagaaaaagaactctgaggcccaggcagtcattcagggagcccttaatgcctcagaaaccacacccaaagaacttcggatcaagagacaaaactcctcagatagcatctcaagcctcaacagcatcactagccattccagcatcggcagcagcaaggatgctgatgcgaaaaagaagaaaaaaaagagttggcttcgaagttccttcaacaaagcgttcagtataaaaaaggggcccaagtcagcttcctcatactcggatatagaggagattgctacacccgactcttcagccccctcatcccccaaactacagcatggttctacagagactgcttcaccctccatcaagtcctccacctcgtcctccgtgggcactgatgtcaccgagggccctgctcacccagccccccacactaggctgttccatgcaaatgaggaggaggagccagagaagaaggaggtatcggagctgcgctctgagctatgggagaaggaaatgaagcttacagacatccgcttggaggccctcaactctgcccaccaactggatcagcttcgggagaccatgcacaacatgcagttggaggtggacctgctgaaagcagagaatgaccgactgaaggtagccccaggcccctcatcaggctccactccagggcaggtccctggatcatctgcattatcttccccacgccgctccctaggcctggcactcacccattccttcggccccagtcttgcagacacagacctgtcacccatggatggcatcagtacttgtggtccaaaggaggaagtgaccctccgggtggtggtgaggatgcccccgcagcacatcatcaaaggggacttgaagcagcaggaattcttcctgggctgtagcaaggtcagtggaaaagttgactggaagatgctggatgaagctgttttccaagtgttcaaggactatatttctaaaatggacccagcctctaccctgggactaagcactgagtccatccatggctacagcatcagccacgtgaaacgagtgttggatgcagagccccccgagatgcctccttgccgtcgaggtgtcaataacatatcagtctccctcaaaggtctgaaggagaaatgcgtcgacagcctggtgttcgagacgctgatccccaagccgatgatgcagcactacataagcctcctgctgaagcaccggcgcctcgtcctctcgggccccagcggcacgggcaagacctacctgaccaatcgcttggccgagtacctggtggagcgctctggccgtgaggtcacagagggcatcgtcagcaccttcaacatgcaccagcagtcttgcaaggatctgcaactgtatctttccaacctagccaaccagatagaccgggaaacaggaattggggatgtgcccctggtgattctattggatgacctgagtgaagcaggctccatcagtgagttggtcaatggggccctcacctgcaagtatcataaatgtccctatattataggtaccaccaatcagcctgtaaaaatgacacccaaccatggcttgcacttgagcttcaggatgttgaccttctccaacaacgtggagccagccaatggcttcctggttcgttacctgaggaggaagctggtagagtcagacagcgacatcaatgccaacaaggaagagctgcttcgggtgctcgactgggtacccaagctgtggtatcatctccacaccttccttgagaagcacagcacctcagacttcctcatcggcccttgcttctttctgtcgtgtcccattggcattgaggacttccggacctggttcattgacctgtggaacaactctatcattccctatctacaggaaggagccaaggatgggataaaggtccatggacagaaagctgcttgggaggacccagtggaatgggtccgggacacacttccctggccatcagcccaacaagaccaatcaaagctgtaccacctgcccccacccaccgtgggccctcacagcattgcctcacctcccgaggataggacagtcaaagacagcaccccaagttctctggactcagatcctctgatggccatgctgctgaaacttcaagaagctgccaactacattgagtctccagatcgagaaaccatcctggaccccaaccttcaggcaacactttaagggttcggcaatcactgtcacccccggacagcagaacgctggcatcagctatcttagctcctcctctcccctctcctctttcagagcactggctctccagccccaggaggagaacaggagggaggaggagatgaaagaggagggacaggttcttggtgctgtacctttgagaacttcctaggaaggaatggtggggtggcgtttgggaacttgtgccccctaaacacatttactggcctcctctaatgactttggggaaaagatgattctgggtctttcccttgacttcttgtttcaattacaaactcctgggctttctggggaggggttcagaaaacatcaaaacactgcagcagttcctaaatgattctcacaagcaaccctgagagagacagtcttgtgagggagatctgggggaggcaggaagctcctcagattttctcacagacccttcccaattccatcaccactgccaacaactcctcccccagagatctggctggagcccagaaaaagaagcatgtggtttaaaaaatgtttaaatcaatctgtaaaaggtaaaaatgaaaaacaaaaacaagcaaacaaacaaaaaacaatggaaaagatgaagctggagagagaggaaccagttgccaaggtagagagctgcccgctcctgccctctggatgacataggggacatcaacaagacggctgccaacctgagaagtcaccaaaccacaaaaataaccttacagccttcagggaaagactaccagctctgtctttctaccctctaatttaacaatgcataagagtcaataaaccctacttttttatttttggtttttattttgttttcatttttttctcccatttgcctatttatttttttgtttcccttttttttttctttttccgtttttccatttcctcacatgtccacgagatgcttgggttgcttttccaggggctagtttggcttttccaagtgggttttctttggagaatctgatgccatgcaattggcatgacacctgccatgccactatctttggcatccatggggcttatatgagacatgaagcattggctcagaagtagagggagaagaggaacccagttcccttgacttcccttttgagagcacacgttctgctgggtagctcaattgccagcctctgtcatgagaaggtatagccccatcttgatagaagagttactccgagctttatcatggaccagaggaaaaccagaaaactgaaaacattcctctgtcttgtggccagtttggcctttcactgcactattctgatggtgcctgactgaatccaaatatcctagctggctcttactatttttcacaaatgagtattcacatataagagatgaacatccatgtgagatcatcccaatcagaatataagactcaaggagtttgacttggtggccaatacctgccttccaaagagatcctacctttgcagatttgctcctttcccattgccttgaaggtctggcaatccctgttctttcatttgacaagtacttactgagtactcactatatacaaatcattaggttaaaacagacacacacacacacacacacacacacacacacacacacacacacacaagacctgggcccttaagtttacagtccagcaggaaatgttaacctccattcagctacgcccccttgttatctagaccttcgggatcatctaagaaatgtagctgaaacccaaggagccagctagaaagaagcttttgattagatgtacaatacattgggggcagaagatctgggatcaattaagatggagcctgaaggactatggaatcttgcttgtcaggaatgggcaagtctacttcctgccatttctgaaagccccgcgggaccagcttctaggctgagctgcctagtaggctgaagcttcaggactctgcaggtcaaggatatgtgatgagcaccggcctaagtgtttgctcttcagattcctaagtagcacaagactttatcagaatctataggcataccaacctggatcactcttccacccaaccgaggagtagatgcatctgaatcttcatatcggtatattaagtccaaaagatggtccgggctgcccctcacaaaagcttctgcatccacgtggtaagctcccatggatgacagggttctgtatgatggagactattattgctattgctgctaattccatgagctgtgaagatccctaaccaactcagctgtaacatatgcaattctgtggtgggaagaggctgtgtgtccaaggatggtgctgaaatcactgccttaaggtctctgctgtgcagaatgaggaggcccccgagctggctgttctaacttagaaggaagagaagactggatgggcctgcttgggatctaggcctcttctaaaccctatcctaagctccagttccatggcaaggctcagacttttaatgccatcttaatctgatggttgagcgcttcactctattttctggtgctgcccagccagtgccttctgccatggatgttactggctacttgagaaaaaggagaggggagaaccccttctttcattccaactgcctccgaccccaaagggattcttggctctctggtaaccatggataccaccatgaattttatttggatcctcagcaggttgattctggaggcctcatgctatgactttttatttctcttcctgggatccaccaccctctactctcagctgactgctgcatttaggccaggtctccaattgctttcctccagaaagtgtgttcccgtctagtgaggtagtattgaagcctcggctttccctctggagcctgggaccctgtttacagttgcacatctgggcccctcactgtggggattgatcattctcatgaaggaatcacagttatatggcaactgcagaaggctgagcctcctcatggtgctataaccccttgggacactcatccagacttctctgaagcagaaaacctgagctccccactcactgccctagaatttatggcaaggagcaaatctacagcattctctcccacctacgtcctgcttcttggttgagactactgggatccttcagaaaagaaacactgggtcccatagctaaattctcaaccgccaggcaccttcagaagaatccagcctaatactggaatttgtgctattatcttcctctccagccccccaactccatccctcaccacagttgtctaggaaatgacatgaattcaatatctaatgtcaaccaatggggagagccacaactccaggagaggttcctgagctgagtcccttaatttctggatgaagaagaccaacaagttttgtccaatgtatttgtttctcagaccttgcctaggcactaaaaataaaatactaggtcattggaggctaatgtgggacctgatgtctgcgtgtgtgtgtgtgtgtgtgtgtgtgtgtgtctccctctctcacacacacaagagcagtttgctgttgctgtttcctaccttctgaggcttcaaagtattttttaaaatctatgctttgtggcagctctacggtgcttatctctgtctttgtgtcaatccttaagtacccatgtctttttcatgtctaaccattgggaaggtagaggctggcagggaagacaaatctgctacaagtccatgggaagaccctacaatgaaatgttcattggttggtatactgttttagtcttgaattgccaactttccaactgatctatccatattccttaagtactaaagacaaaatagagggcttctttttctctcttaatgtcttgccttctggttttcctggtttgcaagactaagtgtacctaatctcaccatctcttcacttctagctctctgaaacaagggtcacactactcagagggataaccccttacagtggtctgaggagtaactatttcctaaagtattctaaaagagtaggaagagagaaatggtagcctgctgcttctcacagacacctcacatcctcacttgggatggcatccacatagaaaccctgcatttaggtaaaatttgcctgactgaaggggactcagtcctccaaatcaaggtcaagaagatatctgcatgagaccttaagaactctttattgccattatttggagagggcgggggaattgtcctaatcacacatttaacacagggaataagtgctgaagtgacccagatcaccaagcgcagttcctcatcatactttatttttgctttccttattccttggcactgactaagctaaagttaagaagccgacttcataagccaacccctgtgatgggatggaaaaatgggcttttgcagagggtttattaatagagatggatatactactcacaagttctggctcatggctccactgagaaggccatagtaataaaatgatcttatgaacactgttccccaaaggccaaagcctgaagatattgccccttataatccaatcagccttatattttaataagtcctgaatcaacctgactacggatatatggggccaccagggtgcatgggtgcatgtctgctcagcctagccctggaagtgagcactgccggccacagatcctgggaaaggtggtagtaacccagaagatgtagccttgaagggaggatacctatcaaaatgccaaagctgcagggacacgaagacggttgaaaattcaacctgtgtatactagatccttccagtttgatggtttggtcattcttcttcatgattataccatggagaattttctgtgacaagggtggtcatggaagtaagtgagtgatcccctggtttctcattccttaaagcagtggttcgcaaagtatggcacaagaccagcagcatcagcagcctttgggaacttgttagaaacgaaaattctcaatcccatcccagatctgctgaatcagaaactctaatgagaggacccggcaatccacgttttaataagccctcctggtgattctgatgcacactaaattcaactgttttaaagggaaagccctttatagtattggagttcccacactgagaggctttggggcccaaaataagaaggttctaggttgtcattcagactttaacattaatttcaaagtcacctttctcatgcttccttgtgtttctgtttttccatttatgattttaacaaagaaaggtatgtgtgcttttgggtggaagttaggagaatgtttgtgtctttcctagttgaatacaaccttcagagaaaaaccttatgccttggaaattactacctggcacacaaaggggcttcaacaaggaaaagcagttggaggtctcttccagattgctcttctgccgaattatttgtatctattccgagctgattatgtaataggatggaaaaagtaaaaaaaaaaaaaaaaatctaatttgtatttccatgacaacgtgttctcccagcaacatccctctcctttatttgagttataaagggcactgctgggcctgagaaccaggccagaacctccttctgtatggcagctaacagtgtagggctccagtatcccaggaaggccccttatccacactccactcagctcataggagagtcttgcataatgaagacacagacctgggcacttcagtccttgtgctcctcctctcttttccccacagcaggacctggatacagaagtactcagccaaggtgacagaataaaatcctttttttgttgttttctgtttgtttgtttgttttggagaaggagtctcgctttgtcacccaggctggtgtgcagtggcacgatctcggctcactgcaacctccgcctcccaggttcaagcgattctcctgtctcagcctcctgagtagctgggattacagacgtgcgccatcacgcccagctaatttttgtatttttagtagatacggagttttgccttgttggccaggctgtgctggagctcctgacctcaggtgattcacctgccacagcctcccaaagtgctgggattacaggcgtgagccacagcaccctgccaaataagatcctttttaaaaaatatctgaaaaaagcttcatatctttacaaactcataaaatagctgattgggccatggaggagatgaggctgtttagaactggttttgtttcaagtttgtcaattttccctgtatgagaacttgggtaaagcacaaagaaacatacagtgctagtaacaggtctcctgcgccctggaactaagtgtttggaggaaggactaaaccccgggggaggtgagtataaaataattccactaagatcacctcctcagtccccagaaggctgatggtggatcctctggccatctcctgtggggtcttactgctcctctgccatttctctatgcctgaagacacgaagatgatatcaaggcagagctaccatatcgcagccagtctctaggctactgctgtgcagtggctcccactttctaatgcttttttgtttttgctttttctaacaaaacaatcttttttcaaaatgaattccaacccctgctagcttccttccccgcctccatactgttttaggcagcaccgtttatgtgacagagtccgtgtttctcaaatgcatggtgttcctcaggtggagagtgggcagaagtttttgcaacactttttttttaagttattgggtgcaaaatcccaaaccaggatatgtgtatgtctgtgtgtttatgttttttatttgaccctcccctctttcaacctacccccttttatatctaatgtagaaaaagcgaaattgaatctggaaagcaaactgttgtatatagttgcggtaacaatcatgaagagagagccgggctgtcccctcagtaattcattttaaataacaaattatttaaaaataaaattcatgccagagccagctgaagaggccttccttcatcaccactgaggccacccccaatctgggccctctgtccatctggcatgtctcctcccagcaagattcatctgttcaatgccatttgcgtttcaataaagttatctcctgtactgtc

SEQ ID NO: 158914 - DNA, 13091 bp, Homo sapiens
  Payload ID: 11095
  Gene Symbol: NAV1
  Gene Name: neuron navigator 1
  Uniprot ID: Q8NEY1
  ENST ID: ENST00000367296
  CDS Start-End: 421-6054
cacgggactgacaggcaggcaggccgcgggctgggatccggacaccaaagcaaaagcaccgctgggcgccggaggagccgcggggcttccatccttcctttgactgatttttaaattttaatttgtattttccccgccgccccgccccttttcctccgaccccgccctatcgctccccggcttccctgctctttcctttttcccggcttccttcctcgcgtttctttcccctgcgccctcggcttgcctctctccctcctccctcgctctctcccccttctctccccttcttcctcggtttcttccgtcctctctctccccctcctcctcccccgcctcctcctcctgcgctcccgccccctgccccctccccccgtgcctgcagacgcgcggatcgtccatgcgctcctcgcgggcagaatgctgggcagcagcgtcaagagcgtgcagcccgaggtggagctgagcagcggcggcggcgacgagggcgcggacgaaccgcggggcgccggcaggaaggcggcagcggcggacggcagaggcatgctgcccaagcgcgccaaggcgcccggcggcggcggcggcatggccaaggccagcgcggctgagctgaaggtcttcaagtccggcagcgtggacagccgtgtccccggcgggccgcccgcctccaacctgcgcaagcagaagtcactcaccaacctctcttttctcacggactccgagaaaaagctgcagctttatgagcccgaatggagcgacgatatggccaaggcgcccaaaggcttaggcaaggtggggtccaagggccgtgaagctccgctgatgtccaagacgctgtccaagtcggagcactcgctcttccaggccaagggcagcccggcgggcggcgccaagacccccctggctccgctcgcgcccaacctgggaaagccgagccggatccctcgaggaccctatgcggaggtcaagccgctcagcaaggcgcctgaagcggccgtgagcgaagatggcaaatcggacgacgagctgctctccagcaaggccaaggcgcaaaagagctctgggcctgtcccctctgccaagggccaggaggagcgcgccttcctcaaggtggaccccgagctggtggtgaccgtgctgggagacctggagcagctgctcttcagccagatgctggacccagagtcccagagaaagaggacagtgcagaatgtcctggatctccggcagaacctggaagagaccatgtccagcctgcgagggtcccaggtgactcacagctccctggagatgacctgctacgacagcgatgatgccaacccacgcagcgtgtccagcctctccaaccgctcgtcccctctgtcatggcgctatggccagtccagtccgcggctgcaggctggtgacgcgccctctgtgggtgggagctgccgctcggaggggacgcccgcctggtacatgcacggcgaacgggcccactactcccacaccatgcccatgcgcagccccagcaagctcagccatatctcccgcctggagctggtcgaatccctggactcggatgaggtggacctcaagtccggctacatgagcgacagtgacctcatgggcaagaccatgacggaggatgatgacatcactaccggctgggatgaaagcagctccatcagtagtggactcagcgatgcctcagacaatctcagttcagaagaattcaatgccagctcctcactcaactccctcccaagtactcccactgcttctcgcaggaactcaacaatagtgctacgcacagactcagagaagcgctcactggcagaaagtgggctgagctggtttagtgaatcagaggagaaagcccctaaaaaactggagtacgacagtggtagcctgaagatggaacctgggacttctaagtggcggagggagcggcctgagagctgtgatgattcatccaagggtggagaactgaaaaagcccatcagcctgggccaccctggttccctgaagaagggcaagaccccacctgtggctgtaacttcccccatcactcacacagcccagagtgccctcaaagtcgcaggcaaacctgagggcaaagctacagacaagggtaagcttgcagtgaagaatactgggctccaacgctcctcctctgatgctggtcgggaccgcctgagtgatgctaagaagcccccctcgggcattgctcgcccctccacttcgggatcctttggctacaagaagcctcctcctgccacaggcacagccactgtcatgcaaactggtggttcagccactctcagcaagatccagaagtcctcaggcatccctgtcaagccagtaaatgggcgcaagactagcttagatgtttccaacagtgcagagccaggattcctggctcctggagcccgttctaacatccagtaccgcagcctgccccggccagccaagtcaagttctatgagcgtgaccggcgggcggggtggacctcgccctgtgagcagcagcattgaccccagtctcctcagcaccaagcagggaggccttacgccttccagactgaaggagcctaccaaggtagccagtgggcggaccactccagcccctgtcaatcagacagatcgggaaaaggagaaggccaaagccaaggcagtggccttggactcagacaacatctccttgaagagtattggctccccagaaagtactcccaagaaccaagcaagccaccccacagccaccaagctggcagagctgccaccaacccctctcagggccacagcgaagagctttgtcaaaccaccctcactagccaatcttgacaaggtcaactccaacagtctggatctaccatcatccagtgataccacccatgcttcaaaggtcccagatctgcatgctacaagctcagcatctgggggccctctcccttcctgcttcacccccagtccggcacccatcctcaatattaactcagccagcttctcccagggcctggagctaatgagtggtttcagtgtgccaaaagagacccgcatgtaccccaaactctcaggcctgcacaggagcatggagtccctccagatgccaatgagcctccccagtgccttccccagcagtactcccgtccccaccccacctgctccccctgctgctcccacagaagaagagacggaagagctgacttggagtggaagccccagagctgggcaactggacagtaatcagcgggatcggaacactcttcccaagaaagggctcaggtaccagcttcagtcccaggaggagaccaaggagaggcgacattcccataccattggtgggctgcctgaatccgatgaccagtcagagctgccttctccccctgcacttcccatgtctctgagtgcaaagggccaacttaccaacatagtgagtcccactgcggccaccacgccaagaatcacccgctccaacagcatccccacccacgaggcggccttcgagctgtacagcggctcccaaatggggagcaccctgtccctggccgagagacccaagggaatgattcggtcaggatccttccgagaccccacggacgatgttcacggctcagtgctgtccctggcctccagtgcctcctccacctactcctcagctgaggagaggatgcaatctgagcaaatccggaagcttcgtagggaactggaatcatcccaggaaaaagtggccaccttgacgtctcagctttctgccaatgctaatctggtggctgcttttgagcagagcctggtgaatatgacatcccgcctgcgacacctggcagagacggccgaggagaaggacactgagctgctggatttgcgagaaaccatagactttctgaagaaaaagaactctgaggcccaggcagtcattcagggagcccttaatgcctcagaaaccacacccaaagaacttcggatcaagagacaaaactcctcagatagcatctcaagcctcaacagcatcactagccattccagcatcggcagcagcaaggatgctgatgcgaaaaagaagaaaaaaaagagttgggtctatgagcttcgaagttccttcaacaaagcgttcagtataaaaaaggggcccaagtcagcttcctcatactcggatatagaggagattgctacacccgactcttcagccccctcatcccccaaactacagcatggttctacagagactgcttcaccctccatcaagtcctccacctcgtcctccgtgggcactgatgtcaccgagggccctgctcacccagccccccacactaggctgttccatgcaaatgaggaggaggagccagagaagaaggaggtatcggagctgcgctctgagctatgggagaaggaaatgaagcttacagacatccgcttggaggccctcaactctgcccaccaactggatcagcttcgggagaccatgcacaacatgcagttggaggtggacctgctgaaagcagagaatgaccgactgaaggtagccccaggcccctcatcaggctccactccagggcaggtccctggatcatctgcattatcttccccacgccgctccctaggcctggcactcacccattccttcggccccagtcttgcagacacagacctgtcacccatggatggcatcagtacttgtggtccaaaggaggaagtgaccctccgggtggtggtgaggatgcccccgcagcacatcatcaaaggggacttgaagcagcaggaattcttcctgggctgtagcaaggtcagtggaaaagttgactggaagatgctggatgaagctgttttccaagtgttcaaggactatatttctaaaatggacccagcctctaccctgggactaagcactgagtccatccatggctacagcatcagccacgtgaaacgagtgttggatgcagagccccccgagatgcctccttgccgtcgaggtgtcaataacatatcagtctccctcaaaggtctgaaggagaaatgcgtcgacagcctggtgttcgagacgctgatccccaagccgatgatgcagcactacataagcctcctgctgaagcaccggcgcctcgtcctctcgggccccagcggcacgggcaagacctacctgaccaatcgcttggccgagtacctggtggagcgctctggccgtgaggtcacagagggcatcgtcagcaccttcaacatgcaccagcagtcttgcaaggatctgcaactgtatctttccaacctagccaaccagatagaccgggaaacaggaattggggatgtgcccctggtgattctattggatgacctgagtgaagcaggctccatcagtgagttggtcaatggggccctcacctgcaagtatcataaatgtccctatattataggtaccaccaatcagcctgtaaaaatgacacccaaccatggcttgcacttgagcttcaggatgttgaccttctccaacaacgtggagccagccaatggcttcctggttcgttacctgaggaggaagctggtagagtcagacagcgacatcaatgccaacaaggaagagctgcttcgggtgctcgactgggtacccaagctgtggtatcatctccacaccttccttgagaagcacagcacctcagacttcctcatcggcccttgcttctttctgtcgtgtcccattggcattgaggacttccggacctggttcattgacctgtggaacaactctatcattccctatctacaggaaggagccaaggatgggataaaggtccatggacagaaagctgcttgggaggacccagtggaatgggtccgggacacacttccctggccatcagcccaacaagaccaatcaaagctgtaccacctgcccccacccaccgtgggccctcacagcattgcctcacctcccgaggataggacagtcaaagacagcaccccaagttctctggactcagatcctctgatggccatgctgctgaaacttcaagaagctgccaactacattgagtctccagatcgagaaaccatcctggaccccaaccttcaggcaacactttaagggttcggcaatcactgtcacccccggacagcagaacgctggcatcagctatcttagctcctcctctcccctctcctctttcagagcactggctctccagccccaggaggagaacaggagggaggaggagatgaaagaggagggacaggttcttggtgctgtacctttgagaacttcctaggaaggaatggtggggtggcgtttgggaacttgtgccccctaaacacatttactggcctcctctaatgactttggggaaaagatgattctgggtctttcccttgacttcttgtttcaattacaaactcctgggctttctggggaggggttcagaaaacatcaaaacactgcagcagttcctaaatgattctcacaagcaaccctgagagagacagtcttgtgagggagatctgggggaggcaggaagctcctcagattttctcacagacccttcccaattccatcaccactgccaacaactcctcccccagagatctggctggagcccagaaaaagaagcatgtggtttaaaaaatgtttaaatcaatctgtaaaaggtaaaaatgaaaaacaaaaacaagcaaacaaacaaaaaacaatggaaaagatgaagctggagagagaggaaccagttgccaaggtagagagctgcccgctcctgccctctggatgacataggggacatcaacaagacggctgccaacctgagaagtcaccaaaccacaaaaataaccttacagccttcagggaaagactaccagctctgtctttctaccctctaatttaacaatgcataagagtcaataaaccctacttttttatttttggtttttattttgttttcatttttttctcccatttgcctatttatttttttgtttcccttttttttttctttttccgtttttccatttcctcacatgtccacgagatgcttgggttgcttttccaggggctagtttggcttttccaagtgggttttctttggagaatctgatgccatgcaattggcatgacacctgccatgccactatctttggcatccatggggcttatatgagacatgaagcattggctcagaagtagagggagaagaggaacccagttcccttgacttcccttttgagagcacacgttctgctgggtagctcaattgccagcctctgtcatgagaaggtatagccccatcttgatagaagagttactccgagctttatcatggaccagaggaaaaccagaaaactgaaaacattcctctgtcttgtggccagtttggcctttcactgcactattctgatggtgcctgactgaatccaaatatcctagctggctcttactatttttcacaaatgagtattcacatataagagatgaacatccatgtgagatcatcccaatcagaatataagactcaaggagtttgacttggtggccaatacctgccttccaaagagatcctacctttgcagatttgctcctttcccattgccttgaaggtctggcaatccctgttctttcatttgacaagtacttactgagtactcactatatacaaatcattaggttaaaacagacacacacacacacacacacacacacacacacacacacacacacacaagacctgggcccttaagtttacagtccagcaggaaatgttaacctccattcagctacgcccccttgttatctagaccttcgggatcatctaagaaatgtagctgaaacccaaggagccagctagaaagaagcttttgattagatgtacaatacattgggggcagaagatctgggatcaattaagatggagcctgaaggactatggaatcttgcttgtcaggaatgggcaagtctacttcctgccatttctgaaagccccgcgggaccagcttctaggctgagctgcctagtaggctgaagcttcaggactctgcaggtcaaggatatgtgatgagcaccggcctaagtgtttgctcttcagattcctaagtagcacaagactttatcagaatctataggcataccaacctggatcactcttccacccaaccgaggagtagatgcatctgaatcttcatatcggtatattaagtccaaaagatggtccgggctgcccctcacaaaagcttctgcatccacgtggtaagctcccatggatgacagggttctgtatgatggagactattattgctattgctgctaattccatgagctgtgaagatccctaaccaactcagctgtaacatatgcaattctgtggtgggaagaggctgtgtgtccaaggatggtgctgaaatcactgccttaaggtctctgctgtgcagaatgaggaggcccccgagctggctgttctaacttagaaggaagagaagactggatgggcctgcttgggatctaggcctcttctaaaccctatcctaagctccagttccatggcaaggctcagacttttaatgccatcttaatctgatggttgagcgcttcactctattttctggtgctgcccagccagtgccttctgccatggatgttactggctacttgagaaaaaggagaggggagaaccccttctttcattccaactgcctccgaccccaaagggattcttggctctctggtaaccatggataccaccatgaattttatttggatcctcagcaggttgattctggaggcctcatgctatgactttttatttctcttcctgggatccaccaccctctactctcagctgactgctgcatttaggccaggtctccaattgctttcctccagaaagtgtgttcccgtctagtgaggtagtattgaagcctcggctttccctctggagcctgggaccctgtttacagttgcacatctgggcccctcactgtggggattgatcattctcatgaaggaatcacagttatatggcaactgcagaaggctgagcctcctcatggtgctataaccccttgggacactcatccagacttctctgaagcagaaaacctgagctccccactcactgccctagaatttatggcaaggagcaaatctacagcattctctcccacctacgtcctgcttcttggttgagactactgggatccttcagaaaagaaacactgggtcccatagctaaattctcaaccgccaggcaccttcagaagaatccagcctaatactggaatttgtgctattatcttcctctccagccccccaactccatccctcaccacagttgtctaggaaatgacatgaattcaatatctaatgtcaaccaatggggagagccacaactccaggagaggttcctgagctgagtcccttaatttctggatgaagaagaccaacaagttttgtccaatgtatttgtttctcagaccttgcctaggcactaaaaataaaatactaggtcattggaggctaatgtgggacctgatgtctgcgtgtgtgtgtgtgtgtgtgtgtgtgtgtgtctccctctctcacacacacaagagcagtttgctgttgctgtttcctaccttctgaggcttcaaagtattttttaaaatctatgctttgtggcagctctacggtgcttatctctgtctttgtgtcaatccttaagtacccatgtctttttcatgtctaaccattgggaaggtagaggctggcagggaagacaaatctgctacaagtccatgggaagaccctacaatgaaatgttcattggttggtatactgttttagtcttgaattgccaactttccaactgatctatccatattccttaagtactaaagacaaaatagagggcttctttttctctcttaatgtcttgccttctggttttcctggtttgcaagactaagtgtacctaatctcaccatctcttcacttctagctctctgaaacaagggtcacactactcagagggataaccccttacagtggtctgaggagtaactatttcctaaagtattctaaaagagtaggaagagagaaatggtagcctgctgcttctcacagacacctcacatcctcacttgggatggcatccacatagaaaccctgcatttaggtaaaatttgcctgactgaaggggactcagtcctccaaatcaaggtcaagaagatatctgcatgagaccttaagaactctttattgccattatttggagagggcgggggaattgtcctaatcacacatttaacacagggaataagtgctgaagtgacccagatcaccaagcgcagttcctcatcatactttatttttgctttccttattccttggcactgactaagctaaagttaagaagccgacttcataagccaacccctgtgatgggatggaaaaatgggcttttgcagagggtttattaatagagatggatatactactcacaagttctggctcatggctccactgagaaggccatagtaataaaatgatcttatgaacactgttccccaaaggccaaagcctgaagatattgccccttataatccaatcagccttatattttaataagtcctgaatcaacctgactacggatatatggggccaccagggtgcatgggtgcatgtctgctcagcctagccctggaagtgagcactgccggccacagatcctgggaaaggtggtagtaacccagaagatgtagccttgaagggaggatacctatcaaaatgccaaagctgcagggacacgaagacggttgaaaattcaacctgtgtatactagatccttccagtttgatggtttggtcattcttcttcatgattataccatggagaattttctgtgacaagggtggtcatggaagtaagtgagtgatcccctggtttctcattccttaaagcagtggttcgcaaagtatggcacaagaccagcagcatcagcagcctttgggaacttgttagaaacgaaaattctcaatcccatcccagatctgctgaatcagaaactctaatgagaggacccggcaatccacgttttaataagccctcctggtgattctgatgcacactaaattcaactgttttaaagggaaagccctttatagtattggagttcccacactgagaggctttggggcccaaaataagaaggttctaggttgtcattcagactttaacattaatttcaaagtcacctttctcatgcttccttgtgtttctgtttttccatttatgattttaacaaagaaaggtatgtgtgcttttgggtggaagttaggagaatgtttgtgtctttcctagttgaatacaaccttcagagaaaaaccttatgccttggaaattactacctggcacacaaaggggcttcaacaaggaaaagcagttggaggtctcttccagattgctcttctgccgaattatttgtatctattccgagctgattatgtaataggatggaaaaagtaaaaaaaaaaaaaaaaatctaatttgtatttccatgacaacgtgttctcccagcaacatccctctcctttatttgagttataaagggcactgctgggcctgagaaccaggccagaacctccttctgtatggcagctaacagtgtagggctccagtatcccaggaaggccccttatccacactccactcagctcataggagagtcttgcataatgaagacacagacctgggcacttcagtccttgtgctcctcctctcttttccccacagcaggacctggatacagaagtactcagccaaggtgacagaataaaatcctttttttgttgttttctgtttgtttgtttgttttggagaaggagtctcgctttgtcacccaggctggtgtgcagtggcacgatctcggctcactgcaacctccgcctcccaggttcaagcgattctcctgtctcagcctcctgagtagctgggattacagacgtgcgccatcacgcccagctaatttttgtatttttagtagatacggagttttgccttgttggccaggctgtgctggagctcctgacctcaggtgattcacctgccacagcctcccaaagtgctgggattacaggcgtgagccacagcaccctgccaaataagatcctttttaaaaaatatctgaaaaaagcttcatatctttacaaactcataaaatagctgattgggccatggaggagatgaggctgtttagaactggttttgtttcaagtttgtcaattttccctgtatgagaacttgggtaaagcacaaagaaacatacagtgctagtaacaggtctcctgcgccctggaactaagtgtttggaggaaggactaaaccccgggggaggtgagtataaaataattccactaagatcacctcctcagtccccagaaggctgatggtggatcctctggccatctcctgtggggtcttactgctcctctgccatttctctatgcctgaagacacgaagatgatatcaaggcagagctaccatatcgcagccagtctctaggctactgctgtgcagtggctcccactttctaatgcttttttgtttttgctttttctaacaaaacaatcttttttcaaaatgaattccaacccctgctagcttccttccccgcctccatactgttttaggcagcaccgtttatgtgacagagtccgtgtttctcaaatgcatggtgttcctcaggtggagagtgggcagaagtttttgcaacactttttttttaagttattgggtgcaaaatcccaaaccaggatatgtgtatgtctgtgtgtttatgttttttatttgaccctcccctctttcaacctacccccttttatatctaatgtagaaaaagcgaaattgaatctggaaagcaaactgttgtatatagttgcggtaacaatcatgaagagagagccgggctgtcccctcagtaattcattttaaataacaaattatttaaaaataaaattcatgccagagccagctgaagaggccttccttcatcaccactgaggccacccccaatctgggccctctgtccatctggcatgtctcctcccagcaagattcatctgttcaatgccatttgcgtttcaataaagttatctcctgtactgtc

SEQ ID NO: 158915 - DNA, 9685 bp, Homo sapiens
  Payload ID: 11095
  Gene Symbol: NAV1
  Gene Name: neuron navigator 1
  ENST ID: ENST00000367302
  CDS Start-End: 781-6273
tacgcctccgccatcccggtgcctcgtgcctcttcccagaccaggattcctacaccgggcgcttctccccagctgcggccacgccaggccggcctggccctgagcccacagagagcagcctcccccagactgggaaaggctgcaggtccttctagaaactcctctcctagggccttccgggggagaggctctcccaagtttgctggggcggtgagggagtcagctgaggatggggaaggccccttcagctccccatggaatagtcccaggacaaccccgaaagcagccctctccagccgggctggatccggaagaattggcgagagacaaggcacccagggaaagaagaaaaaagcccaggaagggactccagtctgccagacccggggcagaagcccttctcggacgagctttcacggagaaactcaaataccaggggctccggaaggtcggaagcctccaagctgcccaggaaaagaccaaagagatataaactacaaaagttctgggacccccaggtctttggagcctgatgagggggcagcttcgtgggcttcctctccagtctgcagcccagtgcagggcaagcgcccctctccctctccgggggccattagcttctcctcagtccatcagcagagtcagccagtcacagccacggtggcccccttccagtacaggttgcaaactgaccagaaacctggccccctctcccagggcagctggccccttgatggctatgctgagcccctccatgagactgaggagagcttctcctgcatggacgcgcggatcgtccatgcgctcctcgcgggcagaatgctgggcagcagcgtcaagagcgtgcagcccgaggtggagctgagcagcggcggcggcgacgagggcgcggacgaaccgcggggcgccggcaggaaggcggcagcggcggacggcagaggcatgctgcccaagcgcgccaaggcgcccggcggcggcggcggcatggccaaggccagcgcggctgagctgaaggtcttcaagtccggcagcgtggacagccgtgtccccggcgggccgcccgcctccaacctgcgcaagcagaagtcactcaccaacctctcttttctcacggactccgagaaaaagctgcagctttatgagcccgaatggagcgacgatatggccaaggcgcccaaaggcttaggcaaggtggggtccaagggccgtgaagctccgctgatgtccaagacgctgtccaagtcggagcactcgctcttccaggccaagggcagcccggcgggcggcgccaagacccccctggctccgctcgcgcccaacctgggaaagccgagccggatccctcgaggaccctatgcggaggtcaagccgctcagcaaggcgcctgaagcggccgtgagcgaagatggcaaatcggacgacgagctgctctccagcaaggccaaggcgcaaaagagctctgggcctgtcccctctgccaagggccaggaggagcgcgccttcctcaaggtggaccccgagctggtggtgaccgtgctgggagacctggagcagctgctcttcagccagatgctggacccagagtcccagagaaagaggacagtgcagaatgtcctggatctccggcagaacctggaagagaccatgtccagcctgcgagggtcccaggtgactcacagctccctggagatgacctgctacgacagcgatgatgccaacccacgcagcgtgtccagcctctccaaccgctcgtcccctctgtcatggcgctatggccagtccagtccgcggctgcaggctggtgacgcgccctctgtgggtgggagctgccgctcggaggggacgcccgcctggtacatgcacggcgaacgggcccactactcccacaccatgcccatgcgcagccccagcaagctcagccatatctcccgcctggagctggtcgaatccctggactcggatgaggtggacctcaagtccggctacatgagcgacagtgacctcatgggcaagaccatgacggaggatgatgacatcactaccggctgggatgaaagcagctccatcagtagtggactcagcgatgcctcagacaatctcagttcagaagaattcaatgccagctcctcactcaactccctcccaagtactcccactgcttctcgcaggaactcaacaatagtgctacgcacagactcagagaagcgctcactggcagaaagtgggctgagctggtttagtgaatcagaggagaaagcccctaaaaaactggagtacgacagtggtagcctgaagatggaacctgggacttctaagtggcggagggagcggcctgagagctgtgatgattcatccaagggtggagaactgaaaaagcccatcagcctgggccaccctggttccctgaagaagggcaagaccccacctgtggctgtaacttcccccatcactcacacagcccagagtgccctcaaagtcgcaggcaaacctgagggcaaagctacagacaagggtaagcttgcagtgaagaatactgggctccaacgctcctcctctgatgctggtcgggaccgcctgagtgatgctaagaagcccccctcgggcattgctcgcccctccacttcgggatcctttggctacaagaagcctcctcctgccacaggcacagccactgtcatgcaaactggtggttcagccactctcagcaagatccagaagtcctcaggcatccctgtcaagccagtaaatgggcgcaagactagcttagatgtttccaacagtgcagagccaggattcctggctcctggagcccgttctaacatccagtaccgcagcctgccccggccagccaagtcaagttctatgagcgtgaccggcgggcggggtggacctcgccctgtgagcagcagcattgaccccagtctcctcagcaccaagcagggaggccttacgccttccagactgaaggagcctaccaaggtagccagtgggcggaccactccagcccctgtcaatcagacagatcgggaaaaggagaaggccaaagccaaggcagtggccttggactcagacaacatctccttgaagagtattggctccccagaaagtactcccaagaaccaagcaagccaccccacagccaccaagctggcagagctgccaccaacccctctcagggccacagcgaagagctttgtcaaaccaccctcactagccaatcttgacaaggtcaactccaacagtctggatctaccatcatccagtgataccacccatgcttcaaaggtcccagatctgcatgctacaagctcagcatctgggggccctctcccttcctgcttcacccccagtccggcacccatcctcaatattaactcagccagcttctcccagggcctggagctaatgagtggtttcagtgtgccaaaagagacccgcatgtaccccaaactctcaggcctgcacaggagcatggagtccctccagatgccaatgagcctccccagtgccttccccagcagtactcccgtccccaccccacctgctccccctgctgctcccacagaagaagagacggaagagctgacttggagtggaagccccagagctgggcaactggacagtaatcagcgggatcggaacactcttcccaagaaagggctcaggtaccagcttcagtcccaggaggagaccaaggagaggcgacattcccataccattggtgggctgcctgaatccgatgaccagtcagagctgccttctccccctgcacttcccatgtctctgagtgcaaagggccaacttaccaacatagttcacggctcagtgctgtccctggcctccagtgcctcctccacctactcctcagctgaggagaggatgcaatctgagcaaatccggaagcttcgtagggaactggaatcatcccaggaaaaagtggccaccttgacgtctcagctttctgccaatgctaatctggtggctgcttttgagcagagcctggtgaatatgacatcccgcctgcgacacctggcagagacggccgaggagaaggacactgagctgctggatttgcgagaaaccatagactttctgaagaaaaagaactctgaggcccaggcagtcattcagggagcccttaatgcctcagaaaccacacccaaagaacttcggatcaagagacaaaactcctcagatagcatctcaagcctcaacagcatcactagccattccagcatcggcagcagcaaggatgctgatgcgaaaaagaagaaaaaaaagagttggcttcgaagttccttcaacaaagcgttcagtataaaaaaggggcccaagtcagcttcctcatactcggatatagaggagattgctacacccgactcttcagccccctcatcccccaaactacagcatggttctacagagactgcttcaccctccatcaagtcctccacctcgtcctccgtgggcactgatgtcaccgagggccctgctcacccagccccccacactaggctgttccatgcaaatgaggaggaggagccagagaagaaggaggtatcggagctgcgctctgagctatgggagaaggaaatgaagcttacagacatccgcttggaggccctcaactctgcccaccaactggatcagcttcgggagaccatgcacaacatgcagttggaggtggacctgctgaaagcagagaatgaccgactgaaggtagccccaggcccctcatcaggctccactccagggcaggtccctggatcatctgcattatcttccccacgccgctccctaggcctggcactcacccattccttcggccccagtcttgcagacacagacctgtcacccatggatggcatcagtacttgtggtccaaaggaggaagtgaccctccgggtggtggtgaggatgcccccgcagcacatcatcaaaggggacttgaagcagcaggaattcttcctgggctgtagcaaggtcagtggaaaagttgactggaagatgctggatgaagctgttttccaagtgttcaaggactatatttctaaaatggacccagcctctaccctgggactaagcactgagtccatccatggctacagcatcagccacgtgaaacgagtgttggatgcagagccccccgagatgcctccttgccgtcgaggtgtcaataacatatcagtctccctcaaaggtctgaaggagaaatgcgtcgacagcctggtgttcgagacgctgatccccaagccgatgatgcagcactacataagcctcctgctgaagcaccggcgcctcgtcctctcgggccccagcggcacgggcaagacctacctgaccaatcgcttggccgagtacctggtggagcgctctggccgtgaggtcacagagggcatcgtcagcaccttcaacatgcaccagcagtcttgcaaggatctgcaactgtatctttccaacctagccaaccagatagaccgggaaacaggaattggggatgtgcccctggtgattctattggatgacctgagtgaagcaggctccatcagtgagttggtcaatggggccctcacctgcaagtatcataaatgtccctatattataggtaccaccaatcagcctgtaaaaatgacacccaaccatggcttgcacttgagcttcaggatgttgaccttctccaacaacgtggagccagccaatggcttcctggttcgttacctgaggaggaagctggtagagtcagacagcgacatcaatgccaacaaggaagagctgcttcgggtgctcgactgggtacccaagctgtggtatcatctccacaccttccttgagaagcacagcacctcagacttcctcatcggcccttgcttctttctgtcgtgtcccattggcattgaggacttccggacctggttcattgacctgtggaacaactctatcattccctatctacaggaaggagccaaggatgggataaaggtccatggacagaaagctgcttgggaggacccagtggaatgggtccgggacacacttccctggccatcagcccaacaagaccaatcaaagctgtaccacctgcccccacccaccgtgggccctcacagcattgcctcacctcccgaggataggacagtcaaagacagcaccccaagttctctggactcagatcctctgatggccatgctgctgaaacttcaagaagctgccaactacattgagtctccagatcgagaaaccatcctggaccccaaccttcaggcaacactttaagggttcggcaatcactgtcacccccggacagcagaacgctggcatcagctatcttagctcctcctctcccctctcctctttcagagcactggctctccagccccaggaggagaacaggagggaggaggagatgaaagaggagggacaggttcttggtgctgtacctttgagaacttcctaggaaggaatggtggggtggcgtttgggaacttgtgccccctaaacacatttactggcctcctctaatgactttggggaaaagatgattctgggtctttcccttgacttcttgtttcaattacaaactcctgggctttctggggaggggttcagaaaacatcaaaacactgcagcagttcctaaatgattctcacaagcaaccctgagagagacagtcttgtgagggagatctgggggaggcaggaagctcctcagattttctcacagacccttcccaattccatcaccactgccaacaactcctcccccagagatctggctggagcccagaaaaagaagcatgtggtttaaaaaatgtttaaatcaatctgtaaaaggtaaaaatgaaaaacaaaaacaagcaaacaaacaaaaaacaatggaaaagatgaagctggagagagaggaaccagttgccaaggtagagagctgcccgctcctgccctctggatgacataggggacatcaacaagacggctgccaacctgagaagtcaccaaaccacaaaaataaccttacagccttcagggaaagactaccagctctgtctttctaccctctaatttaacaatgcataagagtcaataaaccctacttttttatttttggtttttattttgttttcatttttttctcccatttgcctatttatttttttgtttcccttttttttttctttttccgtttttccatttcctcacatgtccacgagatgcttgggttgcttttccaggggctagtttggcttttccaagtgggttttctttggagaatctgatgccatgcaattggcatgacacctgccatgccactatctttggcatccatggggcttatatgagacatgaagcattggctcagaagtagagggagaagaggaacccagttcccttgacttcccttttgagagcacacgttctgctgggtagctcaattgccagcctctgtcatgagaaggtatagccccatcttgatagaagagttactccgagctttatcatggaccagaggaaaaccagaaaactgaaaacattcctctgtcttgtggccagtttggcctttcactgcactattctgatggtgcctgactgaatccaaatatcctagctggctcttactatttttcacaaatgagtattcacatataagagatgaacatccatgtgagatcatcccaatcagaatataagactcaaggagtttgacttggtggccaatacctgccttccaaagagatcctacctttgcagatttgctcctttcccattgccttgaaggtctggcaatccctgttctttcatttgacaagtacttactgagtactcactatatacaaatcattaggttaaaacagacacacacacacacacacacacacacacacacacacacacacacacaagacctgggcccttaagtttacagtccagcaggaaatgttaacctccattcagctacgcccccttgttatctagaccttcgggatcatctaagaaatgtagctgaaacccaaggagccagctagaaagaagcttttgattagatgtacaatacattgggggcagaagatctgggatcaattaagatggagcctgaaggactatggaatcttgcttgtcaggaatgggcaagtctacttcctgccatttctgaaagccccgcgggaccagcttctaggctgagctgcctagtaggctgaagcttcaggactctgcaggtcaaggatatgtgatgagcaccggcctaagtgtttgctcttcagattcctaagtagcacaagactttatcagaatctataggcataccaacctggatcactcttccacccaaccgaggagtagatgcatctgaatcttcatatcggtatattaagtccaaaagatggtccgggctgcccctcacaaaagcttctgcatccacgtggtaagctcccatggatgacagggttctgtatgatggagactattattgctattgctgctaattccatgagctgtgaagatccctaaccaactcagctgtaacatatgcaattctgtggtgggaagaggctgtgtgtccaaggatggtgctgaaatcactgccttaaggtctctgctgtgcagaatgaggaggcccccgagctggctgttctaacttagaaggaagagaagactggatgggcctgcttgggatctaggcctcttctaaaccctatcctaagctccagttccatggcaaggctcagacttttaatgccatcttaatctgatggttgagcgcttcactctattttctggtgctgcccagccagtgccttctgccatggatgttactggctacttgagaaaaaggagaggggagaaccccttctttcattccaactgcctccgaccccaaagggattcttggctctctggtaaccatggataccaccatgaattttatttggatcctcagcaggttgattctggaggcctcatgctatgactttttatttctcttcctgggatccaccaccctctactctcagctgactgctgcatttaggccaggtctccaattgctttcctccagaaagtgtgttcccgtctagtgaggtagtattgaagcctcggctttccctctggagcctgggaccctgtttacagttgcacatctgggcccctcactgtggggattgatcattctcatgaaggaatcacagttatatggcaactgcagaaggctgagcctcctcatggtgctataaccccttgggacactcatccagacttctctgaagcagaaaacctgagctccccactcactgccctagaatttatggcaaggagcaaatctacagcattctctcccacctacgtcctgcttcttggttgagactactgggatccttcagaaaagaaacactgggtcccatagctaaattctcaaccgccaggcaccttcagaagaatccagcctaatactggaatttgtgctattatcttcctctccagccccccaactccatccctcaccacagttgtctaggaaatgacatgaattcaatatctaatgtcaaccaatggggagagccacaactccaggagaggttcctgagctgagtcccttaatttctggatgaagaagaccaacaagttttgtccaatgtatttgtttctcagaccttgcctaggcactaaaaataaaatactaggtcattggaggctaa

SEQ ID NO: 158916 - DNA, 680 bp, Homo sapiens
  Payload ID: 11095
  Gene Symbol: NAV1
  Gene Name: neuron navigator 1
  ENST ID: ENST00000438083
  CDS Start-End: 1-680
agtcccaggaggagaccaaggagaggcgacattcccataccattggtgggctgcctgaatccgatgaccagtcagagctgccttctccccctgcacttcccatgtctctgagtgcaaagggccaacttaccaacatagttcacggctcagtgctgtccctggcctccagtgcctcctccacctactcctcacaaatccggaagcttcgtagggaactggaatcatcccaggaaaaagtggccaccttgacgtctcagctttctgccaatgctaatctggtggctgcttttgagcagagcctggtgaatatgacatcccgcctgcgacacctggcagagacggccgaggagaaggacactgagctgctggatttgcgagaaaccatagactttctgaagaaaaagaactctgaggcccaggcagtcattcagggagcccttaatgcctcagaaaccacacccaaagaacttcggatcaagagacaaaactcctcagatagcatctcaagcctcaacagcatcactagccattccagcatcggcagcagcaaggatgctgatgcgaaaaagaagaaaaaaaagagttggcttcgaagttccttcaacaaagcgttcagtataaaaaaggggcccaagtcagcttcctcatactcggatatagaggagattgctacacccgac

SEQ ID NO: 158917 - DNA, 2263 bp, Homo sapiens
  Payload ID: 11095
  Gene Symbol: NAV1
  Gene Name: neuron navigator 1
  ENST ID: ENST00000430015
  CDS Start-End: 1-2263
tactcccactgcttctcgcaggaactcaacaatagtgctacgcacagactcagagaagcgctcactggcagaaagtgggctgagctggtttagtgaatcagaggagaaagcccctaaaaaactggagtacgacagtggtagcctgaagatggaacctgggacttctaagtggcggagggagcggcctgagagctgtgatgattcatccaagggtggagaactgaaaaagcccatcagcctgggccaccctggttccctgaagaagggcaagaccccacctgtggctgtaacttcccccatcactcacacagcccagagtgccctcaaagtcgcaggcaaacctgagggcaaagctacagacaagggtaagcttgcagtgaagaatactgggctccaacgctcctcctctgatgctggtcgggaccgcctgagtgatgctaagaagcccccctcgggcattgctcgcccctccacttcgggatcctttggctacaagaagcctcctcctgccacaggcacagccactgtcatgcaaactggtggttcagccactctcagcaagatccagaagtcctcaggcatccctgtcaagccagtaaatgggcgcaagactagcttagatgtttccaacagtgcagagccaggattcctggctcctggagcccgttctaacatccagtaccgcagcctgccccggccagccaagtcaagttctatgagcgtgaccggcgggcggggtggacctcgccctgtgagcagcagcattgaccccagtctcctcagcaccaagcagggaggccttacgccttccagactgaaggagcctaccaaggtagccagtgggcggaccactccagcccctgtcaatcagacagatcgggaaaaggagaaggccaaagccaaggcagtggccttggactcagacaacatctccttgaagagtattggctccccagaaagtactcccaagaaccaagcaagccaccccacagccaccaagctggcagagctgccaccaacccctctcagggccacagcgaagagctttgtcaaaccaccctcactagccaatcttgacaaggtcaactccaacagtctggatctaccatcatccagtgataccacccatgcttcaaaggtcccagatctgcatgctacaagctcagcatctgggggccctctcccttcctgcttcacccccagtccggcacccatcctcaatattaactcagccagcttctcccagggcctggagctaatgagtggtttcagtgtgccaaaagagacccgcatgtaccccaaactctcaggcctgcacaggagcatggagtccctccagatgccaatgagcctccccagtgccttccccagcagtactcccgtccccaccccacctgctccccctgctgctcccacagaagaagagacggaagagctgacttggagtggaagccccagagctgggcaactggacagtaatcagcgggatcggaacactcttcccaagaaagggctcaggtaccagcttcagtcccaggaggagaccaaggagaggcgacattcccataccattggtgggctgcctgaatccgatgaccagtcagagctgccttctccccctgcacttcccatgtctctgagtgcaaagggccaacttaccaacatagtgagtcccactgcggccaccacgccaagaatcacccgctccaacagcatccccacccacgaggcggccttcgagctgtacagcggctcccaaatggggagcaccctgtccctggccgagagacccaagggaatgattcggtcaggatccttccgagaccccacggacgatgttcacggctcagtgctgtccctggcctccagtgcctcctccacctactcctcacaaatccggaagcttcgtagggaactggaatcatcccaggaaaaagtggccaccttgacgtctcagctttctgccaatgctaatctggtggctgcttttgagcagagcctggtgaatatgacatcccgcctgcgacacctggcagagacggccgaggagaaggacactgagctgctggatttgcgagaaaccatagactttctgaagaaaaagaactctgaggcccaggcagtcattcagggagcccttaatgcctcagaaaccacacccaaagaacttcggatcaagagacaaaactcctcagatagcatctcaagcctcaacagcatcactagccattccagcatcggcagcagcaaggatgctgatgcg

SEQ ID NO: 158918 - DNA, 4371 bp, Homo sapiens
  Payload ID: 11095
  Gene Symbol: NAV1
  Gene Name: neuron navigator 1
  ENST ID: ENST00000477118
  CDS Start-End: 1-81
agtgcaaagggccaacttaccaacataggtctttatggacagattagacatccacctgcctgtatggaggcagaagaatagacaagggagctccttgtgggtatgaaaccctgaaaggctgtaatcccagcaatgggcaaagggtgagtcccactgcggccaccacgccaagaatcacccgctccaacagcatccccacccacgaggcggccttcgagctgtacagcggctcccaaatggggagcaccctgtccctggccgagagacccaagggaatgattcggtcaggatccttccgagaccccacggacgatgttcacggctcagtgctgtccctggcctccagtgcctcctccacctactcctcacaaatccggaagcttcgtagggaactggaatcatcccaggaaaaagtggccaccttgacgtctcagctttctgccaatgtgagtgccatgaagtacggaaagatcaaggcagttattttgactatcgttagacaagttcagccaagggaggaaaactacctggtaaggtatcccctggactgagacgtcaagggcatgcgtcttcttcacagctctatgatagaagacgaggggattgttcttccccttctctgagcctcaacttttatgaagaaccattttgcttctactctaattaataggtatggatgagttcatgtctgatgggctgagctccctagagaaagagaagaagattgattaccagtggttctgcatggaggcagaaacaaccttgccattggccatggacaaaagcagttatggattataattatagggctcttagagcctttccactgccctggggggtgttcatgtctttgttcatgccacgtaactgtgcaggcacatgattggtcattagaattctgtctagtgaccacgacactactgagaaacctaactcccattctggtctgactccttcattcccaactgccttttctgagcagtctccttgggcagatggtagaaacaatctgaaattcaggttgagagctagaattctttgtttctactctcagtacctccatttagaacgagtctatttctttagaccttagtttttctaccctgtgacatggggagaaatgaagccacctcctctaaccaggctgtggtactttctcccctgtgactgagttgcaaacagagaacataagagccattttcccccaaagctgtaaacaacagctgagccggatctgcaggagctttccaagtgtttgcacaaaagtaaccatgtctgcaatttccgcagtagtttctggttttctctctgcccttcctctctggggaacccagctgtcaggcctggggtctatccgtcggaattaggtagaagaatctccaccaagattctgaatgtttccaacacatttcagcagcagttccctcaccacactagttattctctcgattctcttttcccaaaccctcaattcataagttgtaccagtttgtttgaagctcatgttaagcactttttcccactcttgggggacccataagaattgtaacataaacaagaaccatcttttctctcccttgtgccacacccaccaaagcaaatggcctgggtcacgtcctgcacaccccaggaaattcatgtctgggagatgctgggggggagaggcgccagggaggcagagaacattattatgtctgattcatttacactgcaatctgtcagccaccatgctgtcaaggctgggctgaagccaagaaattgaatttagagggtgatttttcttagaacaggaagttccatttggctaagagagaacaaactaaacacccagacacggtgggttctgcatcttaaaggcagatttttgccgagggtcagaaccctgccctcaagcaggagatgggatgctgggactctaggaaggttccacagctctcttcaggattccgtgactccaaaccaaacttttgtcatgttccatggaacttcctagccactaaagctgagggcacaccctagatgtaggggcccagaccactttacccctctcaaatgctagcctttctgcagcaccactgcttagccctgaggtcttacaggtaccctagtctggggttgggattaagggaagggtcaatgtagggagaggaagtgtaggggagagcggggagaaagcccagccagagcaaaagggttcccctggatggggaaaggcagcacagaagagcatacaggggttcttggggcctctcatgagtagtcttccagggactacaaggagtctacaagcagacatgcaggatgtagagaagcaaaccagagaagacctgaggtcaagaagacagatgttgcctgcacagtgggtgaaaggaaactgctcaggttgtgacatattataatctcctcagagcccaggccttgacagatttatagtaaaagtgcaagaggaggctctaactggactaaagggattgcctccagccctggtcctatgaagtaggctccagacatgcggagcagtggatgaaaactagagttgacccaacagggagggagaattgtaagccagtaggagccatgagagtgccgtcgatttcctagagctctgcatgaaggagctgcgcagagtatgcccacttcttgctagggtcaccaacttgctcagatagtctcacgatggctatttctccatccccaagtgctcccctttctagcccccggcctcattccctttaccttgcctatacatcttgcagccagttggccagctagaggtcaaactatgccaaaccaagtggccttagctcctccactgagcacctttccgaactagcctgcctcttatccagagagccctttggtatccttcactcctcatgaaacagacctgacacctagtggccaaacggtggaatgcctctgcagtttccttccagccttgcaaacctggagaatccgggaacaaggagcagctgcaaagcaagaaagggtgaagcagtggagtagcagaggaggaagaaacgcaccaaatagtttctgccaggagattatttggtcccttgggggccggcccactccacaatgcaggagttaaaccaaaataataggaacgaccccagaggctatggcccgcctaccaagttggccacaccaaatatcacatagagcagagggatagtcctacctctggtagttgataggttttagatctcaagtctccaggagcctctggaaacctgccctaccctcaacctggcttcattattcaagaagctggttcccaccagaaaatttctttgatttcccctttgtctgctcaggaaaatcaatatttttttaaccaccaagaggtttgctggcattggtcagctccgagatacaggaaatcagttaaaactatttcccattgtcagttattgcctttcccccagccttatgcaacttagcaatctctttctgtgtttgtttcaggctaatctggtggctgcttttgagcagagcctggtgaatatgacatcccgcctgcgacacctggcagagacggccgaggagaaggtgagaggcctgggaaagggtgggaggggtgggtgcggcgagggggttctcctggacagagaggccgaagctgaccatctgttcttgctcatgaatgccagtttctccccacctcactgtcaccctggattctcaatctgccccccaatacagtgtgagcatattccttatcccaattccttgcccttctctatcaagttttgcagaattccaatgcctcgcccattgcctgacacatcataagggctcagggctcctgctaatcccaactaatgacgctgttttctttttttgagatggagtttcgttcttgtcacccaggctggagtgcactggcgcgatcttggctaactgcaaactctgcctcccaggttcaagcgattctcctgcttcagcctcccaagtagctgggattacaggtgcccgccaccacgcccagctaatttttgtatttttaatggagaccaggtggccaggctggtcttgaactcctgacctcaggtgatccgcccacctcggcctcccaaagtgctgggattataggtgtgagccaccgtgcccagccaacgctattttcatttctctcttaggacactgagctgctggatttgcgagaaaccatagactttctgaagaaaaagaactctgaggcccaggcagtcattcagggagcccttaatgcctcagaaaccacacccaaagaacttcggatcaagagacaaaactcctcagatagcatctcaagcctcaacagcatcactagccattccagcatcggcagcagcaaggatgctgatgcgaaaaagaagaaaaaaa

SEQ ID NO: 158919 - DNA, 726 bp, Homo sapiens
  Payload ID: 11095
  Gene Symbol: NAV1
  Gene Name: neuron navigator 1
  Uniprot ID: M0R1G4
  ENST ID: ENST00000593583
  CDS Start-End: 1-726
atgaatgggatggccaatgtgaatcccgccagccgccctcactacgcctccgccatcccggtgcctcgtgcctcttcccagaccaggattcctacaccgggcgcttctccccagctgcggccacgccaggccggcctggccctgagcccacagagagcagcctcccccagactgggaaaggctgcaggtccttctagaaactcctctcctagggccttccgggggagaggctctcccaagtttgctggggcggtgagggagtcagctgaggatggggaaggccccttcagctccccatggaatagtcccaggacaaccccgaaagcagccctctccagccgggctggatccggaagaattggcgagagacaaggcacccagggaaagaagaaaaaagcccaggaagggactccagtctgccagacccggggcagaagcccttctcggacgagctttcacggagaaactcaaataccaggggctccggaaggtcggaagcctccaagctgcccaggaaaagaccaaagagatataaactacaaaagttctgggacccccaggtctttggagcctgatgagggggcagcttcgtgggcttcctctccagtctgcagcccagtgcagggcaagcgcccctctccctctccgggggccattagcttctcctcagtccatcagcagagtcagccagtcacagccacggtggcccccttccagtacaggtga

SEQ ID NO: 158920 - DNA, 10960 bp, Homo sapiens
  Payload ID: 11096
  Gene Symbol: NAV2
  Gene Name: neuron navigator 2
  Uniprot ID: Q8IVL1
  ENST ID: ENST00000349880
  CDS Start-End: 331-7620
aggaggaaatttgcaagaggcggcagcccctgagcgcccagagctcttgaaaggccacccaggagaggtgtgagacccggcggcagcatccgtccaggtgggacccgctgagcgccgtggccagtcccccattcccatcccggcaccccaaaggcgcgctcgcccgattgcttcgagttccccgacctggggattttttttttagccgctggtggtgggcgcctcgtgggctaaggcccggcgcctgctctgctacccgcgctgcctttagcggtcgcccccgccgccgctgccagggacgtgctgggaaagcccaagccccgggagaagatgccggccatcctggtcgcctccaaaatgaagtcgggactgcccaaacccgtgcacagcgccgcgcccatcctgcacgtgcccccggcccgggcgggcccccagccctgctacctgaagttgggaagcaaggtggaggtgagcaagaccacctatcctagccagatccccctgaaatcgcaggtgctgcaggggctgcaggagccagcgggggaggggctcccgctgcggaagagcggctcggtggaaaacgggttcgatacccagatctacacagactgggccaatcattacctagccaaatccggccacaagcgtctcatcagggatctccagcaagatgtgacagatggcgtcctcctggcccagattatccaggttgtggcaaatgaaaagattgaagacatcaatggctgtccgaagaacagatcccaaatgattgaaaacatagatgcctgcttgaatttcctggcagctaagggaataaacatccaggggctgtctgcagaagagatcaggaatggaaacctcaaggccattctaggcctcttcttcagcctctcccgatacaagcagcagcagcagcagccccagaagcagcacctctcctcacctctgccgcccgccgtatcccaggtggccggggccccctcccagtgccaggctggcacccctcagcagcaggtgccagtcactccccaagccccgtgccagcctcaccagccagcgccacatcagcagtcaaaagcacaagctgaaatgcagtccagacttccaggtcctaccgcgagggtatccgctgcaggcagcgaggccaaaacacgcggagggtcaactactgctaacaaccgacgcagccagagctttaacaactatgataaatccaaaccagtcacctccccacccccaccgccaagcagccacgagaaagagcctttggcaagttcagcctcctcccaccccggaatgagtgacaatgcacctgcttccttggagagcggcagcagctccacccctactaattgcagtacctcctcggccatcccgcagcccggtgcagccaccaagccttggcgcagcaaatccctcagcgtgaagcacagtgccacggtatccatgctctcggtcaagcctcctgggcctgaggcccccaggcccacacctgaagccatgaagccggcccccaacaatcagaagtccatgctggaaaagctgaaacttttcaacagtaaagggggctcaaaggcaggtgaggggccggggtcccgggacacaagctgtgagcggctggagactctgcccagcttcgaagagagcgaggagctggaggccgccagtcgcatgctcaccaccgtgggccctgcttccagcagccccaagattgcactcaagggcattgcccagaggacttttagccgggcactgaccaacaagaagagttctctgaaaggcaatgagaaagagaaggagaaacaacagcgggagaaggataaggagaaaagcaaggaccttgccaagagagcctctgtgacggagaggctggacctcaaggaggagccaaaagaagaccccagtggagcagctgtgcccgagatgccaaaaaagtcctccaagattgccagcttcatccccaaaggggggaagctcaacagtgccaagaaggagcccatggccccttcccacagtggaataccaaaaccaggaatgaaaagcatgcccgggaaatccccaagtgccccagcgccttccaaggaaggggagcggagccggagtgggaagctgagctcaggactcccccagcagaagccccagctggacggcagacactccagttcctcttccagcctggcgtcctcagaaggaaaaggcccaggagggaccaccctgaaccacagcatcagcagccagactgtcagtgggtctgtcgggaccacccagaccacaggaagcaataccgtcagtgttcagctacctcagccccagcagcaatacaaccatcccaacactgccacggttgcacctttcctgtacaggtctcagacggacactgaagggaatgttactgccgagtcaagctcaacaggtgtgagcgtggagcccagccacttcaccaagactggacagcctgctctggaagaactcactggggaagatcctgaggctcggcggctgcggacagtgaagaacatcgctgatctgcggcagaatttggaggaaaccatgtccagtttaaggggaactcaggttacacacagcacattggaaaccacgtttgacaccaatgtcaccacggagatgagtggccgtagcatactcagcttgacagggaggcccacacctctgtcctggagactgggccagtccagccctcggctccaagcaggagacgccccctcaatgggcaatgggtatccccctcgagccaacgccagcaggttcatcaacactgagtcaggtcgctatgtgtactccgcccctctgagaaggcagctggcctcccggggcagtagtgtctgccatgtggacgtctcagacaaggcaggagatgagatggacctggaaggcatcagcatggatgcccccggctacatgagcgacggggatgttctgagcaagaacatccggaccgatgacattacaagcggatacatgactgatggtggacttggcctctatacccgtcgcctgaaccggctccctgatgggatggctgtggtacgggagaccctgcaacgaaatacctccctgggcctcggagacgctgacagctgggacgacagcagctccgtcagcagcggcatcagcgacaccatagacaacctcagcactgatgacatcaacaccagctcctccatcagctcttatgccaacacacctgcctcctctcgaaaaaacctggatgtgcagactgatgctgagaagcactcacaggtggagaggaattccctgtggtctggtgatgatgtcaagaaatcagacggaggctcagacagcggcataaaaatggagccaggttccaagtggaggcggaatccttctgatgtgtctgacgagtccgacaaaagcacgtcgggcaagaagaatcctgtcatctcccagacaggctcatggcggcgaggcatgacagctcaggtgggcatcaccatgccaaggacgaagccttcagccccggcaggcgcactgaagaccccaggaactggaaaaacagacgacgcaaaggtgtctgagaaaggaaggctttctcctaaagcctcccaggtgaagcgctccccatcagatgcaggccggagcagtggtgacgaatccaaaaagcccctccccagcagctctaggacacctactgccaatgccaacagctttgggttcaagaagcagagtggttccgccgccggcctggccatgatcacagccagcggggtgactgtcaccagcaggtcagccacactgggcaaaatcccaaagtcatctgcactcgtcagtcggtctgctggtcggaagtcaagtatggatggggctcagaatcaggatgacgggtatctagccctaagctcccggacaaaccttcagtaccggagtttgccgaggcccagtaagtccaacagccggaacggggctgggaacaggtctagcaccagcagcatagattccaacattagcagcaagtccgcaggcctgccagtgcccaaactgagggagccttccaaaacagccctaggcagctctctaccaggtctggtcaaccaaacagacaaggagaaaggcatctcatcagacaacgagagtgtggcttcctgtaactcggtgaaagtgaatccggcagcccagcctgtgtccagtccggctcagaccagtctccagcctggagccaagtacccagatgtggcctctcccacactccgcagactctttggtgggaagcctaccaagcaagtgcccatcgccacagctgaaaacatgaaaaattcggtggtcatctccaatcctcatgccaccatgactcagcaaggtaacctagactccccgtcaggcagtggcgtcctgagcagtgggagcagcagtcctctctacagcaagaatgtggacctcaaccagtctccgctagcctccagccccagctcagcccactcggccccttccaacagcctcacctggggcaccaacgccagcagctcctccgcagttagcaaggatggcctgggctttcagtctgtcagcagcctccacaccagctgtgagtccatcgacatctccctcagcagtggaggggtccccagccacaattcttccactggcctcatcgcctcctccaaggacgactccttgactccctttgtcagaactaacagtgtgaagaccacactgtcagaaagccctctctcttcccctgctgctagccctaagttctgcagaagtactctgcccaggaaacaggacagtgacccgcaccttgataggaacactttgcctaagaaaggactcaggtatactcccacctcccagcttcgcacgcaagaagatgcaaaagaatggttacggtcccattctgcaggaggccttcaggacaccgctgccaattcccccttttcctctggctccagcgtgacttctccctccggaacaagattcaacttttcccagcttgcgagtcccaccactgtcacccagatgagcttgtccaacccgaccatgctgaggactcacagcctctccaatgctgatgggcagtatgatccatacactgacagccgcttccggaatagctccatgtccctggatgagaagagcagaaccatgagccgttcaggctcattccgggatgggtttgaagaagttcatggatcctcactctccttggtttccagcacatcgtcagtttattctacaccagaagaaaaatgccagtcagagattcgcaagctgcggcgggaactggatgcctcccaggagaaagtttcagctttgaccacccagctgacagcaaatgctcaccttgtggcagcctttgaacagagtcttggtaacatgacaatcaggctccagagtctgaccatgacagctgagcagaaggactcagaactgaatgagttaagaaaaaccattgagctgctaaagaaacagaacgcagctgcccaggctgccattaatggagtaattaacacacctgagctcaactgcaaaggaaacggcactgcccagtctgcagacctccgcatccgcaggcagcactcctcagacagcgtctccagcatcaacagtgccaccagccactccagcgtgggcagcaacatagagagtgactcaaagaagaagaagcggaagaactggttacgcagctccttcaagcaagctttcgggaagaagaagtccccaaaatctgcgtcctctcattcagatattgaggagatgacggattcttctttgccttcctcaccaaagttaccgcacaatgggtccacaggttccaccccactgctgaggaattctcactccaactctctaatttcagaatgcatggatagtgaagctgagaccgtcatgcagctccgaaatgagttaagagacaaggagatgaagctgacggatatccgcttagaagctctcagttctgcccaccagctggaccagctccgggaggccatgaacaggatgcagagtgaaatagagaagctgaaagctgagaatgatcggctgaagtcagagtctcaaggcagtggctgcagccgggctccttcccaagtgtccatctctgcctccccgaggcagtccatgggcctctcccagcacagcttgaacctcactgagtcaaccagcctggacatgttgctggatgacactggtgaatgctcggctcggaaggaaggaggcaggcatgttaagatagttgtcagctttcaggaggaaatgaagtggaaggaggattccagaccacatctctttcttattggctgcattggagttagtggcaagacgaagtgggatgtgctcgatggggtggttagacggctgttcaaagaatacatcattcatgtcgacccagtgagtcagctagggctgaattcagacagcgttcttggctacagcattggagaaatcaagcgcagcaacacttccgaaacaccggagctgcttccttgtggctatctggttggagagaacacgaccatctcagtgactgtgaaagggctcgcagaaaacagcctggactcactggtgtttgagtccttgattcccaagcccatcctgcagcgctacgtctccctcctgatagagcaccgtcggatcattctctctggccccagcggcactgggaaaacctacctggccaaccggctgtctgagtatatagtgcttcgagagggacgggagttgacagacggggttatcgccacctttaacgtggaccataagtccagcaaggaattgcgccagtacctgtccaaccttgctgaccagtgcaacagtgagaacaatgctgtggacatgcccctcgtcatcatcctggacaacctacaccacgtgagctctctgggagagatcttcaatgggctgctcaactgcaagtaccacaaatgcccttacataattggcacaatgaaccaggctacctcttcgactcccaacctgcagcttcaccataacttcagatgggtgctttgtgccaaccacacggagcctgtgaagggtttccttggccgattcctgaggaggaagctcatggaaacagagatcagtgggcgggtgcgcaatatggagctggtaaaaatcattgactggattcccaaggtctggcatcacctcaaccgcttcctggaggctcacagttcctcggacgtcaccatcggcccccggctcttcctgtcatgccccatcgatgtggacggctcgagagtgtggttcaccgacttgtggaactattccattatcccctatctcctggaagccgtcagagaaggactccagctctatggaaggcgcgccccctgggaggatcctgccaagtgggtgatggacacatatccatgggcagccagcccacaacagcacgagtggcctcccctgctgcagttacggcctgaggatgtcggcttcgacggctactccatgcctcgggagggatcgacaagcaagcagatgccccccagtgatgctgaaggtgacccgctgatgaacatgctgatgaggctgcaggaggcagccaactactccagcccccagagctatgacagcgactccaacagcaacagccatcacgatgacatcttggactcctctttggagtccactctgtgacaggggcccggagcccagcgccctcctcttctcctcaccgcattccacctgcatcccccacatcaccctgaagatgacttcctgagccagcccccagccacagccttagagctgcgggaacaccgagaccccccgtccttcagcctcgacctgggtgcaggcatcccgggccagctgcctgcggaccgcttccttccacagcgagaactgcactaccttctgttgtactttaattattgttttgccttgttgctgtgacctccctaagacactgaagatacttctcgggaaaggatcatcgccgttgaaatgaaaagagagacagagagaaaaaaaaaaagagaacccacatgaagctctgaaaccaaacagcatcctgccatgagcttcccagagacagaagagactggagcaaagtcggaaacacagagaagcacggcttcccctcagcacagaccctccagactgggtctcagagccgtgccacccaccctcccacacagccggccacagggagaactggtgctaaccagggtgcttgctttggtcacgttcaacgcactacagagctacgacacagggaaaccttaggagcaaataaaccgtgctttcatgttttttaaatggtgctttccttacccgagaggtattttgcctgttccaatcaaaccaccccattcaggtccatcagcctctgattaatatccgtgagagtgagtgacggagtgagagtgtgagcgagtggatgtggctgtcagtgcagaacagcatgtgtctctttccttctgatatatgaatgaatcaggtttttttttttttttttctgcaaacactgtgtatagtgagacttgttctactttggagaacaggttaccttttgaaaatgaggttgagtttcttcctttctgatgcattgatttttgaagatttttttttcccccttcccctcttggtcagaatcaatcctttggtgaaagtaagaaccgcaggagttgagttttggtttggtcctgctcagttttggtttttagttgtccatcctcacagtcctacacactcgcctcctcctgctagggctgggggtatctgtgtcctttaaaatggatgaggacctggtcctcgacatgtgggtgagccatggaccttgccttcccttctcgtccttgagggtttagaacacacaccaacacctccagcgtccccgccccagcttccggtggggtgatgcggtcaccctgcaaaagacttgcactttcctcagaaccaacatgacgcagctcaataagggtgagggtcactccctcccagaagccccgtctggacgagccttgcctgacctcttcggtgctgaccttcccaaagtgatgccttactggttttgtactaactgtgttcattttacataagtgtcgtgcctgcctggggtttgttttttttgtcattgttttccccattgaaacaaacagggctaaaaagtcatctgttcattaggagaactcaagttgctgtgacttttctcatccaaaagactcatttgtgtggatgcgtgaccatgggaaaaagaaaaaaaaaaagatccattttttaggttcttttcggtctccagctgacaacccaactggacaatgatctgtctggtgcaggagaaggcaaaagtttctacaagtctacatgaccttgctgatacttgttctaatagaaacccagtctgctgtgtcttcaacatactggtattttcattacaaagtatggtaaatttttgagttgtttgtttctgttttgtaaagagaatccttattggacaccagtgaaggtgtctctgttttaatgatcagggtttttattccatcttttgcatttcttctatttctgaaggtttgtctcttggcatctttttttagtttcttaccataagagtttgacccgaaactgctcacttcacattggatgacaccatgttcttcctctttgaaaagaaaaggggaatgtgtcccactagtgaaaggaaaacttttcaacactatccctgctttagtctcagcaaactcagactattctgcttagccttcattagtcatctgggtgtgagtgtgtcttgttctgtttttctttttaataaaacttttaaaccatatatttagcctgtgaccaggggggccaaaccctaagatttctggtaaacctgaagggtggccctcctcagacaatttatctcccagcaatgaccctactacactcgcgtactgtgaatttgggaggaggtaaagttgacttctcctcgtgggcagttttccaatcaccttgtgagtagacacctgccaatattgtttgaaacctttttttaatatgacatcctctcttgtcattctcttctcccctttcccacagacttccctcctgggtccaggttcagaaccaagacttctgtacctagtgctgcctgattggtgaacattgacttcaagtagcatagcccttgtgtgactcacaactccgtgtccttcctaaagtttcgggaagcagggttgtctaatatgcacatttcttattttggtcatatttttactttagtgtcactcaccttttacaaagtgactttgtactcatttagggctctatcggaaatgcttccattttgccttttctacagttaggccaattttgaaatatataaattctatgcaacatttatgttgagttaccaatggaagccaaaagttctcttcccaaactgccaagaatgatacaggccataattgaaatgggaataccttttaagtttcattaggggtggggtgggagtgggacaggaacaagacttgcctagatctttgttgtatcttggggacttttactttgttgtttgatgcttaaacttcaaaattctctgtattcaaatttgattgtggcgaatctacttcaaaaaggaaaaataatccaactttgtggatattaaatggaaggtttgctgttttgatctagttgtttccagtggagcagttttatgaaatatgttctataagatgtacattttttcattgtaacatagaaattgtaaataattgattaaagtgctgcattttgatgaattttttctagccatttttaaagagaaaactaggaattgagtattttgtgtacggtatgtttccatcctccctccccttcctcctcccctcctctctctctcttcctacctatttaattttcatttgtcatgaggtttttggatttgccaatgatctgctggacatcatgccccatgtcatagagaataaagctgatgattgtaccagtcttaaattattcatgattcaataaaattgatgcttatttattc

SEQ ID NO: 158921 - DNA, 10667 bp, Homo sapiens
  Payload ID: 11096
  Gene Symbol: NAV2
  Gene Name: neuron navigator 2
  Uniprot ID: Q8IVL1
  ENST ID: ENST00000360655
  CDS Start-End: 230-7327
tctcatgatgccggcagcagtcaccctcattgcaaaggcagtggtgccgagtgaggttcccgagtggattttaagaagacaggaagacctttgaagaggtggtgctgatttccttggctggcgggaactctgtctggctgttgcatgcatcacttttgtgtgggttattttgttcctctgtggatttggaagcatcgctgaaggagagagaggattttatttctgggaaatggaatcggtttctgagtccagccaacagcagaagagaaagccagttatccacggactggaagatcaaaagaggatctacacagactgggccaatcattacctagccaaatccggccacaagcgtctcatcagggatctccagcaagatgtgacagatggcgtcctcctggcccagattatccaggttgtggcaaatgaaaagattgaagacatcaatggctgtccgaagaacagatcccaaatgattgaaaacatagatgcctgcttgaatttcctggcagctaagggaataaacatccaggggctgtctgcagaagagatcaggaatggaaacctcaaggccattctaggcctcttcttcagcctctcccgatacaagcagcagcagcagcagccccagaagcagcacctctcctcacctctgccgcccgccgtatcccaggtggccggggccccctcccagtgccaggctggcacccctcagcagcaggtgccagtcactccccaagccccgtgccagcctcaccagccagcgccacatcagcagtcaaaagcacaagctgaaatgcagtccagacttccaggtcctaccgcgagggtatccgctgcaggcagcgaggccaaaacacgcggagggtcaactactgctaacaaccgacgcagccagagctttaacaactatgataaatccaaaccagtcacctccccacccccaccgccaagcagccacgagaaagagcctttggcaagttcagcctcctcccaccccggaatgagtgacaatgcacctgcttccttggagagcggcagcagctccacccctactaattgcagtacctcctcggccatcccgcagcccggtgcagccaccaagccttggcgcagcaaatccctcagcgtgaagcacagtgccacggtatccatgctctcggtcaagcctcctgggcctgaggcccccaggcccacacctgaagccatgaagccggcccccaacaatcagaagtccatgctggaaaagctgaaacttttcaacagtaaagggggctcaaaggcaggtgaggggccggggtcccgggacacaagctgtgagcggctggagactctgcccagcttcgaagagagcgaggagctggaggccgccagtcgcatgctcaccaccgtgggccctgcttccagcagccccaagattgcactcaagggcattgcccagaggacttttagccgggcactgaccaacaagaagagttctctgaaaggcaatgagaaagagaaggagaaacaacagcgggagaaggataaggagaaaagcaaggaccttgccaagagagcctctgtgacggagaggctggacctcaaggaggagccaaaagaagaccccagtggagcagctgtgcccgagatgccaaaaaagtcctccaagattgccagcttcatccccaaaggggggaagctcaacagtgccaagaaggagcccatggccccttcccacagtggaataccaaaaccaggaatgaaaagcatgcccgggaaatccccaagtgccccagcgccttccaaggaaggggagcggagccggagtgggaagctgagctcaggactcccccagcagaagccccagctggacggcagacactccagttcctcttccagcctggcgtcctcagaaggaaaaggcccaggagggaccaccctgaaccacagcatcagcagccagactgtcagtgggtctgtcgggaccacccagaccacaggaagcaataccgtcagtgttcagctacctcagccccagcagcaatacaaccatcccaacactgccacggttgcacctttcctgtacaggtctcagacggacactgaagggaatgttactgccgagtcaagctcaacaggtgtgagcgtggagcccagccacttcaccaagactggacagcctgctctggaagaactcactggggaagatcctgaggctcggcggctgcggacagtgaagaacatcgctgatctgcggcagaatttggaggaaaccatgtccagtttaaggggaactcaggttacacacagcacattggaaaccacgtttgacaccaatgtcaccacggagatgagtggccgtagcatactcagcttgacagggaggcccacacctctgtcctggagactgggccagtccagccctcggctccaagcaggagacgccccctcaatgggcaatgggtatccccctcgagccaacgccagcaggttcatcaacactgagtcaggtcgctatgtgtactccgcccctctgagaaggcagctggcctcccggggcagtagtgtctgccatgtggacgtctcagacaaggcaggagatgagatggacctggaaggcatcagcatggatgcccccggctacatgagcgacggggatgttctgagcaagaacatccggaccgatgacattacaagcggatacatgactgatggtggacttggcctctatacccgtcgcctgaaccggctccctgatgggatggctgtggtacgggagaccctgcaacgaaatacctccctgggcctcggagacgctgacagctgggacgacagcagctccgtcagcagcggcatcagcgacaccatagacaacctcagcactgatgacatcaacaccagctcctccatcagctcttatgccaacacacctgcctcctctcgaaaaaacctggatgtgcagactgatgctgagaagcactcacaggtggagaggaattccctgtggtctggtgatgatgtcaagaaatcagacggaggctcagacagcggcataaaaatggagccaggttccaagtggaggcggaatccttctgatgtgtctgacgagtccgacaaaagcacgtcgggcaagaagaatcctgtcatctcccagacaggctcatggcggcgaggcatgacagctcaggtgggcatcaccatgccaaggacgaagccttcagccccggcaggcgcactgaagaccccaggaactggaaaaacagacgacgcaaaggtgtctgagaaaggaaggctttctcctaaagcctcccaggtgaagcgctccccatcagatgcaggccggagcagtggtgacgaatccaaaaagcccctccccagcagctctaggacacctactgccaatgccaacagctttgggttcaagaagcagagtggttccgccgccggcctggccatgatcacagccagcggggtgactgtcaccagcaggtcagccacactgggcaaaatcccaaagtcatctgcactcgtcagtcggtctgctggtcggaagtcaagtatggatggggctcagaatcaggatgacgggtatctagccctaagctcccggacaaaccttcagtaccggagtttgccgaggcccagtaagtccaacagccggaacggggctgggaacaggtctagcaccagcagcatagattccaacattagcagcaagtccgcaggcctgccagtgcccaaactgagggagccttccaaaacagccctaggcagctctctaccaggtctggtcaaccaaacagacaaggagaaaggcatctcatcagacaacgagagtgtggcttcctgtaactcggtgaaagtgaatccggcagcccagcctgtgtccagtccggctcagaccagtctccagcctggagccaagtacccagatgtggcctctcccacactccgcagactctttggtgggaagcctaccaagcaagtgcccatcgccacagctgaaaacatgaaaaattcggtggtcatctccaatcctcatgccaccatgactcagcaaggtaacctagactccccgtcaggcagtggcgtcctgagcagtgggagcagcagtcctctctacagcaagaatgtggacctcaaccagtctccgctagcctccagccccagctcagcccactcggccccttccaacagcctcacctggggcaccaacgccagcagctcctccgcagttagcaaggatggcctgggctttcagtctgtcagcagcctccacaccagctgtgagtccatcgacatctccctcagcagtggaggggtccccagccacaattcttccactggcctcatcgcctcctccaaggacgactccttgactccctttgtcagaactaacagtgtgaagaccacactgtcagaaagccctctctcttcccctgctgctagccctaagttctgcagaagtactctgcccaggaaacaggacagtgacccgcaccttgataggaacactttgcctaagaaaggactcaggtatactcccacctcccagcttcgcacgcaagaagatgcaaaagaatggttacggtcccattctgcaggaggccttcaggacaccgctgccaattcccccttttcctctggctccagcgtgacttctccctccggaacaagattcaacttttcccagcttgcgagtcccaccactgtcacccagatgagcttgtccaacccgaccatgctgaggactcacagcctctccaatgctgatgggcagtatgatccatacactgacagccgcttccggaatagctccatgtccctggatgagaagagcagaaccatgagccgttcaggctcattccgggatgggtttgaagaagttcatggatcctcactctccttggtttccagcacatcgtcagtttattctacaccagaagaaaaatgccagtcagagattcgcaagctgcggcgggaactggatgcctcccaggagaaagtttcagctttgaccacccagctgacagcaaatgctcaccttgtggcagcctttgaacagagtcttggtaacatgacaatcaggctccagagtctgaccatgacagctgagcagaaggactcagaactgaatgagttaagaaaaaccattgagctgctaaagaaacagaacgcagctgcccaggctgccattaatggagtaattaacacacctgagctcaactgcaaaggaaacggcactgcccagtctgcagacctccgcatccgcaggcagcactcctcagacagcgtctccagcatcaacagtgccaccagccactccagcgtgggcagcaacatagagagtgactcaaagaagaagaagcggaagaactggttacgcagctccttcaagcaagctttcgggaagaagaagtccccaaaatctgcgtcctctcattcagatattgaggagatgacggattcttctttgccttcctcaccaaagttaccgcacaatgggtccacaggttccaccccactgctgaggaattctcactccaactctctaatttcagaatgcatggatagtgaagctgagaccgtcatgcagctccgaaatgagttaagagacaaggagatgaagctgacggatatccgcttagaagctctcagttctgcccaccagctggaccagctccgggaggccatgaacaggatgcagagtgaaatagagaagctgaaagctgagaatgatcggctgaagtcagagtctcaaggcagtggctgcagccgggctccttcccaagtgtccatctctgcctccccgaggcagtccatgggcctctcccagcacagcttgaacctcactgagtcaaccagcctggacatgttgctggatgacactggtgaatgctcggctcggaaggaaggaggcaggcatgttaagatagttgtcagctttcaggaggaaatgaagtggaaggaggattccagaccacatctctttcttattggctgcattggagttagtggcaagacgaagtgggatgtgctcgatggggtggttagacggctgttcaaagaatacatcattcatgtcgacccagtgagtcagctagggctgaattcagacagcgttcttggctacagcattggagaaatcaagcgcagcaacacttccgaaacaccggagctgcttccttgtggctatctggttggagagaacacgaccatctcagtgactgtgaaagggctcgcagaaaacagcctggactcactggtgtttgagtccttgattcccaagcccatcctgcagcgctacgtctccctcctgatagagcaccgtcggatcattctctctggccccagcggcactgggaaaacctacctggccaaccggctgtctgagtatatagtgcttcgagagggacgggagttgacagacggggttatcgccacctttaacgtggaccataagtccagcaaggaattgcgccagtacctgtccaaccttgctgaccagtgcaacagtgagaacaatgctgtggacatgcccctcgtcatcatcctggacaacctacaccacgtgagctctctgggagagatcttcaatgggctgctcaactgcaagtaccacaaatgcccttacataattggcacaatgaaccaggctacctcttcgactcccaacctgcagcttcaccataacttcagatgggtgctttgtgccaaccacacggagcctgtgaagggtttccttggccgattcctgaggaggaagctcatggaaacagagatcagtgggcgggtgcgcaatatggagctggtaaaaatcattgactggattcccaaggtctggcatcacctcaaccgcttcctggaggctcacagttcctcggacgtcaccatcggcccccggctcttcctgtcatgccccatcgatgtggacggctcgagagtgtggttcaccgacttgtggaactattccattatcccctatctcctggaagccgtcagagaaggactccagctctatggaaggcgcgccccctgggaggatcctgccaagtgggtgatggacacatatccatgggcagccagcccacaacagcacgagtggcctcccctgctgcagttacggcctgaggatgtcggcttcgacggctactccatgcctcgggagggatcgacaagcaagcagatgccccccagtgatgctgaaggtgacccgctgatgaacatgctgatgaggctgcaggaggcagccaactactccagcccccagagctatgacagcgactccaacagcaacagccatcacgatgacatcttggactcctctttggagtccactctgtgacaggggcccggagcccagcgccctcctcttctcctcaccgcattccacctgcatcccccacatcaccctgaagatgacttcctgagccagcccccagccacagccttagagctgcgggaacaccgagaccccccgtccttcagcctcgacctgggtgcaggcatcccgggccagctgcctgcggaccgcttccttccacagcgagaactgcactaccttctgttgtactttaattattgttttgccttgttgctgtgacctccctaagacactgaagatacttctcgggaaaggatcatcgccgttgaaatgaaaagagagacagagagaaaaaaaaaaagagaacccacatgaagctctgaaaccaaacagcatcctgccatgagcttcccagagacagaagagactggagcaaagtcggaaacacagagaagcacggcttcccctcagcacagaccctccagactgggtctcagagccgtgccacccaccctcccacacagccggccacagggagaactggtgctaaccagggtgcttgctttggtcacgttcaacgcactacagagctacgacacagggaaaccttaggagcaaataaaccgtgctttcatgttttttaaatggtgctttccttacccgagaggtattttgcctgttccaatcaaaccaccccattcaggtccatcagcctctgattaatatccgtgagagtgagtgacggagtgagagtgtgagcgagtggatgtggctgtcagtgcagaacagcatgtgtctctttccttctgatatatgaatgaatcaggtttttttttttttttttctgcaaacactgtgtatagtgagacttgttctactttggagaacaggttaccttttgaaaatgaggttgagtttcttcctttctgatgcattgatttttgaagatttttttttcccccttcccctcttggtcagaatcaatcctttggtgaaagtaagaaccgcaggagttgagttttggtttggtcctgctcagttttggtttttagttgtccatcctcacagtcctacacactcgcctcctcctgctagggctgggggtatctgtgtcctttaaaatggatgaggacctggtcctcgacatgtgggtgagccatggaccttgccttcccttctcgtccttgagggtttagaacacacaccaacacctccagcgtccccgccccagcttccggtggggtgatgcggtcaccctgcaaaagacttgcactttcctcagaaccaacatgacgcagctcaataagggtgagggtcactccctcccagaagccccgtctggacgagccttgcctgacctcttcggtgctgaccttcccaaagtgatgccttactggttttgtactaactgtgttcattttacataagtgtcgtgcctgcctggggtttgttttttttgtcattgttttccccattgaaacaaacagggctaaaaagtcatctgttcattaggagaactcaagttgctgtgacttttctcatccaaaagactcatttgtgtggatgcgtgaccatgggaaaaagaaaaaaaaaaagatccattttttaggttcttttcggtctccagctgacaacccaactggacaatgatctgtctggtgcaggagaaggcaaaagtttctacaagtctacatgaccttgctgatacttgttctaatagaaacccagtctgctgtgtcttcaacatactggtattttcattacaaagtatggtaaatttttgagttgtttgtttctgttttgtaaagagaatccttattggacaccagtgaaggtgtctctgttttaatgatcagggtttttattccatcttttgcatttcttctatttctgaaggtttgtctcttggcatctttttttagtttcttaccataagagtttgacccgaaactgctcacttcacattggatgacaccatgttcttcctctttgaaaagaaaaggggaatgtgtcccactagtgaaaggaaaacttttcaacactatccctgctttagtctcagcaaactcagactattctgcttagccttcattagtcatctgggtgtgagtgtgtcttgttctgtttttctttttaataaaacttttaaaccatatatttagcctgtgaccaggggggccaaaccctaagatttctggtaaacctgaagggtggccctcctcagacaatttatctcccagcaatgaccctactacactcgcgtactgtgaatttgggaggaggtaaagttgacttctcctcgtgggcagttttccaatcaccttgtgagtagacacctgccaatattgtttgaaacctttttttaatatgacatcctctcttgtcattctcttctcccctttcccacagacttccctcctgggtccaggttcagaaccaagacttctgtacctagtgctgcctgattggtgaacattgacttcaagtagcatagcccttgtgtgactcacaactccgtgtccttcctaaagtttcgggaagcagggttgtctaatatgcacatttcttattttggtcatatttttactttagtgtcactcaccttttacaaagtgactttgtactcatttagggctctatcggaaatgcttccattttgccttttctacagttaggccaattttgaaatatataaattctatgcaacatttatgttgagttaccaatggaagccaaaagttctcttcccaaactgccaagaatgatacaggccataattgaaatgggaataccttttaagtttcattaggggtggggtgggagtgggacaggaacaagacttgcctagatctttgttgtatcttggggacttttactttgttgtttgatgcttaaacttcaaaattctctgtattcaaatttgattgtggcgaatctacttcaaaaaggaaaaataatccaactttgtggatattaaatggaaggtttgctgttttgatctagttgtttccagtggagcagttttatgaaatatgttctataagatgtacattttttcattgtaacatagaaattgtaaataattgattaaagtgctgcattttgatgaattttttctagccatttttaaagagaaaactaggaattgagtattttgtgtacggtatgtttccatcctccctccccttcctcctcccctcctctctctctcttcctacctatttaattttcatttgtcatgaggtttttggatttgccaatgatctgctggacatcatgccccatgtcatagagaataaagctgatgattgtaccagtcttaaattattcatgattcaataaaattgatgcttatttattc

SEQ ID NO: 158922 - DNA, 11000 bp, Homo sapiens
  Payload ID: 11096
  Gene Symbol: NAV2
  Gene Name: neuron navigator 2
  Uniprot ID: Q8IVL1
  ENST ID: ENST00000396085
  CDS Start-End: 362-7660
gttaatatgggcgtccaagcctctgtttcccaggaggaaatttgcaagaggcggcagcccctgagcgcccagagctcttgaaaggccacccaggagaggtgtgagacccggcggcagcatccgtccaggtgggacccgctgagcgccgtggccagtcccccattcccatcccggcaccccaaaggcgcgctcgcccgattgcttcgagttccccgacctggggattttttttttagccgctggtggtgggcgcctcgtgggctaaggcccggcgcctgctctgctacccgcgctgcctttagcggtcgcccccgccgccgctgccagggacgtgctgggaaagcccaagccccgggagaagatgccggccatcctggtcgcctccaaaatgaagtcgggactgcccaaacccgtgcacagcgccgcgcccatcctgcacgtgcccccggcccgggcgggcccccagccctgctacctgaagttgggaagcaaggtggaggtgagcaagaccacctatcctagccagatccccctgaaatcgcaggtgctgcaggggctgcaggagccagcgggggaggggctcccgctgcggaagagcggctcggtggaaaacgggttcgatacccagatctacacagactgggccaatcattacctagccaaatccggccacaagcgtctcatcagggatctccagcaagatgtgacagatggcgtcctcctggcccagattatccaggttgtggcaaatgaaaagattgaagacatcaatggctgtccgaagaacagatcccaaatgattgaaaacatagatgcctgcttgaatttcctggcagctaagggaataaacatccaggggctgtctgcagaagagatcaggaatggaaacctcaaggccattctaggcctcttcttcagcctctcccgatacaagcagcagcagcagcagccccagaagcagcacctctcctcacctctgccgcccgccgtatcccaggtggccggggccccctcccagtgccaggctggcacccctcagcagcaggtgccagtcactccccaagccccgtgccagcctcaccagccagcgccacatcagcagtcaaaagcacaagctgaaatgcagtccagacttccaggtcctaccgcgagggtatccgctgcaggcagcgaggccaaaacacgcggagggtcaactactgctaacaaccgacgcagccagagctttaacaactatgataaatccaaaccagtcacctccccacccccaccgccaagcagccacgagaaagagcctttggcaagttcagcctcctcccaccccggaatgagtgacaatgcacctgcttccttggagagcggcagcagctccacccctactaattgcagtacctcctcggccatcccgcagcccggtgcagccaccaagccttggcgcagcaaatccctcagcgtgaagcacagtgccacggtatccatgctctcggtcaagcctcctgggcctgaggcccccaggcccacacctgaagccatgaagccggcccccaacaatcagaagtccatgctggaaaagctgaaacttttcaacagtaaagggggctcaaaggcaggtgaggggccggggtcccgggacacaagctgtgagcggctggagactctgcccagcttcgaagagagcgaggagctggaggccgccagtcgcatgctcaccaccgtgggccctgcttccagcagccccaagattgcactcaagggcattgcccagaggacttttagccgggcactgaccaacaagaagagttctctgaaaggcaatgagaaagagaaggagaaacaacagcgggagaaggataaggagaaaagcaaggaccttgccaagagagcctctgtgacggagaggctggacctcaaggaggagccaaaagaagaccccagtggagcagctgtgcccgagatgccaaaaaagtcctccaagattgccagcttcatccccaaaggggggaagctcaacagtgccaagaaggagcccatggccccttcccacagtggaataccaaaaccaggaatgaaaagcatgcccgggaaatccccaagtgccccagcgccttccaaggaaggggagcggagccggagtgggaagctgagctcaggactcccccagcagaagccccagctggacggcagacactccagttcctcttccagcctggcgtcctcagaaggaaaaggcccaggagggaccaccctgaaccacagcatcagcagccagactgtcagtgggtctgtcgggaccacccagaccacaggaagcaataccgtcagtgttcagctacctcagccccagcagcaatacaaccatcccaacactgccacggttgcacctttcctgtacaggtctcagacggacactgaagggaatgttactgccgagtcaagctcaacaggtgtgagcgtggagcccagccacttcaccaagactggacagcctgctctggaagaactcactggggaagatcctgaggctcggcggctgcggacagtgaagaacatcgctgatctgcggcagaatttggaggaaaccatgtccagtttaaggggaactcaggttacacacagcacattggaaaccacgtttgacaccaatgtcaccacggagatgagtggccgtagcatactcagcttgacagggaggcccacacctctgtcctggagactgggccagtccagccctcggctccaagcaggagacgccccctcaatgggcaatgggtatccccctcgagccaacgccagcaggttcatcaacactgagtcaggtcgctatgtgtactccgcccctctgagaaggcagctggcctcccggggcagtagtgtctgccatgtggacgtctcagacaaggcaggagatgagatggacctggaaggcatcagcatggatgcccccggctacatgagcgacggggatgttctgagcaagaacatccggaccgatgacattacaagcggatacatgactgatggtggacttggcctctatacccgtcgcctgaaccggctccctgatgggatggctgtggtacgggagaccctgcaacgaaatacctccctgggcctcggagacgctgacagctgggacgacagcagctccgtcagcagcggcatcagcgacaccatagacaacctcagcactgatgacatcaacaccagctcctccatcagctcttatgccaacacacctgcctcctctcgaaaaaacctggatgtgcagactgatgctgagaagcactcacaggtggagaggaattccctgtggtctggtgatgatgtcaagaaatcagacggaggctcagacagcggcataaaaatggagccaggttccaagtggaggcggaatccttctgatgtgtctgacgagtccgacaaaagcacgtcgggcaagaagaatcctgtcatctcccagacaggctcatggcggcgaggcatgacagctcaggtgggcatcaccatgccaaggacgaagccttcagccccggcaggcgcactgaagaccccaggaactggaaaaacagacgacgcaaaggtgtctgagaaaggaaggctttctcctaaagcctcccaggtgaagcgctccccatcagatgcaggccggagcagtggtgacgaatccaaaaagcccctccccagcagctctaggacacctactgccaatgccaacagctttgggttcaagaagcagagtggttccgccgccggcctggccatgatcacagccagcggggtgactgtcaccagcaggtcagccacactgggcaaaatcccaaagtcatctgcactcgtcagtcggtctgctggtcggaagtcaagtatggatggggctcagaatcaggatgacgggtatctagccctaagctcccggacaaaccttcagtaccggagtttgccgaggcccagtaagtccaacagccggaacggggctgggaacaggtctagcaccagcagcatagattccaacattagcagcaagtccgcaggcctgccagtgcccaaactgagggagccttccaaaacagccctaggcagctctctaccaggtctggtcaaccaaacagacaaggagaaaggcatctcatcagacaacgagagtgtggcttcctgtaactcggtgaaagtgaatccggcagcccagcctgtgtccagtccggctcagaccagtctccagcctggagccaagtacccagatgtggcctctcccacactccgcagactctttggtgggaagcctaccaagcaagtgcccatcgccacagctgaaaacatgaaaaattcggtggtcatctccaatcctcatgccaccatgactcagcaaggtaacctagactccccgtcaggcagtggcgtcctgagcagtgggagcagcagtcctctctacagcaagaatgtggacctcaaccagtctccgctagcctccagccccagctcagcccactcggccccttccaacagcctcacctggggcaccaacgccagcagctcctccgcagttagcaaggatggcctgggctttcagtctgtcagcagcctccacaccagctgtgagtccatcgacatctccctcagcagtggaggggtccccagccacaattcttccactggcctcatcgcctcctccaaggacgactccttgactccctttgtcagaactaacagtgtgaagaccacactgtcagaaagccctctctcttcccctgctgctagccctaagttctgcagaagtactctgcccaggaaacaggacagtgacccgcaccttgataggaacactttgcctaagaaaggactcaggtatactcccacctcccagcttcgcacgcaagaagatgcaaaagaatggttacggtcccattctgcaggaggccttcaggacaccgctgccaattcccccttttcctctggctccagcgtgacttctccctccggaacaagattcaacttttcccagcttgcgagtcccaccactgtcacccagatgagcttgtccaacccgaccatgctgaggactcacagcctctccaatgctgatgggcagtatgatccatacactgacagccgcttccggaatagctccatgtccctggatgagaagagcagaaccatgagccgttcaggctcattccgggatgggtttgaagaagttcatggatcctcactctccttggtttccagcacatcgtcagtttattctacaccagaagaaaaatgccagtcagagattcgcaagctgcggcgggaactggatgcctcccaggagaaagtttcagctttgaccacccagctgacagcaaatgctcaccttgtggcagcctttgaacagagtcttggtaacatgacaatcaggctccagagtctgaccatgacagctgagcagaaggactcagaactgaatgagttaagaaaaaccattgagctgctaaagaaacagaacgcagctgcccaggctgccattaatggagtaattaacacacctgagctcaactgcaaaggaaacggcactgcccagtctgcagacctccgcatccgcaggcagcactcctcagacagcgtctccagcatcaacagtgccaccagccactccagcgtgggcagcaacatagagagtgactcaaagaagaagaagcggaagaactgggtcaatgagttacgcagctccttcaagcaagctttcgggaagaagaagtccccaaaatctgcgtcctctcattcagatattgaggagatgacggattcttctttgccttcctcaccaaagttaccgcacaatgggtccacaggttccaccccactgctgaggaattctcactccaactctctaatttcagaatgcatggatagtgaagctgagaccgtcatgcagctccgaaatgagttaagagacaaggagatgaagctgacggatatccgcttagaagctctcagttctgcccaccagctggaccagctccgggaggccatgaacaggatgcagagtgaaatagagaagctgaaagctgagaatgatcggctgaagtcagagtctcaaggcagtggctgcagccgggctccttcccaagtgtccatctctgcctccccgaggcagtccatgggcctctcccagcacagcttgaacctcactgagtcaaccagcctggacatgttgctggatgacactggtgaatgctcggctcggaaggaaggaggcaggcatgttaagatagttgtcagctttcaggaggaaatgaagtggaaggaggattccagaccacatctctttcttattggctgcattggagttagtggcaagacgaagtgggatgtgctcgatggggtggttagacggctgttcaaagaatacatcattcatgtcgacccagtgagtcagctagggctgaattcagacagcgttcttggctacagcattggagaaatcaagcgcagcaacacttccgaaacaccggagctgcttccttgtggctatctggttggagagaacacgaccatctcagtgactgtgaaagggctcgcagaaaacagcctggactcactggtgtttgagtccttgattcccaagcccatcctgcagcgctacgtctccctcctgatagagcaccgtcggatcattctctctggccccagcggcactgggaaaacctacctggccaaccggctgtctgagtatatagtgcttcgagagggacgggagttgacagacggggttatcgccacctttaacgtggaccataagtccagcaaggaattgcgccagtacctgtccaaccttgctgaccagtgcaacagtgagaacaatgctgtggacatgcccctcgtcatcatcctggacaacctacaccacgtgagctctctgggagagatcttcaatgggctgctcaactgcaagtaccacaaatgcccttacataattggcacaatgaaccaggctacctcttcgactcccaacctgcagcttcaccataacttcagatgggtgctttgtgccaaccacacggagcctgtgaagggtttccttggccgattcctgaggaggaagctcatggaaacagagatcagtgggcgggtgcgcaatatggagctggtaaaaatcattgactggattcccaaggtctggcatcacctcaaccgcttcctggaggctcacagttcctcggacgtcaccatcggcccccggctcttcctgtcatgccccatcgatgtggacggctcgagagtgtggttcaccgacttgtggaactattccattatcccctatctcctggaagccgtcagagaaggactccagctctatggaaggcgcgccccctgggaggatcctgccaagtgggtgatggacacatatccatgggcagccagcccacaacagcacgagtggcctcccctgctgcagttacggcctgaggatgtcggcttcgacggctactccatgcctcgggagggatcgacaagcaagcagatgccccccagtgatgctgaaggtgacccgctgatgaacatgctgatgaggctgcaggaggcagccaactactccagcccccagagctatgacagcgactccaacagcaacagccatcacgatgacatcttggactcctctttggagtccactctgtgacaggggcccggagcccagcgccctcctcttctcctcaccgcattccacctgcatcccccacatcaccctgaagatgacttcctgagccagcccccagccacagccttagagctgcgggaacaccgagaccccccgtccttcagcctcgacctgggtgcaggcatcccgggccagctgcctgcggaccgcttccttccacagcgagaactgcactaccttctgttgtactttaattattgttttgccttgttgctgtgacctccctaagacactgaagatacttctcgggaaaggatcatcgccgttgaaatgaaaagagagacagagagaaaaaaaaaaagagaacccacatgaagctctgaaaccaaacagcatcctgccatgagcttcccagagacagaagagactggagcaaagtcggaaacacagagaagcacggcttcccctcagcacagaccctccagactgggtctcagagccgtgccacccaccctcccacacagccggccacagggagaactggtgctaaccagggtgcttgctttggtcacgttcaacgcactacagagctacgacacagggaaaccttaggagcaaataaaccgtgctttcatgttttttaaatggtgctttccttacccgagaggtattttgcctgttccaatcaaaccaccccattcaggtccatcagcctctgattaatatccgtgagagtgagtgacggagtgagagtgtgagcgagtggatgtggctgtcagtgcagaacagcatgtgtctctttccttctgatatatgaatgaatcaggtttttttttttttttttctgcaaacactgtgtatagtgagacttgttctactttggagaacaggttaccttttgaaaatgaggttgagtttcttcctttctgatgcattgatttttgaagatttttttttcccccttcccctcttggtcagaatcaatcctttggtgaaagtaagaaccgcaggagttgagttttggtttggtcctgctcagttttggtttttagttgtccatcctcacagtcctacacactcgcctcctcctgctagggctgggggtatctgtgtcctttaaaatggatgaggacctggtcctcgacatgtgggtgagccatggaccttgccttcccttctcgtccttgagggtttagaacacacaccaacacctccagcgtccccgccccagcttccggtggggtgatgcggtcaccctgcaaaagacttgcactttcctcagaaccaacatgacgcagctcaataagggtgagggtcactccctcccagaagccccgtctggacgagccttgcctgacctcttcggtgctgaccttcccaaagtgatgccttactggttttgtactaactgtgttcattttacataagtgtcgtgcctgcctggggtttgttttttttgtcattgttttccccattgaaacaaacagggctaaaaagtcatctgttcattaggagaactcaagttgctgtgacttttctcatccaaaagactcatttgtgtggatgcgtgaccatgggaaaaagaaaaaaaaaaagatccattttttaggttcttttcggtctccagctgacaacccaactggacaatgatctgtctggtgcaggagaaggcaaaagtttctacaagtctacatgaccttgctgatacttgttctaatagaaacccagtctgctgtgtcttcaacatactggtattttcattacaaagtatggtaaatttttgagttgtttgtttctgttttgtaaagagaatccttattggacaccagtgaaggtgtctctgttttaatgatcagggtttttattccatcttttgcatttcttctatttctgaaggtttgtctcttggcatctttttttagtttcttaccataagagtttgacccgaaactgctcacttcacattggatgacaccatgttcttcctctttgaaaagaaaaggggaatgtgtcccactagtgaaaggaaaacttttcaacactatccctgctttagtctcagcaaactcagactattctgcttagccttcattagtcatctgggtgtgagtgtgtcttgttctgtttttctttttaataaaacttttaaaccatatatttagcctgtgaccaggggggccaaaccctaagatttctggtaaacctgaagggtggccctcctcagacaatttatctcccagcaatgaccctactacactcgcgtactgtgaatttgggaggaggtaaagttgacttctcctcgtgggcagttttccaatcaccttgtgagtagacacctgccaatattgtttgaaacctttttttaatatgacatcctctcttgtcattctcttctcccctttcccacagacttccctcctgggtccaggttcagaaccaagacttctgtacctagtgctgcctgattggtgaacattgacttcaagtagcatagcccttgtgtgactcacaactccgtgtccttcctaaagtttcgggaagcagggttgtctaatatgcacatttcttattttggtcatatttttactttagtgtcactcaccttttacaaagtgactttgtactcatttagggctctatcggaaatgcttccattttgccttttctacagttaggccaattttgaaatatataaattctatgcaacatttatgttgagttaccaatggaagccaaaagttctcttcccaaactgccaagaatgatacaggccataattgaaatgggaataccttttaagtttcattaggggtggggtgggagtgggacaggaacaagacttgcctagatctttgttgtatcttggggacttttactttgttgtttgatgcttaaacttcaaaattctctgtattcaaatttgattgtggcgaatctacttcaaaaaggaaaaataatccaactttgtggatattaaatggaaggtttgctgttttgatctagttgtttccagtggagcagttttatgaaatatgttctataagatgtacattttttcattgtaacatagaaattgtaaataattgattaaagtgctgcattttgatgaattttttctagccatttttaaagagaaaactaggaattgagtattttgtgtacggtatgtttccatcctccctccccttcctcctcccctcctctctctctcttcctacctatttaattttcatttgtcatgaggtttttggatttgccaatgatctgctggacatcatgccccatgtcatagagaataaagctgatgattgtaccagtcttaaattattcatgattcaataaaattgatgcttatttattc

SEQ ID NO: 158923 - DNA, 7882 bp, Homo sapiens
  Payload ID: 11096
  Gene Symbol: NAV2
  Gene Name: neuron navigator 2
  Uniprot ID: Q8IVL1
  ENST ID: ENST00000396087
  CDS Start-End: 100-7566
taaggcccggcgcctgctctgctacccgcgctgcctttagcggtcgcccccgccgccgctgccagggacgtgctgggaaagcccaagccccgggagaagatgccggccatcctggtcgcctccaaaatgaagtcgggactgcccaaacccgtgcacagcgccgcgcccatcctgcacgtgcccccggcccgggcgggcccccagccctgctacctgaagttgggaagcaaggtggaggtgagcaagaccacctatcctagccagatccccctgaaatcgcaggtgctgcaggggctgcaggagccagcgggggaggggctcccgctgcggaagagcggctcggtggaaaacgggttcgatacccagatctacacagactgggccaatcattacctagccaaatccggccacaagcgtctcatcagggatctccagcaagatgtgacagatggcgtcctcctggcccagattatccaggttgtggcaaatgaaaagattgaagacatcaatggctgtccgaagaacagatcccaaatgattgaaaacatagatgcctgcttgaatttcctggcagctaagggaataaacatccaggggctgtctgcagaagagatcaggaatggaaacctcaaggccattctaggcctcttcttcagcctctcccgatacaagcagcagcagcagcagccccagaagcagcacctctcctcacctctgccgcccgccgtatcccaggtggccggggccccctcccagtgccaggctggcacccctcagcagcaggtgccagtcactccccaagccccgtgccagcctcaccagccagcgccacatcagcagtcaaaagcacaagctgaaatgcagtccagtgcatcatccaaggactcatctcaaagcaaaatcatccgcttcactctgggtcagaaaaagatctctagacttccaggtcctaccgcgagggtatccgctgcaggcagcgaggccaaaacacgcggagggtcaactactgctaacaaccgacgcagccagagctttaacaactatgataaatccaaaccagtcacctccccacccccaccgccaagcagccacgagaaagagcctttggcaagttcagcctcctcccaccccggaatgagtgacaatgcacctgcttccttggagagcggcagcagctccacccctactaattgcagtacctcctcggccatcccgcagcccggtgcagccaccaagccttggcgcagcaaatccctcagcgtgaagcacagtgccacggtatccatgctctcggtcaagcctcctgggcctgaggcccccaggcccacacctgaagccatgaagccggcccccaacaatcagaagtccatgctggaaaagctgaaacttttcaacagtaaagggggctcaaaggcaggtgaggggccggggtcccgggacacaagctgtgagcggctggagactctgcccagcttcgaagagagcgaggagctggaggccgccagtcgcatgctcaccaccgtgggccctgcttccagcagccccaagattgcactcaagggcattgcccagaggacttttagccgggcactgaccaacaagaagagttctctgaaaggcaatgagaaagagaaggagaaacaacagcgggagaaggataaggagaaaagcaaggaccttgccaagagagcctctgtgacggagaggctggacctcaaggaggagccaaaagaagaccccagtggagcagctgtgcccgagatgccaaaaaagtcctccaagattgccagcttcatccccaaaggggggaagctcaacagtgccaagaaggagcccatggccccttcccacagtggaataccaaaaccaggaatgaaaagcatgcccgggaaatccccaagtgccccagcgccttccaaggaaggggagcggagccggagtgggaagctgagctcaggactcccccagcagaagccccagctggacggcagacactccagttcctcttccagcctggcgtcctcagaaggaaaaggcccaggagggaccaccctgaaccacagcatcagcagccagactgtcagtgggtctgtcgggaccacccagaccacaggaagcaataccgtcagtgttcagctacctcagccccagcagcaatacaaccatcccaacactgccacggttgcacctttcctgtacaggtctcagacggacactgaagggaatgttactgccgagtcaagctcaacaggtgtgagcgtggagcccagccacttcaccaagactggacagcctgctctggaagaactcactggggaagatcctgaggctcggcggctgcggacagtgaagaacatcgctgatctgcggcagaatttggaggaaaccatgtccagtttaaggggaactcaggttacacacagcacattggaaaccacgtttgacaccaatgtcaccacggagatgagtggccgtagcatactcagcttgacagggaggcccacacctctgtcctggagactgggccagtccagccctcggctccaagcaggagacgccccctcaatgggcaatgggtatccccctcgagccaacgccagcaggttcatcaacactgagtcaggtcgctatgtgtactccgcccctctgagaaggcagctggcctcccggggcagtagtgtctgccatgtggacgtctcagacaaggcaggagatgagatggacctggaaggcatcagcatggatgcccccggctacatgagcgacggggatgttctgagcaagaacatccggaccgatgacattacaagcggatacatgactgatggtggacttggcctctatacccgtcgcctgaaccggctccctgatgggatggctgtggtacgggagaccctgcaacgaaatacctccctgggcctcggagacgctgacagctgggacgacagcagctccgtcagcagcggcatcagcgacaccatagacaacctcagcactgatgacatcaacaccagctcctccatcagctcttatgccaacacacctgcctcctctcgaaaaaacctggatgtgcagactgatgctgagaagcactcacaggtggagaggaattccctgtggtctggtgatgatgtcaagaaatcagacggaggctcagacagcggcataaaaatggagccaggttccaagtggaggcggaatccttctgatgtgtctgacgagtccgacaaaagcacgtcgggcaagaagaatcctgtcatctcccagacaggctcatggcggcgaggcatgacagctcaggtgggcatcaccatgccaaggacgaagccttcagccccggcaggcgcactgaagaccccaggaactggaaaaacagacgacgcaaaggtgtctgagaaaggaaggctttctcctaaagcctcccaggtgaagcgctccccatcagatgcaggccggagcagtggtgacgaatccaaaaagcccctccccagcagctctaggacacctactgccaatgccaacagctttgggttcaagaagcagagtggttccgccgccggcctggccatgatcacagccagcggggtgactgtcaccagcaggtcagccacactgggcaaaatcccaaagtcatctgcactcgtcagtcggtctgctggtcggaagtcaagtatggatggggctcagaatcaggatgacgggtatctagccctaagctcccggacaaaccttcagtaccggagtttgccgaggcccagtaagtccaacagccggaacggggctgggaacaggtctagcaccagcagcatagattccaacattagcagcaagtccgcaggcctgccagtgcccaaactgagggagccttccaaaacagccctaggcagctctctaccaggtctggtcaaccaaacagacaaggagaaaggcatctcatcagacaacgagagtgtggcttcctgtaactcggtgaaagtgaatccggcagcccagcctgtgtccagtccggctcagaccagtctccagcctggagccaagtacccagatgtggcctctcccacactccgcagactctttggtgggaagcctaccaagcaagtgcccatcgccacagctgaaaacatgaaaaattcggtggtcatctccaatcctcatgccaccatgactcagcaaggtaacctagactccccgtcaggcagtggcgtcctgagcagtgggagcagcagtcctctctacagcaagaatgtggacctcaaccagtctccgctagcctccagccccagctcagcccactcggccccttccaacagcctcacctggggcaccaacgccagcagctcctccgcagttagcaaggatggcctgggctttcagtctgtcagcagcctccacaccagctgtgagtccatcgacatctccctcagcagtggaggggtccccagccacaattcttccactggcctcatcgcctcctccaaggacgactccttgactccctttgtcagaactaacagtgtgaagaccacactgtcagaaagccctctctcttcccctgctgctagccctaagttctgcagaagtactctgcccaggaaacaggacagtgacccgcaccttgataggaacactttgcctaagaaaggactcaggtatactcccacctcccagcttcgcacgcaagaagatgcaaaagaatggttacggtcccattctgcaggaggccttcaggacaccgctgccaattcccccttttcctctggctccagcgtgacttctccctccggaacaagattcaacttttcccagcttgcgagtcccaccactgtcacccagatgagcttgtccaacccgaccatgctgaggactcacagcctctccaatgctgatgggcagtatgatccatacactgacagccgcttccggaatagctccatgtccctggatgagaagagcagaaccatgagccgttcaggctcattccgggatgggtttgaagaagaatcatgggagaaaagttctgtggacaactttgtcagccgtcttcacagctcacttcatttctctcttcctttgttccatcacgcaaggtatgagttagttcatggatcctcactctccttggtttccagcacatcgtcagtttattctacaccagaagaaaaatgccagtcagagattcgcaagctgcggcgggaactggatgcctcccaggagaaagtttcagctttgaccacccagctgacagcaaatgctcaccttgtggcagcctttgaacagagtcttggtaacatgacaatcaggctccagagtctgaccatgacagctgagcagaaggactcagaactgaatgagttaagaaaaaccattgagctgctaaagaaacagaacgcagctgcccaggctgccattaatggagtaattaacacacctgagctcaactgcaaaggaaacggcactgcccagtctgcagacctccgcatccgcaggcagcactcctcagacagcgtctccagcatcaacagtgccaccagccactccagcgtgggcagcaacatagagagtgactcaaagaagaagaagcggaagaactgggtcaatgagttacgcagctccttcaagcaagctttcgggaagaagaagtccccaaaatctgcgtcctctcattcagatattgaggagatgacggattcttctttgccttcctcaccaaagttaccgcacaatgggtccacaggttccaccccactgctgaggaattctcactccaactctctaatttcagaatgcatggatagtgaagctgagaccgtcatgcagctccgaaatgagttaagagacaaggagatgaagctgacggatatccgcttagaagctctcagttctgcccaccagctggaccagctccgggaggccatgaacaggatgcagagtgaaatagagaagctgaaagctgagaatgatcggctgaagtcagagtctcaaggcagtggctgcagccgggctccttcccaagtgtccatctctgcctccccgaggcagtccatgggcctctcccagcacagcttgaacctcactgagtcaaccagcctggacatgttgctggatgacactggtgaatgctcggctcggaaggaaggaggcaggcatgttaagatagttgtcagctttcaggaggaaatgaagtggaaggaggattccagaccacatctctttcttattggctgcattggagttagtggcaagacgaagtgggatgtgctcgatggggtggttagacggctgttcaaagaatacatcattcatgtcgacccagtgagtcagctagggctgaattcagacagcgttcttggctacagcattggagaaatcaagcgcagcaacacttccgaaacaccggagctgcttccttgtggctatctggttggagagaacacgaccatctcagtgactgtgaaagggctcgcagaaaacagcctggactcactggtgtttgagtccttgattcccaagcccatcctgcagcgctacgtctccctcctgatagagcaccgtcggatcattctctctggccccagcggcactgggaaaacctacctggccaaccggctgtctgagtatatagtgcttcgagagggacgggagttgacagacggggttatcgccacctttaacgtggaccataagtccagcaaggaattgcgccagtacctgtccaaccttgctgaccagtgcaacagtgagaacaatgctgtggacatgcccctcgtcatcatcctggacaacctacaccacgtgagctctctgggagagatcttcaatgggctgctcaactgcaagtaccacaaatgcccttacataattggcacaatgaaccaggctacctcttcgactcccaacctgcagcttcaccataacttcagatgggtgctttgtgccaaccacacggagcctgtgaagggtttccttggccgattcctgaggaggaagctcatggaaacagagatcagtgggcgggtgcgcaatatggagctggtaaaaatcattgactggattcccaaggtctggcatcacctcaaccgcttcctggaggctcacagttcctcggacgtcaccatcggcccccggctcttcctgtcatgccccatcgatgtggacggctcgagagtgtggttcaccgacttgtggaactattccattatcccctatctcctggaagccgtcagagaaggactccagctctatggaaggcgcgccccctgggaggatcctgccaagtgggtgatggacacatatccatgggcagccagcccacaacagcacgagtggcctcccctgctgcagttacggcctgaggatgtcggcttcgacggctactccatgcctcgggagggatcgacaagcaagcagatgccccccagtgatgctgaaggtgacccgctgatgaacatgctgatgaggctgcaggaggcagccaactactccagcccccagagctatgacagcgactccaacagcaacagccatcacgatgacatcttggactcctctttggagtccactctgtgacaggggcccggagcccagcgccctcctcttctcctcaccgcattccacctgcatcccccacatcaccctgaagatgacttcctgagccagcccccagccacagccttagagctgcgggaacaccgagaccccccgtccttcagcctcgacctgggtgcaggcatcccgggccagctgcctgcggaccgcttccttccacagcgagaactgcactaccttctgttgtactttaattattgttttgccttgttgctgtgacctccctaagacactgaagatacttctcgggaaaggatcatcgccgttgaaatgaaaa

SEQ ID NO: 158924 - DNA, 556 bp, Homo sapiens
  Payload ID: 11096
  Gene Symbol: NAV2
  Gene Name: neuron navigator 2
  ENST ID: ENST00000530408
  CDS Start-End: 76-556
acagctgacttgataccagcactgaggcctgacctctcgatccttcagcacttcagagggccgcaatgtagtgaaatgctctggcctaggaaccttacaagctgggacgacagcagctccgtcagcagcggcatcagcgacaccatagacaacctcagcactgatgacatcaacaccagctcctccatcagctcttatgccaacacacctgcctcctctcgaaaaaacctggatgtgcagactgatgctgagaagcactcacaggtggagaggaattccctgtggtctggtgatgatgtcaagaaatcagacggaggctcagacagcggcataaaaatggagccaggttccaagtggaggcggaatccttctgatgtgtctgacgagtccgacaaaagcacgtcgggcaagaagaatcctgtcatctcccagacaggctcatggcggcgaggcatgacagctcaggtgggcatcaccatgccaaggacgaagccttcagccccggcaggcgcactgaagaccccaggaactggaaaaacagacgacgcaaaggtgt

SEQ ID NO: 158925 - DNA, 11171 bp, Homo sapiens
  Payload ID: 11096
  Gene Symbol: NAV2
  Gene Name: neuron navigator 2
  ENST ID: ENST00000527559
  CDS Start-End: 362-7831
gttaatatgggcgtccaagcctctgtttcccaggaggaaatttgcaagaggcggcagcccctgagcgcccagagctcttgaaaggccacccaggagaggtgtgagacccggcggcagcatccgtccaggtgggacccgctgagcgccgtggccagtcccccattcccatcccggcaccccaaaggcgcgctcgcccgattgcttcgagttccccgacctggggattttttttttagccgctggtggtgggcgcctcgtgggctaaggcccggcgcctgctctgctacccgcgctgcctttagcggtcgcccccgccgccgctgccagggacgtgctgggaaagcccaagccccgggagaagatgccggccatcctggtcgcctccaaaatgaagtcgggactgcccaaacccgtgcacagcgccgcgcccatcctgcacgtgcccccggcccgggcgggcccccagccctgctacctgaagttgggaagcaaggtggaggtgagcaagaccacctatcctagccagatccccctgaaatcgcaggtgctgcaggggctgcaggagccagcgggggaggggctcccgctgcggaagagcggctcggtggaaaacgggttcgatacccagatctacacagactgggccaatcattacctagccaaatccggccacaagcgtctcatcagggatctccagcaagatgtgacagatggcgtcctcctggcccagattatccaggttgtggcaaatgaaaagattgaagacatcaatggctgtccgaagaacagatcccaaatgattgaaaacatagatgcctgcttgaatttcctggcagctaagggaataaacatccaggggctgtctgcagaagagatcaggaatggaaacctcaaggccattctaggcctcttcttcagcctctcccgatacaagcagcagcagcagcagccccagaagcagcacctctcctcacctctgccgcccgccgtatcccaggtggccggggccccctcccagtgccaggctggcacccctcagcagcaggtgccagtcactccccaagccccgtgccagcctcaccagccagcgccacatcagcagtcaaaagcacaagctgaaatgcagtccagtgcatcatccaaggactcatctcaaagcaaaatcatccgcttcactctgggtcagaaaaagatctctagacttccaggtcctaccgcgagggtatccgctgcaggcagcgaggccaaaacacgcggagggtcaactactgctaacaaccgacgcagccagagctttaacaactatgataaatccaaaccagtcacctccccacccccaccgccaagcagccacgagaaagagcctttggcaagttcagcctcctcccaccccggaatgagtgacaatgcacctgcttccttggagagcggcagcagctccacccctactaattgcagtacctcctcggccatcccgcagcccggtgcagccaccaagccttggcgcagcaaatccctcagcgtgaagcacagtgccacggtatccatgctctcggtcaagcctcctgggcctgaggcccccaggcccacacctgaagccatgaagccggcccccaacaatcagaagtccatgctggaaaagctgaaacttttcaacagtaaagggggctcaaaggcaggtgaggggccggggtcccgggacacaagctgtgagcggctggagactctgcccagcttcgaagagagcgaggagctggaggccgccagtcgcatgctcaccaccgtgggccctgcttccagcagccccaagattgcactcaagggcattgcccagaggacttttagccgggcactgaccaacaagaagagttctctgaaaggcaatgagaaagagaaggagaaacaacagcgggagaaggataaggagaaaagcaaggaccttgccaagagagcctctgtgacggagaggctggacctcaaggaggagccaaaagaagaccccagtggagcagctgtgcccgagatgccaaaaaagtcctccaagattgccagcttcatccccaaaggggggaagctcaacagtgccaagaaggagcccatggccccttcccacagtggaataccaaaaccaggaatgaaaagcatgcccgggaaatccccaagtgccccagcgccttccaaggaaggggagcggagccggagtgggaagctgagctcaggactcccccagcagaagccccagctggacggcagacactccagttcctcttccagcctggcgtcctcagaaggaaaaggcccaggagggaccaccctgaaccacagcatcagcagccagactgtcagtgggtctgtcgggaccacccagaccacaggaagcaataccgtcagtgttcagctacctcagccccagcagcaatacaaccatcccaacactgccacggttgcacctttcctgtacaggtctcagacggacactgaagggaatgttactgccgagtcaagctcaacaggtgtgagcgtggagcccagccacttcaccaagactggacagcctgctctggaagaactcactggggaagatcctgaggctcggcggctgcggacagtgaagaacatcgctgatctgcggcagaatttggaggaaaccatgtccagtttaaggggaactcaggttacacacagcacattggaaaccacgtttgacaccaatgtcaccacggagatgagtggccgtagcatactcagcttgacagggaggcccacacctctgtcctggagactgggccagtccagccctcggctccaagcaggagacgccccctcaatgggcaatgggtatccccctcgagccaacgccagcaggttcatcaacactgagtcaggtcgctatgtgtactccgcccctctgagaaggcagctggcctcccggggcagtagtgtctgccatgtggacgtctcagacaaggcaggagatgagatggacctggaaggcatcagcatggatgcccccggctacatgagcgacggggatgttctgagcaagaacatccggaccgatgacattacaagcggatacatgactgatggtggacttggcctctatacccgtcgcctgaaccggctccctgatgggatggctgtggtacgggagaccctgcaacgaaatacctccctgggcctcggagacgctgacagctgggacgacagcagctccgtcagcagcggcatcagcgacaccatagacaacctcagcactgatgacatcaacaccagctcctccatcagctcttatgccaacacacctgcctcctctcgaaaaaacctggatgtgcagactgatgctgagaagcactcacaggtggagaggaattccctgtggtctggtgatgatgtcaagaaatcagacggaggctcagacagcggcataaaaatggagccaggttccaagtggaggcggaatccttctgatgtgtctgacgagtccgacaaaagcacgtcgggcaagaagaatcctgtcatctcccagacaggctcatggcggcgaggcatgacagctcaggtgggcatcaccatgccaaggacgaagccttcagccccggcaggcgcactgaagaccccaggaactggaaaaacagacgacgcaaaggtgtctgagaaaggaaggctttctcctaaagcctcccaggtgaagcgctccccatcagatgcaggccggagcagtggtgacgaatccaaaaagcccctccccagcagctctaggacacctactgccaatgccaacagctttgggttcaagaagcagagtggttccgccgccggcctggccatgatcacagccagcggggtgactgtcaccagcaggtcagccacactgggcaaaatcccaaagtcatctgcactcgtcagtcggtctgctggtcggaagtcaagtatggatggggctcagaatcaggatgacgggtatctagccctaagctcccggacaaaccttcagtaccggagtttgccgaggcccagtaagtccaacagccggaacggggctgggaacaggtctagcaccagcagcatagattccaacattagcagcaagtccgcaggcctgccagtgcccaaactgagggagccttccaaaacagccctaggcagctctctaccaggtctggtcaaccaaacagacaaggagaaaggcatctcatcagacaacgagagtgtggcttcctgtaactcggtgaaagtgaatccggcagcccagcctgtgtccagtccggctcagaccagtctccagcctggagccaagtacccagatgtggcctctcccacactccgcagactctttggtgggaagcctaccaagcaagtgcccatcgccacagctgaaaacatgaaaaattcggtggtcatctccaatcctcatgccaccatgactcagcaaggtaacctagactccccgtcaggcagtggcgtcctgagcagtgggagcagcagtcctctctacagcaagaatgtggacctcaaccagtctccgctagcctccagccccagctcagcccactcggccccttccaacagcctcacctggggcaccaacgccagcagctcctccgcagttagcaaggatggcctgggctttcagtctgtcagcagcctccacaccagctgtgagtccatcgacatctccctcagcagtggaggggtccccagccacaattcttccactggcctcatcgcctcctccaaggacgactccttgactccctttgtcagaactaacagtgtgaagaccacactgtcagaaagccctctctcttcccctgctgctagccctaagttctgcagaagtactctgcccaggaaacaggacagtgacccgcaccttgataggaacactttgcctaagaaaggactcaggtatactcccacctcccagcttcgcacgcaagaagatgcaaaagaatggttacggtcccattctgcaggaggccttcaggacaccgctgccaattcccccttttcctctggctccagcgtgacttctccctccggaacaagattcaacttttcccagcttgcgagtcccaccactgtcacccagatgagcttgtccaacccgaccatgctgaggactcacagcctctccaatgctgatgggcagtatgatccatacactgacagccgcttccggaatagctccatgtccctggatgagaagagcagaaccatgagccgttcaggctcattccgggatgggtttgaagaagaatcatgggagaaaagttctgtggacaactttgtcagccgtcttcacagctcacttcatttctctcttcctttgttccatcacgcaaggtatgagttagttcatggatcctcactctccttggtttccagcacatcgtcagtttattctacaccagaagaaaaatgccagtcagagattcgcaagctgcggcgggaactggatgcctcccaggagaaagtttcagctttgaccacccagctgacagcaaatgctcaccttgtggcagcctttgaacagagtcttggtaacatgacaatcaggctccagagtctgaccatgacagctgagcagaaggactcagaactgaatgagttaagaaaaaccattgagctgctaaagaaacagaacgcagctgcccaggctgccattaatggagtaattaacacacctgagctcaactgcaaaggaaacggcactgcccagtctgcagacctccgcatccgcaggcagcactcctcagacagcgtctccagcatcaacagtgccaccagccactccagcgtgggcagcaacatagagagtgactcaaagaagaagaagcggaagaactgggtgaatattcagttacgcagctccttcaagcaagctttcgggaagaagaagtccccaaaatctgcgtcctctcattcagatattgaggagatgacggattcttctttgccttcctcaccaaagttaccgcacaatgggtccacaggttccaccccactgctgaggaattctcactccaactctctaatttcagaatgcatggatagtgaagctgagaccgtcatgcagctccgaaatgagttaagagacaaggagatgaagctgacggatatccgcttagaagctctcagttctgcccaccagctggaccagctccgggaggccatgaacaggatgcagagtgaaatagagaagctgaaagctgagaatgatcggctgaagtcagagtctcaaggcagtggctgcagccgggctccttcccaagtgtccatctctgcctccccgaggcagtccatgggcctctcccagcacagcttgaacctcactgagtcaaccagcctggacatgttgctggatgacactggtgaatgctcggctcggaaggaaggaggcaggcatgttaagatagttgtcagctttcaggaggaaatgaagtggaaggaggattccagaccacatctctttcttattggctgcattggagttagtggcaagacgaagtgggatgtgctcgatggggtggttagacggctgttcaaagaatacatcattcatgtcgacccagtgagtcagctagggctgaattcagacagcgttcttggctacagcattggagaaatcaagcgcagcaacacttccgaaacaccggagctgcttccttgtggctatctggttggagagaacacgaccatctcagtgactgtgaaagggctcgcagaaaacagcctggactcactggtgtttgagtccttgattcccaagcccatcctgcagcgctacgtctccctcctgatagagcaccgtcggatcattctctctggccccagcggcactgggaaaacctacctggccaaccggctgtctgagtatatagtgcttcgagagggacgggagttgacagacggggttatcgccacctttaacgtggaccataagtccagcaaggaattgcgccagtacctgtccaaccttgctgaccagtgcaacagtgagaacaatgctgtggacatgcccctcgtcatcatcctggacaacctacaccacgtgagctctctgggagagatcttcaatgggctgctcaactgcaagtaccacaaatgcccttacataattggcacaatgaaccaggctacctcttcgactcccaacctgcagcttcaccataacttcagatgggtgctttgtgccaaccacacggagcctgtgaagggtttccttggccgattcctgaggaggaagctcatggaaacagagatcagtgggcgggtgcgcaatatggagctggtaaaaatcattgactggattcccaaggtctggcatcacctcaaccgcttcctggaggctcacagttcctcggacgtcaccatcggcccccggctcttcctgtcatgccccatcgatgtggacggctcgagagtgtggttcaccgacttgtggaactattccattatcccctatctcctggaagccgtcagagaaggactccagctctatggaaggcgcgccccctgggaggatcctgccaagtgggtgatggacacatatccatgggcagccagcccacaacagcacgagtggcctcccctgctgcagttacggcctgaggatgtcggcttcgacggctactccatgcctcgggagggatcgacaagcaagcagatgccccccagtgatgctgaaggtgacccgctgatgaacatgctgatgaggctgcaggaggcagccaactactccagcccccagagctatgacagcgactccaacagcaacagccatcacgatgacatcttggactcctctttggagtccactctgtgacaggggcccggagcccagcgccctcctcttctcctcaccgcattccacctgcatcccccacatcaccctgaagatgacttcctgagccagcccccagccacagccttagagctgcgggaacaccgagaccccccgtccttcagcctcgacctgggtgcaggcatcccgggccagctgcctgcggaccgcttccttccacagcgagaactgcactaccttctgttgtactttaattattgttttgccttgttgctgtgacctccctaagacactgaagatacttctcgggaaaggatcatcgccgttgaaatgaaaagagagacagagagaaaaaaaaaaagagaacccacatgaagctctgaaaccaaacagcatcctgccatgagcttcccagagacagaagagactggagcaaagtcggaaacacagagaagcacggcttcccctcagcacagaccctccagactgggtctcagagccgtgccacccaccctcccacacagccggccacagggagaactggtgctaaccagggtgcttgctttggtcacgttcaacgcactacagagctacgacacagggaaaccttaggagcaaataaaccgtgctttcatgttttttaaatggtgctttccttacccgagaggtattttgcctgttccaatcaaaccaccccattcaggtccatcagcctctgattaatatccgtgagagtgagtgacggagtgagagtgtgagcgagtggatgtggctgtcagtgcagaacagcatgtgtctctttccttctgatatatgaatgaatcaggtttttttttttttttttctgcaaacactgtgtatagtgagacttgttctactttggagaacaggttaccttttgaaaatgaggttgagtttcttcctttctgatgcattgatttttgaagatttttttttcccccttcccctcttggtcagaatcaatcctttggtgaaagtaagaaccgcaggagttgagttttggtttggtcctgctcagttttggtttttagttgtccatcctcacagtcctacacactcgcctcctcctgctagggctgggggtatctgtgtcctttaaaatggatgaggacctggtcctcgacatgtgggtgagccatggaccttgccttcccttctcgtccttgagggtttagaacacacaccaacacctccagcgtccccgccccagcttccggtggggtgatgcggtcaccctgcaaaagacttgcactttcctcagaaccaacatgacgcagctcaataagggtgagggtcactccctcccagaagccccgtctggacgagccttgcctgacctcttcggtgctgaccttcccaaagtgatgccttactggttttgtactaactgtgttcattttacataagtgtcgtgcctgcctggggtttgttttttttgtcattgttttccccattgaaacaaacagggctaaaaagtcatctgttcattaggagaactcaagttgctgtgacttttctcatccaaaagactcatttgtgtggatgcgtgaccatgggaaaaagaaaaaaaaaaagatccattttttaggttcttttcggtctccagctgacaacccaactggacaatgatctgtctggtgcaggagaaggcaaaagtttctacaagtctacatgaccttgctgatacttgttctaatagaaacccagtctgctgtgtcttcaacatactggtattttcattacaaagtatggtaaatttttgagttgtttgtttctgttttgtaaagagaatccttattggacaccagtgaaggtgtctctgttttaatgatcagggtttttattccatcttttgcatttcttctatttctgaaggtttgtctcttggcatctttttttagtttcttaccataagagtttgacccgaaactgctcacttcacattggatgacaccatgttcttcctctttgaaaagaaaaggggaatgtgtcccactagtgaaaggaaaacttttcaacactatccctgctttagtctcagcaaactcagactattctgcttagccttcattagtcatctgggtgtgagtgtgtcttgttctgtttttctttttaataaaacttttaaaccatatatttagcctgtgaccaggggggccaaaccctaagatttctggtaaacctgaagggtggccctcctcagacaatttatctcccagcaatgaccctactacactcgcgtactgtgaatttgggaggaggtaaagttgacttctcctcgtgggcagttttccaatcaccttgtgagtagacacctgccaatattgtttgaaacctttttttaatatgacatcctctcttgtcattctcttctcccctttcccacagacttccctcctgggtccaggttcagaaccaagacttctgtacctagtgctgcctgattggtgaacattgacttcaagtagcatagcccttgtgtgactcacaactccgtgtccttcctaaagtttcgggaagcagggttgtctaatatgcacatttcttattttggtcatatttttactttagtgtcactcaccttttacaaagtgactttgtactcatttagggctctatcggaaatgcttccattttgccttttctacagttaggccaattttgaaatatataaattctatgcaacatttatgttgagttaccaatggaagccaaaagttctcttcccaaactgccaagaatgatacaggccataattgaaatgggaataccttttaagtttcattaggggtggggtgggagtgggacaggaacaagacttgcctagatctttgttgtatcttggggacttttactttgttgtttgatgcttaaacttcaaaattctctgtattcaaatttgattgtggcgaatctacttcaaaaaggaaaaataatccaactttgtggatattaaatggaaggtttgctgttttgatctagttgtttccagtggagcagttttatgaaatatgttctataagatgtacattttttcattgtaacatagaaattgtaaataattgattaaagtgctgcattttgatgaattttttctagccatttttaaagagaaaactaggaattgagtattttgtgtacggtatgtttccatcctccctccccttcctcctcccctcctctctctctcttcctacctatttaattttcatttgtcatgaggtttttggatttgccaatgatctgctggacatcatgccccatgtcatagagaataaagctgatgattgtaccagtcttaaattattcatgattcaataaaattgatgcttatttattc

SEQ ID NO: 158926 - DNA, 2716 bp, Homo sapiens
  Payload ID: 11096
  Gene Symbol: NAV2
  Gene Name: neuron navigator 2
  ENST ID: ENST00000525322
  CDS Start-End: 270-2716
acttttcacagctgacttgataccagcactgaggcctgacctctcgatccttcagcacttcagaggttaattttgttgggggatcggatttctttcctggcctggggaatggtgatccctgctagctagtcctttagttacagagttgctgggtgcctgggattccctggcccagtgtgggctggctcagctggctaaaggacttgccatcctgtgagattcattcagcttctttgtccgctgttctccaagggccgcaatgtagtgaaatgctctggcctaggaaccttacaagctgggacgacagcagctccgtcagcagcggcatcagcgacaccatagacaacctcagcactgatgacatcaacaccagctcctccatcagctcttatgccaacacacctgcctcctctcgaaaaaacctggatgtgcagactgatgctgagaagcactcacaggtggagaggaattccctgtggtctggtgatgatgtcaagaaatcagacggaggctcagacagcggcataaaaatggagccaggttccaagtggaggcggaatccttctgatgtgtctgacgagtccgacaaaagcacgtcgggcaagaagaatcctgtcatctcccagacaggctcatggcggcgaggcatgacagctcaggtgggcatcaccatgccaaggacgaagccttcagccccggcaggcgcactgaagaccccaggaactggaaaaacagacgacgcaaaggtgtctgagaaaggaaggctttctcctaaagcctcccaggtgaagcgctccccatcagatgcaggccggagcagtggtgacgaatccaaaaagcccctccccagcagctctaggacacctactgccaatgccaacagctttgggttcaagaagcagagtggttccgccgccggcctggccatgatcacagccagcggggtgactgtcaccagcaggtcagccacactgggcaaaatcccaaagtcatctgcactcgtcagtcggtctgctggtcggaagtcaagtatggatggggctcagaatcaggatgacgggtatctagccctaagctcccggacaaaccttcagtaccggagtttgccgaggcccagtaagtccaacagccggaacggggctgggaacaggtctagcaccagcagcatagattccaacattagcagcaagtccgcaggcctgccagtgcccaaactgagggagccttccaaaacagccctaggcagctctctaccaggtctggtcaaccaaacagacaaggagaaaggcatctcatcagacaacgagagtgtggcttcctgtaactcggtgaaagtgaatccggcagcccagcctgtgtccagtccggctcagaccagtctccagcctggagccaagtacccagatgtggcctctcccacactccgcagactctttggtgggaagcctaccaagcaagtgcccatcgccacagctgaaaacatgaaaaattcggtggtcatctccaatcctcatgccaccatgactcagcaaggtaacctagactccccgtcaggcagtggcgtcctgagcagtgggagcagcagtcctctctacagcaagaatgtggacctcaaccagtctccgctagcctccagccccagctcagcccactcggccccttccaacagcctcacctggggcaccaacgccagcagctcctccgcagttagcaaggatggcctgggctttcagtctgtcagcagcctccacaccagctgtgagtccatcgacatctccctcagcagtggaggggtccccagccacaattcttccactggcctcatcgcctcctccaaggacgactccttgactccctttgtcagaactaacagtgtgaagaccacactgtcagaaaggtatactcccacctcccagcttcgcacgcaagaagatgcaaaagaatggttacggtcccattctgcaggaggccttcaggacaccgctgccaattcccccttttcctctggctccagcgtgacttctccctccggaacaagattcaacttttcccagcttgcgagtcccaccactgtcacccagatgagcttgtccaacccgaccatgctgaggactcacagcctctccaatgctgatgggcagtatgatccatacactgacagccgcttccggaatagctccatgtccctggatgagaagagcagaaccatgagccgttcaggctcattccgggatgggtttgaagaagttcatggatcctcactctccttggtttccagcacatcgtcagtttattctacaccagaagaaaaatgccagtcagagattcgcaagctgcggcgggaactggatgcctcccaggagaaagtttcagctttgaccacccagctgacagcaaatgctcaccttgtggcagcctttgaacagagtcttggtaacatgacaatcaggctccagagtctgaccatgacagctgagcagaaggactcagaactgaatgagttaagaaaaaccattgagctgctaaagaaacagaacgcagctgcccaggctgccattaatggagtaattaacacacctgagctcaactgcaaaggaaacggcactgcccagtctgcagacctccgcatccgcaggcagcactcctcagacagcgtctccagcatcaacagtgccaccagccactccagcgtgggcagcaacatagagagtgactc

SEQ ID NO: 158927 - DNA, 5084 bp, Homo sapiens
  Payload ID: 11096
  Gene Symbol: NAV2
  Gene Name: neuron navigator 2
  Uniprot ID: Q8IVL1
  ENST ID: ENST00000533917
  CDS Start-End: 258-4739
aatcttttcaatcgaatgctttgccttcagacgtcaatggaatgagctaagaaatgttatagtcaatgatttttgcatcattaaaagtagcacttagggctggaaagactttctgcaatgtttctgtgcagtctgtgaggatttaaagtagtttttcattcttagattttcttcaatttgacccgctgttgcaaactcccctgggaccacatggagggcccttccattcagtgctttacgggccgcaatgtagtgaaatgctctggcctaggaaccttacaagctgggacgacagcagctccgtcagcagcggcatcagcgacaccatagacaacctcagcactgatgacatcaacaccagctcctccatcagctcttatgccaacacacctgcctcctctcgaaaaaacctggatgtgcagactgatgctgagaagcactcacaggtggagaggaattccctgtggtctggtgatgatgtcaagaaatcagacggaggctcagacagcggcataaaaatggagccaggttccaagtggaggcggaatccttctgatgtgtctgacgagtccgacaaaagcacgtcgggcaagaagaatcctgtcatctcccagacaggctcatggcggcgaggcatgacagctcaggtgggcatcaccatgccaaggacgaagccttcagccccggcaggcgcactgaagaccccaggaactggaaaaacagacgacgcaaaggtgtctgagaaaggaaggctttctcctaaagcctcccaggtgaagcgctccccatcagatgcaggccggagcagtggtgacgaatccaaaaagcccctccccagcagctctaggacacctactgccaatgccaacagctttgggttcaagaagcagagtggttccgccgccggcctggccatgatcacagccagcggggtgactgtcaccagcaggtcagccacactgggcaaaatcccaaagtcatctgcactcgtcagtcggtctgctggtcggaagtcaagtatggatggggctcagaatcaggatgacgggtatctagccctaagctcccggacaaaccttcagtaccggagtttgccgaggcccagtaagtccaacagccggaacggggctgggaacaggtctagcaccagcagcatagattccaacattagcagcaagtccgcaggcctgccagtgcccaaactgagggagccttccaaaacagccctaggcagctctctaccaggtctggtcaaccaaacagacaaggagaaaggcatctcatcagacaacgagagtgtggcttcctgtaactcggtgaaagtgaatccggcagcccagcctgtgtccagtccggctcagaccagtctccagcctggagccaagtacccagatgtggcctctcccacactccgcagactctttggtgggaagcctaccaagcaagtgcccatcgccacagctgaaaacatgaaaaattcggtggtcatctccaatcctcatgccaccatgactcagcaaggtaacctagactccccgtcaggcagtggcgtcctgagcagtgggagcagcagtcctctctacagcaagaatgtggacctcaaccagtctccgctagcctccagccccagctcagcccactcggccccttccaacagcctcacctggggcaccaacgccagcagctcctccgcagttagcaaggatggcctgggctttcagtctgtcagcagcctccacaccagctgtgagtccatcgacatctccctcagcagtggaggggtccccagccacaattcttccactggcctcatcgcctcctccaaggacgactccttgactccctttgtcagaactaacagtgtgaagaccacactgtcagaaagtgacccgcaccttgataggaacactttgcctaagaaaggactcaggtatactcccacctcccagcttcgcacgcaagaagatgcaaaagaatggttacggtcccattctgcaggaggccttcaggacaccgctgccaattcccccttttcctctggctccagcgtgacttctccctccggaacaagattcaacttttcccagcttgcgagtcccaccactgtcacccagatgagcttgtccaacccgaccatgctgaggactcacagcctctccaatgctgatgggcagtatgatccatacactgacagccgcttccggaatagctccatgtccctggatgagaagagcagaaccatgagccgttcaggctcattccgggatgggtttgaagaagttcatggatcctcactctccttggtttccagcacatcgtcagtttattctacaccagaagaaaaatgccagtcagagattcgcaagctgcggcgggaactggatgcctcccaggagaaagtttcagctttgaccacccagctgacagcaaatgctcaccttgtggcagcctttgaacagagtcttggtaacatgacaatcaggctccagagtctgaccatgacagctgagcagaaggactcagaactgaatgagttaagaaaaaccattgagctgctaaagaaacagaacgcagctgcccaggctgccattaatggagtaattaacacacctgagctcaactgcaaaggaaacggcactgcccagtctgcagacctccgcatccgcaggcagcactcctcagacagcgtctccagcatcaacagtgccaccagccactccagcgtgggcagcaacatagagagtgactcaaagaagaagaagcggaagaactggttacgcagctccttcaagcaagctttcgggaagaagaagtccccaaaatctgcgtcctctcattcagatattgaggagatgacggattcttctttgccttcctcaccaaagttaccgcacaatgggtccacaggttccaccccactgctgaggaattctcactccaactctctaatttcagaatgcatggatagtgaagctgagaccgtcatgcagctccgaaatgagttaagagacaaggagatgaagctgacggatatccgcttagaagctctcagttctgcccaccagctggaccagctccgggaggccatgaacaggatgcagagtgaaatagagaagctgaaagctgagaatgatcggctgaagtcagagtctcaaggcagtggctgcagccgggctccttcccaagtgtccatctctgcctccccgaggcagtccatgggcctctcccagcacagcttgaacctcactgagtcaaccagcctggacatgttgctggatgacactggtgaatgctcggctcggaaggaaggaggcaggcatgttaagatagttgtcagctttcaggaggaaatgaagtggaaggaggattccagaccacatctctttcttattggctgcattggagttagtggcaagacgaagtgggatgtgctcgatggggtggttagacggctgttcaaagaatacatcattcatgtcgacccagtgagtcagctagggctgaattcagacagcgttcttggctacagcattggagaaatcaagcgcagcaacacttccgaaacaccggagctgcttccttgtggctatctggttggagagaacacgaccatctcagtgactgtgaaagggctcgcagaaaacagcctggactcactggtgtttgagtccttgattcccaagcccatcctgcagcgctacgtctccctcctgatagagcaccgtcggatcattctctctggccccagcggcactgggaaaacctacctggccaaccggctgtctgagtatatagtgcttcgagagggacgggagttgacagacggggttatcgccacctttaacgtggaccataagtccagcaaggaattgcgccagtacctgtccaaccttgctgaccagtgcaacagtgagaacaatgctgtggacatgcccctcgtcatcatcctggacaacctacaccacgtgagctctctgggagagatcttcaatgggctgctcaactgcaagtaccacaaatgcccttacataattggcacaatgaaccaggctacctcttcgactcccaacctgcagcttcaccataacttcagatgggtgctttgtgccaaccacacggagcctgtgaagggtttccttggccgattcctgaggaggaagctcatggaaacagagatcagtgggcgggtgcgcaatatggagctggtaaaaatcattgactggattcccaaggtctggcatcacctcaaccgcttcctggaggctcacagttcctcggacgtcaccatcggcccccggctcttcctgtcatgccccatcgatgtggacggctcgagagtgtggttcaccgacttgtggaactattccattatcccctatctcctggaagccgtcagagaaggactccagctctatggaaggcgcgccccctgggaggatcctgccaagtgggtgatggacacatatccatgggcagccagcccacaacagcacgagtggcctcccctgctgcagttacggcctgaggatgtcggcttcgacggctactccatgcctcgggagggatcgacaagcaagcagatgccccccagtgatgctgaaggtgacccgctgatgaacatgctgatgaggctgcaggaggcagccaactactccagcccccagagctatgacagcgactccaacagcaacagccatcacgatgacatcttggactcctctttggagtccactctgtgacaggggcccggagcccagcgccctcctcttctcctcaccgcattccacctgcatcccccacatcaccctgaagatgacttcctgagccagcccccagccacagccttagagctgcgggaacaccgagaccccccgtccttcagcctcgacctgggtgcaggcatcccgggccagctgcctgcggaccgcttccttccacagcgagaactgcactaccttctgttgtactttaattattgttttgccttgttgctgtgacctccctaagacactgaagatacttctcgggaaaggatcatcgccgttgaaatgaaaagagagacagagagaaaaaaaaaaagagaa

SEQ ID NO: 158928 - DNA, 11003 bp, Homo sapiens
  Payload ID: 11096
  Gene Symbol: NAV2
  Gene Name: neuron navigator 2
  ENST ID: ENST00000540292
  CDS Start-End: 362-7663
gttaatatgggcgtccaagcctctgtttcccaggaggaaatttgcaagaggcggcagcccctgagcgcccagagctcttgaaaggccacccaggagaggtgtgagacccggcggcagcatccgtccaggtgggacccgctgagcgccgtggccagtcccccattcccatcccggcaccccaaaggcgcgctcgcccgattgcttcgagttccccgacctggggattttttttttagccgctggtggtgggcgcctcgtgggctaaggcccggcgcctgctctgctacccgcgctgcctttagcggtcgcccccgccgccgctgccagggacgtgctgggaaagcccaagccccgggagaagatgccggccatcctggtcgcctccaaaatgaagtcgggactgcccaaacccgtgcacagcgccgcgcccatcctgcacgtgcccccggcccgggcgggcccccagccctgctacctgaagttgggaagcaaggtggaggtgagcaagaccacctatcctagccagatccccctgaaatcgcaggtgctgcaggggctgcaggagccagcgggggaggggctcccgctgcggaagagcggctcggtggaaaacgggttcgatacccagatctacacagactgggccaatcattacctagccaaatccggccacaagcgtctcatcagggatctccagcaagatgtgacagatggcgtcctcctggcccagattatccaggttgtggcaaatgaaaagattgaagacatcaatggctgtccgaagaacagatcccaaatgattgaaaacatagatgcctgcttgaatttcctggcagctaagggaataaacatccaggggctgtctgcagaagagatcaggaatggaaacctcaaggccattctaggcctcttcttcagcctctcccgatacaagcagcagcagcagcagccccagaagcagcacctctcctcacctctgccgcccgccgtatcccaggtggccggggccccctcccagtgccaggctggcacccctcagcagcaggtgccagtcactccccaagccccgtgccagcctcaccagccagcgccacatcagcagtcaaaagcacaagctgaaatgcagtccagacttccaggtcctaccgcgagggtatccgctgcaggcagcgaggccaaaacacgcggagggtcaactactgctaacaaccgacgcagccagagctttaacaactatgataaatccaaaccagtcacctccccacccccaccgccaagcagccacgagaaagagcctttggcaagttcagcctcctcccaccccggaatgagtgacaatgcacctgcttccttggagagcggcagcagctccacccctactaattgcagtacctcctcggccatcccgcagcccggtgcagccaccaagccttggcgcagcaaatccctcagcgtgaagcacagtgccacggtatccatgctctcggtcaagcctcctgggcctgaggcccccaggcccacacctgaagccatgaagccggcccccaacaatcagaagtccatgctggaaaagctgaaacttttcaacagtaaagggggctcaaaggcaggtgaggggccggggtcccgggacacaagctgtgagcggctggagactctgcccagcttcgaagagagcgaggagctggaggccgccagtcgcatgctcaccaccgtgggccctgcttccagcagccccaagattgcactcaagggcattgcccagaggacttttagccgggcactgaccaacaagaagagttctctgaaaggcaatgagaaagagaaggagaaacaacagcgggagaaggataaggagaaaagcaaggaccttgccaagagagcctctgtgacggagaggctggacctcaaggaggagccaaaagaagaccccagtggagcagctgtgcccgagatgccaaaaaagtcctccaagattgccagcttcatccccaaaggggggaagctcaacagtgccaagaaggagcccatggccccttcccacagtggaataccaaaaccaggaatgaaaagcatgcccgggaaatccccaagtgccccagcgccttccaaggaaggggagcggagccggagtgggaagctgagctcaggactcccccagcagaagccccagctggacggcagacactccagttcctcttccagcctggcgtcctcagaaggaaaaggcccaggagggaccaccctgaaccacagcatcagcagccagactgtcagtgggtctgtcgggaccacccagaccacaggaagcaataccgtcagtgttcagctacctcagccccagcagcaatacaaccatcccaacactgccacggttgcacctttcctgtacaggtctcagacggacactgaagggaatgttactgccgagtcaagctcaacaggtgtgagcgtggagcccagccacttcaccaagactggacagcctgctctggaagaactcactggggaagatcctgaggctcggcggctgcggacagtgaagaacatcgctgatctgcggcagaatttggaggaaaccatgtccagtttaaggggaactcaggttacacacagcacattggaaaccacgtttgacaccaatgtcaccacggagatgagtggccgtagcatactcagcttgacagggaggcccacacctctgtcctggagactgggccagtccagccctcggctccaagcaggagacgccccctcaatgggcaatgggtatccccctcgagccaacgccagcaggttcatcaacactgagtcaggtcgctatgtgtactccgcccctctgagaaggcagctggcctcccggggcagtagtgtctgccatgtggacgtctcagacaaggcaggagatgagatggacctggaaggcatcagcatggatgcccccggctacatgagcgacggggatgttctgagcaagaacatccggaccgatgacattacaagcggatacatgactgatggtggacttggcctctatacccgtcgcctgaaccggctccctgatgggatggctgtggtacgggagaccctgcaacgaaatacctccctgggcctcggagacgctgacagctgggacgacagcagctccgtcagcagcggcatcagcgacaccatagacaacctcagcactgatgacatcaacaccagctcctccatcagctcttatgccaacacacctgcctcctctcgaaaaaacctggatgtgcagactgatgctgagaagcactcacaggtggagaggaattccctgtggtctggtgatgatgtcaagaaatcagacggaggctcagacagcggcataaaaatggagccaggttccaagtggaggcggaatccttctgatgtgtctgacgagtccgacaaaagcacgtcgggcaagaagaatcctgtcatctcccagacaggctcatggcggcgaggcatgacagctcaggtgggcatcaccatgccaaggacgaagccttcagccccggcaggcgcactgaagaccccaggaactggaaaaacagacgacgcaaaggtgtctgagaaaggaaggctttctcctaaagcctcccaggtgaagcgctccccatcagatgcaggccggagcagtggtgacgaatccaaaaagcccctccccagcagctctaggacacctactgccaatgccaacagctttgggttcaagaagcagagtggttccgccgccggcctggccatgatcacagccagcggggtgactgtcaccagcaggtcagccacactgggcaaaatcccaaagtcatctgcactcgtcagtcggtctgctggtcggaagtcaagtatggatggggctcagaatcaggatgacgggtatctagccctaagctcccggacaaaccttcagtaccggagtttgccgaggcccagtaagtccaacagccggaacggggctgggaacaggtctagcaccagcagcatagattccaacattagcagcaagtccgcaggcctgccagtgcccaaactgagggagccttccaaaacagccctaggcagctctctaccaggtctggtcaaccaaacagacaaggagaaaggcatctcatcagacaacgagagtgtggcttcctgtaactcggtgaaagtgaatccggcagcccagcctgtgtccagtccggctcagaccagtctccagcctggagccaagtacccagatgtggcctctcccacactccgcagactctttggtgggaagcctaccaagcaagtgcccatcgccacagctgaaaacatgaaaaattcggtggtcatctccaatcctcatgccaccatgactcagcaaggtaacctagactccccgtcaggcagtggcgtcctgagcagtgggagcagcagtcctctctacagcaagaatgtggacctcaaccagtctccgctagcctccagccccagctcagcccactcggccccttccaacagcctcacctggggcaccaacgccagcagctcctccgcagttagcaaggatggcctgggctttcagtctgtcagcagcctccacaccagctgtgagtccatcgacatctccctcagcagtggaggggtccccagccacaattcttccactggcctcatcgcctcctccaaggacgactccttgactccctttgtcagaactaacagtgtgaagaccacactgtcagaaagccctctctcttcccctgctgctagccctaagttctgcagaagtactctgcccaggaaacaggacagtgacccgcaccttgataggaacactttgcctaagaaaggactcaggtatactcccacctcccagcttcgcacgcaagaagatgcaaaagaatggttacggtcccattctgcaggaggccttcaggacaccgctgccaattcccccttttcctctggctccagcgtgacttctccctccggaacaagattcaacttttcccagcttgcgagtcccaccactgtcacccagatgagcttgtccaacccgaccatgctgaggactcacagcctctccaatgctgatgggcagtatgatccatacactgacagccgcttccggaatagctccatgtccctggatgagaagagcagaaccatgagccgttcaggctcattccgggatgggtttgaagaagttcatggatcctcactctccttggtttccagcacatcgtcagtttattctacaccagaagaaaaatgccagtcagagattcgcaagctgcggcgggaactggatgcctcccaggagaaagtttcagctttgaccacccagctgacagcaaatgctcaccttgtggcagcctttgaacagagtcttggtaacatgacaatcaggctccagagtctgaccatgacagctgagcagaaggactcagaactgaatgagttaagaaaaaccattgagctgctaaagaaacagaacgcagctgcccaggctgccattaatggagtaattaacacacctgagctcaactgcaaaggaaacggcactgcccagtctgcagacctccgcatccgcaggcagcactcctcagacagcgtctccagcatcaacagtgccaccagccactccagcgtgggcagcaacatagagagtgactcaaagaagaagaagcggaagaactgggtgaatattcagttacgcagctccttcaagcaagctttcgggaagaagaagtccccaaaatctgcgtcctctcattcagatattgaggagatgacggattcttctttgccttcctcaccaaagttaccgcacaatgggtccacaggttccaccccactgctgaggaattctcactccaactctctaatttcagaatgcatggatagtgaagctgagaccgtcatgcagctccgaaatgagttaagagacaaggagatgaagctgacggatatccgcttagaagctctcagttctgcccaccagctggaccagctccgggaggccatgaacaggatgcagagtgaaatagagaagctgaaagctgagaatgatcggctgaagtcagagtctcaaggcagtggctgcagccgggctccttcccaagtgtccatctctgcctccccgaggcagtccatgggcctctcccagcacagcttgaacctcactgagtcaaccagcctggacatgttgctggatgacactggtgaatgctcggctcggaaggaaggaggcaggcatgttaagatagttgtcagctttcaggaggaaatgaagtggaaggaggattccagaccacatctctttcttattggctgcattggagttagtggcaagacgaagtgggatgtgctcgatggggtggttagacggctgttcaaagaatacatcattcatgtcgacccagtgagtcagctagggctgaattcagacagcgttcttggctacagcattggagaaatcaagcgcagcaacacttccgaaacaccggagctgcttccttgtggctatctggttggagagaacacgaccatctcagtgactgtgaaagggctcgcagaaaacagcctggactcactggtgtttgagtccttgattcccaagcccatcctgcagcgctacgtctccctcctgatagagcaccgtcggatcattctctctggccccagcggcactgggaaaacctacctggccaaccggctgtctgagtatatagtgcttcgagagggacgggagttgacagacggggttatcgccacctttaacgtggaccataagtccagcaaggaattgcgccagtacctgtccaaccttgctgaccagtgcaacagtgagaacaatgctgtggacatgcccctcgtcatcatcctggacaacctacaccacgtgagctctctgggagagatcttcaatgggctgctcaactgcaagtaccacaaatgcccttacataattggcacaatgaaccaggctacctcttcgactcccaacctgcagcttcaccataacttcagatgggtgctttgtgccaaccacacggagcctgtgaagggtttccttggccgattcctgaggaggaagctcatggaaacagagatcagtgggcgggtgcgcaatatggagctggtaaaaatcattgactggattcccaaggtctggcatcacctcaaccgcttcctggaggctcacagttcctcggacgtcaccatcggcccccggctcttcctgtcatgccccatcgatgtggacggctcgagagtgtggttcaccgacttgtggaactattccattatcccctatctcctggaagccgtcagagaaggactccagctctatggaaggcgcgccccctgggaggatcctgccaagtgggtgatggacacatatccatgggcagccagcccacaacagcacgagtggcctcccctgctgcagttacggcctgaggatgtcggcttcgacggctactccatgcctcgggagggatcgacaagcaagcagatgccccccagtgatgctgaaggtgacccgctgatgaacatgctgatgaggctgcaggaggcagccaactactccagcccccagagctatgacagcgactccaacagcaacagccatcacgatgacatcttggactcctctttggagtccactctgtgacaggggcccggagcccagcgccctcctcttctcctcaccgcattccacctgcatcccccacatcaccctgaagatgacttcctgagccagcccccagccacagccttagagctgcgggaacaccgagaccccccgtccttcagcctcgacctgggtgcaggcatcccgggccagctgcctgcggaccgcttccttccacagcgagaactgcactaccttctgttgtactttaattattgttttgccttgttgctgtgacctccctaagacactgaagatacttctcgggaaaggatcatcgccgttgaaatgaaaagagagacagagagaaaaaaaaaaagagaacccacatgaagctctgaaaccaaacagcatcctgccatgagcttcccagagacagaagagactggagcaaagtcggaaacacagagaagcacggcttcccctcagcacagaccctccagactgggtctcagagccgtgccacccaccctcccacacagccggccacagggagaactggtgctaaccagggtgcttgctttggtcacgttcaacgcactacagagctacgacacagggaaaccttaggagcaaataaaccgtgctttcatgttttttaaatggtgctttccttacccgagaggtattttgcctgttccaatcaaaccaccccattcaggtccatcagcctctgattaatatccgtgagagtgagtgacggagtgagagtgtgagcgagtggatgtggctgtcagtgcagaacagcatgtgtctctttccttctgatatatgaatgaatcaggtttttttttttttttttctgcaaacactgtgtatagtgagacttgttctactttggagaacaggttaccttttgaaaatgaggttgagtttcttcctttctgatgcattgatttttgaagatttttttttcccccttcccctcttggtcagaatcaatcctttggtgaaagtaagaaccgcaggagttgagttttggtttggtcctgctcagttttggtttttagttgtccatcctcacagtcctacacactcgcctcctcctgctagggctgggggtatctgtgtcctttaaaatggatgaggacctggtcctcgacatgtgggtgagccatggaccttgccttcccttctcgtccttgagggtttagaacacacaccaacacctccagcgtccccgccccagcttccggtggggtgatgcggtcaccctgcaaaagacttgcactttcctcagaaccaacatgacgcagctcaataagggtgagggtcactccctcccagaagccccgtctggacgagccttgcctgacctcttcggtgctgaccttcccaaagtgatgccttactggttttgtactaactgtgttcattttacataagtgtcgtgcctgcctggggtttgttttttttgtcattgttttccccattgaaacaaacagggctaaaaagtcatctgttcattaggagaactcaagttgctgtgacttttctcatccaaaagactcatttgtgtggatgcgtgaccatgggaaaaagaaaaaaaaaaagatccattttttaggttcttttcggtctccagctgacaacccaactggacaatgatctgtctggtgcaggagaaggcaaaagtttctacaagtctacatgaccttgctgatacttgttctaatagaaacccagtctgctgtgtcttcaacatactggtattttcattacaaagtatggtaaatttttgagttgtttgtttctgttttgtaaagagaatccttattggacaccagtgaaggtgtctctgttttaatgatcagggtttttattccatcttttgcatttcttctatttctgaaggtttgtctcttggcatctttttttagtttcttaccataagagtttgacccgaaactgctcacttcacattggatgacaccatgttcttcctctttgaaaagaaaaggggaatgtgtcccactagtgaaaggaaaacttttcaacactatccctgctttagtctcagcaaactcagactattctgcttagccttcattagtcatctgggtgtgagtgtgtcttgttctgtttttctttttaataaaacttttaaaccatatatttagcctgtgaccaggggggccaaaccctaagatttctggtaaacctgaagggtggccctcctcagacaatttatctcccagcaatgaccctactacactcgcgtactgtgaatttgggaggaggtaaagttgacttctcctcgtgggcagttttccaatcaccttgtgagtagacacctgccaatattgtttgaaacctttttttaatatgacatcctctcttgtcattctcttctcccctttcccacagacttccctcctgggtccaggttcagaaccaagacttctgtacctagtgctgcctgattggtgaacattgacttcaagtagcatagcccttgtgtgactcacaactccgtgtccttcctaaagtttcgggaagcagggttgtctaatatgcacatttcttattttggtcatatttttactttagtgtcactcaccttttacaaagtgactttgtactcatttagggctctatcggaaatgcttccattttgccttttctacagttaggccaattttgaaatatataaattctatgcaacatttatgttgagttaccaatggaagccaaaagttctcttcccaaactgccaagaatgatacaggccataattgaaatgggaataccttttaagtttcattaggggtggggtgggagtgggacaggaacaagacttgcctagatctttgttgtatcttggggacttttactttgttgtttgatgcttaaacttcaaaattctctgtattcaaatttgattgtggcgaatctacttcaaaaaggaaaaataatccaactttgtggatattaaatggaaggtttgctgttttgatctagttgtttccagtggagcagttttatgaaatatgttctataagatgtacattttttcattgtaacatagaaattgtaaataattgattaaagtgctgcattttgatgaattttttctagccatttttaaagagaaaactaggaattgagtattttgtgtacggtatgtttccatcctccctccccttcctcctcccctcctctctctctcttcctacctatttaattttcatttgtcatgaggtttttggatttgccaatgatctgctggacatcatgccccatgtcatagagaataaagctgatgattgtaccagtcttaaattattcatgattcaataaaattgatgcttatttattc

SEQ ID NO: 158929 - DNA, 9821 bp, Homo sapiens
  Payload ID: 11097
  Gene Symbol: NAV3
  Gene Name: neuron navigator 3
  Uniprot ID: Q8IVL0
  ENST ID: ENST00000397909
  CDS Start-End: 174-7331
agatgcagggaagttttgcctcttcctgaaaattatattattagctttttaaaaatcaggatgactgctagttttgtttaaagtatttgttctggaaatactaaagttggagtctaccagactgaggttagaagcattttctttggcagcaagaagataattttatagaagccatgcctgttcttggggttgcctcaaaactgaggcagccagctgttgggtcaaagcctgtgcatactgctcttccgataccaaatcttggcactactgggtcacagcactgttcttcaagacctttggaacttactgaaacagagagctccatgctttcttgtcagcttgcgttaaaatcaacctgtgaatttggagagaagaaacccctccaaggaaaagccaaggagaaagaagacagcaagatttacactgactgggccaaccactacctagcaaaatcaggccacaagcggctgatcaaggacttgcaacaagacattgcagatggagtactcctagcagaaatcatccagattattgcaaatgaaaaagttgaagatatcaatggatgtcctagaagtcagtctcagatgattgaaaatgttgatgtctgccttagttttctagcagccagaggggtaaatgttcaaggtctatctgctgaagaaataagaaatggaaacttaaaagccattctagggctgtttttcagtttatctcgctacaagcagcaacaacaccatcaacaacagtactatcagtccttggtggaacttcagcagcgagttactcacgcttcccctccatcggaagccagccaggccaaaacccagcaagatatgcagtccagtctggcagccagatatgcaactcagtctaatcacagtggaattgcaaccagtcaaaaaaagcctactaggcttccagggccctctagggtgcctgctgcaggaagcagcagcaaggtccagggagcctctaatttaaataggagaagtcagagctttaacagcattgacaaaaacaagcctccaaattatgcaaatggaaacgaaaaagattcctccaaaggacctcaatcgtcttcaggtgtaaatggtaacgtgcagcctcccagtactgctgggcagcctcctgcctctgccatcccttctccaagtgccagcaagccctggcgcagcaagtccatgaatgtcaaacacagtgccacctccaccatgttgactgtaaagcagtcaagtacagccacctcccccacaccatcttcagacagactgaagccacctgtctcagaaggggtcaaaactgctccctcaggacagaaatccatgcttgagaaattcaagctagtcaatgcccggactgctttacgccccccgcagcctcccagttcaggacctagtgatggtgggaaggatgatgatgccttttctgaatctggtgaaatggaaggttttaacagtggtctgaatagtggtggctcaacaaatagcagtcccaaagtgtcacctaagttggcccctccaaaagctggaagcaaaaatctcagcaataaaaagtctttgctacagccaaaggaaaaagaagaaaagaacagggacaaaaataaagtttgcactgaaaaaccagtcaaagaagagaaggatcaggtgacagagatggctccaaaaaagacctccaaaattgcaagcttgatccctaagggcagcaagacaacagcagctaagaaggaaagcttaattccgtcttccagtggtattccaaaaccaggctctaaagttccaacagtaaagcaaaccatttcacctggcagcacagcaagcaaagagtctgagaaattcaggactaccaaggggagcccttcccagtccttatctaagcctataaccatggagaaagcaagtgcttctagttgtcctgcccctttggaaggaagggaagctggccaagcttctccttctggttcctgtaccatgacagtggcacaaagcagtgggcagagcacaggaaatggtgctgtccaactccctcaacagcagcaacatagccacccgaataccgcgacagtggcaccattcatttacagggcacattcagaaaatgaaggtaccgctttaccatcggctgactcctgtaccagtcctacaaagatggacttatcatatagtaagactgctaagcagtgcctggaggagatatctggtgaagaccctgaaacaagaagaatgagaacagttaaaaacatagcagacttgaggcagaatttagaagagactatgtccagtcttcgtgggactcagataagccacagcaccctggagacaacatttgacagcactgtgacaacagaagttaatggaaggaccatacccaacttgacaagtcgacccacccccatgacctggaggttgggccaggcatgtccgcgacttcaggcgggagatgctccctccctgggtgctggctatcctcgcagtggtaccagtcgattcatccacacagacccctcgaggttcatgtataccacgcctctccgtcgagctgctgtctctaggctgggaaacatgtcacagattgacatgagtgagaaagcaagcagtgacctggacatgtcttctgaggtcgatgtgggtggatatatgagtgatggtgatatccttgggaaaagtctcaggactgatgacatcaacagtgggtacatgacagatggaggacttaacctatatactagaagtctgaaccgaataccagacacagcaacttcccgggacatcatccagagaggggttcacgatgtgacagtggatgcagacagctgggatgacagcagttcagtgagcagtggtctcagtgacacccttgataacatcagcactgatgacctgaacaccacatcctctgtcagctcttactccaacatcaccgtcccctctaggaagaatactcagctgaggacagattcagagaaacgctccaccacagacgagacctgggatagtcctgaggaactgaaaaaaccagaagaagattttgacagccatggggatgctggtggcaagtggaagactgtgtcctctggacttcctgaagaccccgagaaggcagggcagaaagcttccctgtctgtttcacagacaggttcctggagaagaggcatgtctgcccaaggaggggcgccatctaggcagaaagctggaacaagtgcactcaaaacacccgggaaaaccgatgatgccaaagcttctgagaaaggaaaagctcccctaaaaggatcatctctacaaagatctccttcagatgcaggaaaaagcagtggagatgaagggaaaaagcccccctcaggcattggaagatcgactgccaccagctcctttggctttaagaaaccaagtggagtagggtcatctgccatgatcaccagcagtggagcaaccataacaagtggctctgcaacactgggtaaaattccaaaatctgctgccattggcgggaagtcaaatgcagggagaaaaaccagtttggacggttcacagaatcaggatgatgttgtgctgcatgttagctcaaagactaccctacaatatcgcagcttgccccgcccttcaaaatccagcaccagtggcattcctggccgaggaggccacagatccagtaccagcagtattgattccaacgtcagcagcaagtctgctggggccaccacctcgaaactgagagaaccaactaaaattgggtcagggcgctcgagtcctgtcaccgtcaaccaaacagacaaggaaaaggaaaaagtagcagtctcagattcagaaagtgtttctttgtcaggttcccccaaatccagccccacctctgccagcgcctgtggtgcacaaggtctcaggcagccaggatccaagtatccagatattgcctcacccacatttcgaaggttgtttggtgccaaggcaggtggcaaatctgcctctgcacctaatactgagggtgtgaaatcttcctcagtaatgcccagccctagtaccacattagcgcggcaaggcagtctggagtcaccgtcgtccggtacgggcagcatgggcagtgctggtgggctaagcggcagcagcagccctctcttcaataaaccctcagacttaactacagatgttataagcttaagtcactcgttggcctccagcccagcatcggttcactctttcacatcaggtggtctcgtgtgggctgccaatatgagcagttcctctgcaggcagcaaggatactccgagctaccagtccatgactagcctccacacgagctctgagtccattgacctccccctcagccatcatggctccttgtctggactgaccacaggcactcacgaggtccagagcctgctcatgagaacgggtagtgtgagatctactctctcagaaagcatgcagcttgacagaaatacactacccaaaaagggactaagatataccccatcatctcggcaggccaaccaagaagagggcaaagagtggttgcgttctcattctactggagggcttcaggacactggcaaccagtcacctctggtttccccttctgccatgtcatcttctgcagctggaaaataccacttttctaacttggtgagcccaacaaatttgtctcagtttaaccttcccgggcccagcatgatgcgctcaaacagcatcccagcccaagactcttccttcgatctctatgatgactcccagctttgtgggagtgccacttctctggaggaaagacctcgtgccatcagtcattcgggctcattcagagacagcatggaagaagttcatggctcttcattatcactggtgtccagcacttcttctctttactctacagctgaagaaaaggctcattcagagcaaatccataaactgcggagagagctggttgcatcacaagaaaaagttgctaccctcacatctcagctttcagcaaatgctcaccttgtagcagcttttgaaaagagcttagggaatatgactggccgattgcaaagtctaactatgacagcggaacaaaaggaatctgaacttatagaactaagagaaaccattgaaatgctgaaggctcagaattctgctgcccaggcggctattcagggagcactgaatggtccagaccatcctcccaaagatcttcgcatcagaagacagcattcctctgaaagtgtttctagtatcaacagtgccacaagccattccagtattggcagtggtaatgatgccgactccaagaagaagaaaaagaaaaactgggtgaactctagaggaagtgagctgagaagttctttcaaacaagcctttgggaagaaaaagtccaccaagcctccttcatcacattctgacattgaagagcttactgattcatcccttccggcatcccccaagttaccccataatgctggtgactgtggctcagcatccatgaagccctcacaatctgcttcagcgtcaccccttgtctggccaccaaagaaacgacaaaatggccctgtgatctacaagcatagatctcggatctgtgaatgcacagaagctgaggcagagataattctgcagctgaagagcgagctcagagaaaaggaattaaaattaacggatattcggctggaggccctcagctctgctcatcatcttgatcagatccgggaagccatgaaccggatgcagaatgaaattgaaatactgaaagctgaaaatgaccggttgaaggcagaaactggtaacacagctaagcctactcggccaccgtcagaatcctcaagcagcacctcctcttcatcttccaggcagtcattaggactttctctaaacaatttgaacatcacagaggctgttagctcagatattttgctagatgatgctggtgatgcaactggacataaagatggccgcagtgtgaaaattatagtctccataagcaagggctatggtcgagcaaaggaccaaaaatctcaggcatatttgataggatccattggtgttagtggaaaaaccaagtgggatgtcttagatggtgtaataagacgtctctttaaggaatatgtattccgaattgatacatccactagccttggtctgagctctgactgcattgctagctactgtataggagacttaattagatcccataacctagaagtgcctgaattgctgccttgtggataccttgttggagataataacatcatcactgtgaacctcaaaggggtagaagaaaatagtttggacagttttgtttttgatacgctgattcctaaaccaattacccaaaggtactttaacttgttgatggagcatcacagaattatactctcaggaccgagtggtactggaaagacctatttggcaaacaaacttgctgaatatgtaataaccaaatctggaaggaaaaaaacagaggatgcaattgccacttttaatgtggaccacaagtcaagtaaggaattgcaacaatatctagctaacctggctgaacagtgcagtgctgataataatggagtggagctcccagttgtaataattcttgataatcttcatcatgtgggctctctgagtgatatcttcaatggttttctcaattgtaaatacaacaaatgtccatatattattggaacaatgaatcagggagtttcttcatcaccaaatctagagctgcatcacaatttcaggtgggtattatgtgcaaatcatacagaaccagtgaaaggctttttaggcagatatcttcgaagaaaactcatagagatagaaattgaaaggaacattcgcaataatgacctagtcaaaattatagattggattccgaagacgtggcatcatctcaacagttttttggaaacacacagttcttctgacgttaccattggtccccgactattccttccttgccccatggatgtagaaggttctagagtatggttcatggatctctggaactattctttagtaccttatattctggaggcagtgagagagggtcttcagatgtatgggaaacgcacaccatgggaagatccttcaaagtgggtgcttgacacatatccatggagctcagcaactctgcctcaggagagcccagccttacttcagctgcgaccagaagatgttgggtatgaaagctgcacatccactaaggaagccacaacctcaaagcacattccgcaaactgacacagaaggagatcccctgatgaatatgctaatgaaactccaagaagcagccaattactcgagcacacaaagctgcgacagcgaaagcaccagccaccatgaagacattttggattcatctcttgaatctaccctctagagggtgaaaaaagttaagggaaaagactttgcttttaaaaaaatgtttcaaaagaaaggtattttcactaaaccactgccagtataaaagcaccctgtcaagggccctgacccagagttgtggtctccaaggaggcagcagaactaagtctgaaccgccaagatgctaaattgcaatggaagcttaactttagtttatttctaagcattttttatatctgtggagtaatagaaagctccattactcaactggaaaggaccctaatgacagggcaactgaacagattgcacatgggatagccaaactggactttctttgtttcctctttaaaagtttacaatgcagaccattttttgtcccttccttttgtttcctctgaggggctgttcgccccaggcagggtccatctttctgatctgtccaacctcctttgtgccacacggtgctggtcacagggcttcagtagtgtttgtgttgtgcgctcaccccattccagaacaaatccaagaggccagtcctccataagcacaaatggaattgtgcaaccaccagaaaaacactactgtggcaaactggagaagtgccaatttaattctaactgccacgttctcatgatgtgctccaccaactttttagtatatgagtcactggttttataaggttgtttttaccacagtggtctttttaaaccacctgcccactcccttaacaagagttttataccaattattagtcaacactgataaaaggcttttttagggctttatttgtttgagccttttcagtgaaagaaggaacatttcctatggtgctgtctcactgccttaaaacagatttctatgacagtttaacagttggtttaaatcctaaaccattggtaatttccactgtcttttcatttacaaccaagcaacaccagttaacatagtagcctcatctctatatatctttctcttttttttttttttgaagaaatggataggagaaagatcagtatttttagccttgtgaatagatcgctttgcctatcctccaaaatattaaaataacccagaaatgctctttgaccgtcacttaaaacctaagacatgtggcgaaattccatccagttctaagtgaaagagtttcagaaggcagaagattttgaattattatccagcagggctggaagcactagatgcagcatgagcacaactattcggctttccttccctattgtttttgtttttttaatgagttttgacgcatgttgttttgattgctattgttgtacatgagaaattcagcattaaagaacactgaagcggtaaggtcactgtggaagaggaagcgtttatactgtaaaagaaggttagatttgcacagtctactgggtaggtattgtaaataataatttttaaaacttgcacaaatcaaaacaaacacaaacaaaattgtattttatcctgttggtgttaagaggtgtttcacttgctgagatttcctgtacattgcaaacaaatacagaatgcaaaccctcaaagctgtattatctggtgtgtttgtcctgtatttacagttgtttttgactatgcaggagctatcagtgctagagtgagcatgcttcaaaactgtacatgaagccaatatatttttggataagtaaaactgtctgaaagtacatctgtcatggcaggctttaaagagagtgcatgaaaactgatcagtcattggagaagttaccaccacacacaaaggacaggttttaagtttatgaaacccaagggctaggccatggtatagacttcttctatgagtgtgtgaaaatgtgttacttttaggacgtgtatttggtgctactctctgtgaccaccaatgggtcagttgctatagaacaacaacaccacgaaacatctgtgcagttttcagagtgtcacaaagtcaataggtccttacacggtgctattgccctaagggaaatccgaactgaatttatgcacatagaattgtcaccctgactttgaagcctcaaacatggatcaaatctgttgtgaaacatcaatatatgtagctggatgagtgactagtttcccttgtataatatgtgatctaagaaaattgctaatctttccctgccattttgagaaacacagtccaaacatgagcataaacagaatttcctgcaatacatcccagtaggtccacctagtttacaacttaaactagtttgtgaaacatttgtctgtatacattttatattttgtacattttgatgtaacatatcatgtaaataggcagaaacagtgaaataaatcatctgaaaagttttgtagtctttgtaaagccccaacaataagtacttggtgtcaatggacttaactggatgatgtattttctattggtttattgttcctctagcttgtaaaccagcttgcatatatttttttgcaaatgtgcaccctgtatctgtctaaattattactttgccattaaagtggaattatttattga

SEQ ID NO: 158930 - DNA, 7386 bp, Homo sapiens
  Payload ID: 11097
  Gene Symbol: NAV3
  Gene Name: neuron navigator 3
  Uniprot ID: Q8IVL0
  ENST ID: ENST00000536525
  CDS Start-End: 174-7265
agatgcagggaagttttgcctcttcctgaaaattatattattagctttttaaaaatcaggatgactgctagttttgtttaaagtatttgttctggaaatactaaagttggagtctaccagactgaggttagaagcattttctttggcagcaagaagataattttatagaagccatgcctgttcttggggttgcctcaaaactgaggcagccagctgttgggtcaaagcctgtgcatactgctcttccgataccaaatcttggcactactgggtcacagcactgttcttcaagacctttggaacttactgaaacagagagctccatgctttcttgtcagcttgcgttaaaatcaacctgtgaatttggagagaagaaacccctccaaggaaaagccaaggagaaagaagacagcaagatttacactgactgggccaaccactacctagcaaaatcaggccacaagcggctgatcaaggacttgcaacaagacattgcagatggagtactcctagcagaaatcatccagattattgcaaatgaaaaagttgaagatatcaatggatgtcctagaagtcagtctcagatgattgaaaatgttgatgtctgccttagttttctagcagccagaggggtaaatgttcaaggtctatctgctgaagaaataagaaatggaaacttaaaagccattctagggctgtttttcagtttatctcgctacaagcagcaacaacaccatcaacaacagtactatcagtccttggtggaacttcagcagcgagttactcacgcttcccctccatcggaagccagccaggccaaaacccagcaagatatgcagtccagtctggcagccagatatgcaactcagtctaatcacagtggaattgcaaccagtcaaaaaaagcctactaggcttccagggccctctagggtgcctgctgcaggaagcagcagcaaggtccagggagcctctaatttaaataggagaagtcagagctttaacagcattgacaaaaacaagcctccaaattatgcaaatggaaacgaaaaagattcctccaaaggacctcaatcgtcttcaggtgtaaatggtaacgtgcagcctcccagtactgctgggcagcctcctgcctctgccatcccttctccaagtgccagcaagccctggcgcagcaagtccatgaatgtcaaacacagtgccacctccaccatgttgactgtaaagcagtcaagtacagccacctcccccacaccatcttcagacagactgaagccacctgtctcagaaggggtcaaaactgctccctcaggacagaaatccatgcttgagaaattcaagctagtcaatgcccggactgctttacgccccccgcagcctcccagttcaggacctagtgatggtgggaaggatgatgatgccttttctgaatctggtgaaatggaaggttttaacagtggtctgaatagtggtggctcaacaaatagcagtcccaaagtgtcacctaagttggcccctccaaaagctggaagcaaaaatctcagcaataaaaagtctttgctacagccaaaggaaaaagaagaaaagaacagggacaaaaataaagtttgcactgaaaaaccagtcaaagaagagaaggatcaggtgacagagatggctccaaaaaagacctccaaaattgcaagcttgatccctaagggcagcaagacaacagcagctaagaaggaaagcttaattccgtcttccagtggtattccaaaaccaggctctaaagttccaacagtaaagcaaaccatttcacctggcagcacagcaagcaaagagtctgagaaattcaggactaccaaggggagcccttcccagtccttatctaagcctataaccatggagaaagcaagtgcttctagttgtcctgcccctttggaaggaagggaagctggccaagcttctccttctggttcctgtaccatgacagtggcacaaagcagtgggcagagcacaggaaatggtgctgtccaactccctcaacagcagcaacatagccacccgaataccgcgacagtggcaccattcatttacagggcacattcagaaaatgaaggtaccgctttaccatcggctgactcctgtaccagtcctacaaagatggacttatcatatagtaagactgctaagcagtgcctggaggagatatctggtgaagaccctgaaacaagaagaatgagaacagttaaaaacatagcagacttgaggcagaatttagaagagactatgtccagtcttcgtgggactcagataagccacagcaccctggagacaacatttgacagcactgtgacaacagaagttaatggaaggaccatacccaacttgacaagtcgacccacccccatgacctggaggttgggccaggcatgtccgcgacttcaggcgggagatgctccctccctgggtgctggctatcctcgcagtggtaccagtcgattcatccacacagacccctcgaggttcatgtataccacgcctctccgtcgagctgctgtctctaggctgggaaacatgtcacagattgacatgagtgagaaagcaagcagtgacctggacatgtcttctgaggtcgatgtgggtggatatatgagtgatggtgatatccttgggaaaagtctcaggactgatgacatcaacagtgggtacatgacagatggaggacttaacctatatactagaagtctgaaccgaataccagacacagcaacttcccgggacatcatccagagaggggttcacgatgtgacagtggatgcagacagctgggatgacagcagttcagtgagcagtggtctcagtgacacccttgataacatcagcactgatgacctgaacaccacatcctctgtcagctcttactccaacatcaccgtcccctctaggaagaatactcagctgaggacagattcagagaaacgctccaccacagacgagacctgggatagtcctgaggaactgaaaaaaccagaagaagattttgacagccatggggatgctggtggcaagtggaagactgtgtcctctggacttcctgaagaccccgagaaggcagggcagaaagcttccctgtctgtttcacagacaggttcctggagaagaggcatgtctgcccaaggaggggcgccatctaggcagaaagctggaacaagtgcactcaaaacacccgggaaaaccgatgatgccaaagcttctgagaaaggaaaagctcccctaaaaggatcatctctacaaagatctccttcagatgcaggaaaaagcagtggagatgaagggaaaaagcccccctcaggcattggaagatcgactgccaccagctcctttggctttaagaaaccaagtggagtagggtcatctgccatgatcaccagcagtggagcaaccataacaagtggctctgcaacactgggtaaaattccaaaatctgctgccattggcgggaagtcaaatgcagggagaaaaaccagtttggacggttcacagaatcaggatgatgttgtgctgcatgttagctcaaagactaccctacaatatcgcagcttgccccgcccttcaaaatccagcaccagtggcattcctggccgaggaggccacagatccagtaccagcagtattgattccaacgtcagcagcaagtctgctggggccaccacctcgaaactgagagaaccaactaaaattgggtcagggcgctcgagtcctgtcaccgtcaaccaaacagacaaggaaaaggaaaaagtagcagtctcagattcagaaagtgtttctttgtcaggttcccccaaatccagccccacctctgccagcgcctgtggtgcacaaggtctcaggcagccaggatccaagtatccagatattgcctcacccacatttcgaaggttgtttggtgccaaggcaggtggcaaatctgcctctgcacctaatactgagggtgtgaaatcttcctcagtaatgcccagccctagtaccacattagcgcggcaaggcagtctggagtcaccgtcgtccggtacgggcagcatgggcagtgctggtgggctaagcggcagcagcagccctctcttcaataaaccctcagacttaactacagatgttataagcttaagtcactcgttggcctccagcccagcatcggttcactctttcacatcaggtggtctcgtgtgggctgccaatatgagcagttcctctgcaggcagcaaggatactccgagctaccagtccatgactagcctccacacgagctctgagtccattgacctccccctcagccatcatggctccttgtctggactgaccacaggcactcacgaggtccagagcctgctcatgagaacgggtagtgtgagatctactctctcagaaagcatgcagcttgacagaaatacactacccaaaaagggactaagatataccccatcatctcggcaggccaaccaagaagagggcaaagagtggttgcgttctcattctactggagggcttcaggacactggcaaccagtcacctctggtttccccttctgccatgtcatcttctgcagctggaaaataccacttttctaacttggtgagcccaacaaatttgtctcagtttaaccttcccgggcccagcatgatgcgctcaaacagcatcccagcccaagactcttccttcgatctctatgatgactcccagctttgtgggagtgccacttctctggaggaaagacctcgtgccatcagtcattcgggctcattcagagacagcatggaagaagttcatggctcttcattatcactggtgtccagcacttcttctctttactctacagctgaagaaaaggctcattcagagcaaatccataaactgcggagagagctggttgcatcacaagaaaaagttgctaccctcacatctcagctttcagcaaatgctcaccttgtagcagcttttgaaaagagcttagggaatatgactggccgattgcaaagtctaactatgacagcggaacaaaaggaatctgaacttatagaactaagagaaaccattgaaatgctgaaggctcagaattctgctgcccaggcggctattcagggagcactgaatggtccagaccatcctcccaaagatcttcgcatcagaagacagcattcctctgaaagtgtttctagtatcaacagtgccacaagccattccagtattggcagtggtaatgatgccgactccaagaagaagaaaaagaaaaactgggtgaactctagaggaagtgagctgagaagttctttcaaacaagcctttgggaagaaaaagtccaccaagcctccttcatcacattctgacattgaagagcttactgattcatcccttccggcatcccccaagttaccccataatgctggtgactgtggctcagcatccatgaagccctcacaatctgcttcagcgatctgtgaatgcacagaagctgaggcagagataattctgcagctgaagagcgagctcagagaaaaggaattaaaattaacggatattcggctggaggccctcagctctgctcatcatcttgatcagatccgggaagccatgaaccggatgcagaatgaaattgaaatactgaaagctgaaaatgaccggttgaaggcagaaactggtaacacagctaagcctactcggccaccgtcagaatcctcaagcagcacctcctcttcatcttccaggcagtcattaggactttctctaaacaatttgaacatcacagaggctgttagctcagatattttgctagatgatgctggtgatgcaactggacataaagatggccgcagtgtgaaaattatagtctccataagcaagggctatggtcgagcaaaggaccaaaaatctcaggcatatttgataggatccattggtgttagtggaaaaaccaagtgggatgtcttagatggtgtaataagacgtctctttaaggaatatgtattccgaattgatacatccactagccttggtctgagctctgactgcattgctagctactgtataggagacttaattagatcccataacctagaagtgcctgaattgctgccttgtggataccttgttggagataataacatcatcactgtgaacctcaaaggggtagaagaaaatagtttggacagttttgtttttgatacgctgattcctaaaccaattacccaaaggtactttaacttgttgatggagcatcacagaattatactctcaggaccgagtggtactggaaagacctatttggcaaacaaacttgctgaatatgtaataaccaaatctggaaggaaaaaaacagaggatgcaattgccacttttaatgtggaccacaagtcaagtaaggaattgcaacaatatctagctaacctggctgaacagtgcagtgctgataataatggagtggagctcccagttgtaataattcttgataatcttcatcatgtgggctctctgagtgatatcttcaatggttttctcaattgtaaatacaacaaatgtccatatattattggaacaatgaatcagggagtttcttcatcaccaaatctagagctgcatcacaatttcaggtgggtattatgtgcaaatcatacagaaccagtgaaaggctttttaggcagatatcttcgaagaaaactcatagagatagaaattgaaaggaacattcgcaataatgacctagtcaaaattatagattggattccgaagacgtggcatcatctcaacagttttttggaaacacacagttcttctgacgttaccattggtccccgactattccttccttgccccatggatgtagaaggttctagagtatggttcatggatctctggaactattctttagtaccttatattctggaggcagtgagagagggtcttcagatgtatgggaaacgcacaccatgggaagatccttcaaagtgggtgcttgacacatatccatggagctcagcaactctgcctcaggagagcccagccttacttcagctgcgaccagaagatgttgggtatgaaagctgcacatccactaaggaagccacaacctcaaagcacattccgcaaactgacacagaaggagatcccctgatgaatatgctaatgaaactccaagaagcagccaattactcgagcacacaaagctgcgacagcgaaagcaccagccaccatgaagacattttggattcatctcttgaatctaccctctagagggtgaaaaaagttaagggaaaagactttgcttttaaaaaaatgtttcaaaagaaaggtattttcactaaaccactgccagtataaaagcaccctgtcaagggccctgacccagagttgt

SEQ ID NO: 158931 - DNA, 2595 bp, Homo sapiens
  Payload ID: 11097
  Gene Symbol: NAV3
  Gene Name: neuron navigator 3
  ENST ID: ENST00000549464
  CDS Start-End: 558-2595
gaacccctgtccttccactgttgtggtcttttggctgctctgacagttggactgaagggcttttccttttgattttttcctctttttcaatctcaaagttcagactcagactgctttagtgagaaaaaaaaataagcaaaactaagagctctttaatcctaagaaggagctttgtagcagttaccttgaagaagagtttactccccaaaggagtatttagtattacttagatactgagtcactgaacagagagagagagagagacagagagagagagagagagagagagacagagagagagagagagagagagaaagagagagagagagagaatgagaatgaatatgaatcccagccagcaagaaagaaaagatacttaactaaagatgcagggaagttttgcctcttcctgaaaattatattattagctttttaaaaatcaggatgactgctagttttgtttaaagtatttgttctggaaatactaaagttggagtctaccagactgaggttagaagcattttctttggcagcaagaagataattttatagaagccatgcctgttcttggggttgcctcaaaactgaggcagccagctgttgggtcaaagcctgtgcatactgctcttccgataccaaatcttggcactactgggtcacagcactgttcttcaagacctttggaacttactgaaacagagagctccatgctttcttgtcagcttgcgttaaaatcaacctgtgaatttggagagaagaaacccctccaaggaaaagccaaggagaaagaagacagcaagatttacactgactgggccaaccactacctagcaaaatcaggccacaagcggctgatcaaggacttgcaacaagacattgcagatggagtactcctagcagaaatcatccagattattgcaaatgaaaaagttgaagatatcaatggatgtcctagaagtcagtctcagatgattgaaaatgttgatgtctgccttagttttctagcagccagaggggtaaatgttcaaggtctatctgctgaagaaataagaaatggaaacttaaaagccattctagggctgtttttcagtttatctcgctacaagcagcaacaacaccatcaacaacagtactatcagtccttggtggaacttcagcagcgagttactcacgcttcccctccatcggaagccagccaggccaaaacccagcaagatatgcagtccagtctggcagccagatatgcaactcagtctaatcacagtggaattgcaaccagtcaaaaaaagcctactaggcttccagggccctctagggtgcctgctgcaggaagcagcagcaaggtccagggagcctctaatttaaataggagaagtcagagctttaacagcattgacaaaaacaagcctccaaattatgcaaatggaaacgaaaaagattcctccaaaggacctcaatcgtcttcaggtgtaaatggtaacgtgcagcctcccagtactgctgggcagcctcctgcctctgccatcccttctccaagtgccagcaagccctggcgcagcaagtccatgaatgtcaaacacagtgccacctccaccatgttgactgtaaagcagtcaagtacagccacctcccccacaccatcttcagacagactgaagccacctgtctcagaaggggtcaaaactgctccctcaggacagaaatccatgcttgagaaattcaagctagtcaatgcccggactgctttacgccccccgcagcctcccagttcaggacctagtgatggtgggaaggatgatgatgccttttctgaatctggtgaaatggaaggttttaacagtggtctgaatagtggtggctcaacaaatagcagtcccaaagtgtcacctaagttggcccctccaaaagctggaagcaaaaatctcagcaataaaaagtctttgctacagccaaaggaaaaagaagaaaagaacagggacaaaaataaagtttgcactgaaaaaccagtcaaagaagagaaggatcaggtgacagagatggctccaaaaaagacctccaaaattgcaagcttgatccctaagggcagcaagacaacagcagctaagaaggaaagcttaattccgtcttccagtggtattccaaaaccaggctctaaagttccaacagtaaagcaaaccatttcacctggcagcacagcaagcaaagagtctgagaaattcaggactaccaaggggagcccttcccagtccttatctaagcctataaccatggagaaagcaagtgcttctagttgtcctgcccctttggaaggaagggaagctggccaagcttctccttctggttcctgtaccatgacagtggcacaaagcagtgggcagagcacaggaaatggtgctgtccaactccctcaacagcagcaacatagccacccgaataccgcgacagtggcaccattcatttacagggcacattcagaaaatgaaggtaccgctttaccatcggctgactcctgtaccagtcctacaaagatggacttatcatatagtaagactgctaagcagtgcctggaggagatatctggtgaagaccctgaaa

SEQ ID NO: 158932 - DNA, 6266 bp, Homo sapiens
  Payload ID: 11097
  Gene Symbol: NAV3
  Gene Name: neuron navigator 3
  ENST ID: ENST00000552895
  CDS Start-End: 1-3775
gaaacgctccaccacagacgagacctgggatagtcctgaggaactgaaaaaaccagaagaagattttgacagccatggggatgctggtggcaagtggaagactgtgtcctctggacttcctgaagaccccgagaaggcagggcagaaagcttccctgtctgtttcacagacaggttcctggagaagaggcatgtctgcccaaggaggggcgccatctaggcagaaagctggaacaagtgcactcaaaacacccgggaaaaccgatgatgccaaagcttctgagaaaggaaaagctcccctaaaaggatcatctctacaaagatctccttcagatgcaggaaaaagcagtggagatgaagggaaaaagcccccctcaggcattggaagatcgactgccaccagctcctttggctttaagaaaccaagtggagtagggtcatctgccatgatcaccagcagtggagcaaccataacaagtggctctgcaacactgggtaaaattccaaaatctgctgccattggcgggaagtcaaatgcagggagaaaaaccagtttggacggttcacagaatcaggatgatgttgtgctgcatgttagctcaaagactaccctacaatatcgcagcttgccccgcccttcaaaatccagcaccagtggcattcctggccgaggaggccacagatccagtaccagcagtattgattccaacgtcagcagcaagtctgctggggccaccacctcgaaactgagagaaccaactaaaattgggtcagggcgctcgagtcctgtcaccgtcaaccaaacagacaaggaaaaggaaaaagtagcagtctcagattcagaaagtgtttctttgtcaggttcccccaaatccagccccacctctgccagcgcctgtggtgcacaaggtctcaggcagccaggatccaagtatccagatattgcctcacccacatttcgaagatataccccatcatctcggcaggccaaccaagaagagggcaaagagtggttgcgttctcattctactggagggcttcaggacactggcaaccagtcacctctggtttccccttctgccatgtcatcttctgcagctggaaaataccacttttctaacttggtgagcccaacaaatttgtctcagtttaaccttcccgggcccagcatgatgcgctcaaacagcatcccagcccaagactcttccttcgatctctatgatgactcccagctttgtgggagtgccacttctctggaggaaagacctcgtgccatcagtcattcgggctcattcagagacagcatggaagaagttcatggctcttcattatcactggtgtccagcacttcttctctttactctacagctgaagaaaaggctcattcagagcaaatccataaactgcggagagagctggttgcatcacaagaaaaagttgctaccctcacatctcagctttcagcaaatgctcaccttgtagcagcttttgaaaagagcttagggaatatgactggccgattgcaaagtctaactatgacagcggaacaaaaggaatctgaacttatagaactaagagaaaccattgaaatgctgaaggctcagaattctgctgcccaggcggctattcagggagcactgaatggtccagaccatcctcccaaagatcttcgcatcagaagacagcattcctctgaaagtgtttctagtatcaacagtgccacaagccattccagtattggcagtggtaatgatgccgactccaagaagaagaaaaagaaaaactgggtgaactctagaggaagtgagctgagaagttctttcaaacaagcctttgggaagaaaaagtccaccaagcctccttcatcacattctgacattgaagagcttactgattcatcccttccggcatcccccaagttaccccataatgctggtgactgtggctcagcatccatgaagccctcacaatctgcttcagcgatctgtgaatgcacagaagctgaggcagagataattctgcagctgaagagcgagctcagagaaaaggaattaaaattaacggatattcggctggaggccctcagctctgctcatcatcttgatcagatccgggaagccatgaaccggatgcagaatgaaattgaaatactgaaagctgaaaatgaccggttgaaggcagaaactggtaacacagctaagcctactcggccaccgtcagaatcctcaagcagcacctcctcttcatcttccaggcagtcattaggactttctctaaacaatttgaacatcacagaggctgttagctcagatattttgctagatgatgctggtgatgcaactggacataaagatggccgcagtgtgaaaattatagtctccataagcaagggctatggtcgagcaaaggaccaaaaatctcaggcatatttgataggatccattggtgttagtggaaaaaccaagtgggatgtcttagatggtgtaataagacgtctctttaaggaatatgtattccgaattgatacatccactagccttggtctgagctctgactgcattgctagctactgtataggagacttaattagatcccataacctagaagtgcctgaattgctgccttgtggataccttgttggagataataacatcatcactgtgaacctcaaaggggtagaagaaaatagtttggacagttttgtttttgatacgctgattcctaaaccaattacccaaaggtactttaacttgttgatggagcatcacagaattatactctcaggaccgagtggtactggaaagacctatttggcaaacaaacttgctgaatatgtaataaccaaatctggaaggaaaaaaacagaggatgcaattgccacttttaatgtggaccacaagtcaagtaaggaattgcaacaatatctagctaacctggctgaacagtgcagtgctgataataatggagtggagctcccagttgtaataattcttgataatcttcatcatgtgggctctctgagtgatatcttcaatggttttctcaattgtaaatacaacaaatgtccatatattattggaacaatgaatcagggagtttcttcatcaccaaatctagagctgcatcacaatttcaggtgggtattatgtgcaaatcatacagaaccagtgaaaggctttttaggcagatatcttcgaagaaaactcatagagatagaaattgaaaggaacattcgcaataatgacctagtcaaaattatagattggattccgaagacgtggcatcatctcaacagttttttggaaacacacagttcttctgacgttaccattggtccccgactattccttccttgccccatggatgtagaaggttctagagtatggttcatggatctctggaactattctttagtaccttatattctggaggcagtgagagagggtcttcagatgtatgggaaacgcacaccatgggaagatccttcaaagtgggtgcttgacacatatccatggagctcagcaactctgcctcaggagagcccagccttacttcagctgcgaccagaagatgttgggtatgaaagctgcacatccactaaggaagccacaacctcaaagcacattccgcaaactgacacagaaggagatcccctgatgaatatgctaatgaaactccaagaagcagccaattactcgagcacacaaagctgcgacagcgaaagcaccagccaccatgaagacattttggattcatctcttgaatctaccctctagagggtgaaaaaagttaagggaaaagactttgcttttaaaaaaatgtttcaaaagaaaggtattttcactaaaccactgccagtataaaagcaccctgtcaagggccctgacccagagttgtggtctccaaggaggcagcagaactaagtctgaaccgccaagatgctaaattgcaatggaagcttaactttagtttatttctaagcattttttatatctgtggagtaatagaaagctccattactcaactggaaaggaccctaatgacagggcaactgaacagattgcacatgggatagccaaactggactttctttgtttcctctttaaaagtttacaatgcagaccattttttgtcccttccttttgtttcctctgaggggctgttcgccccaggcagggtccatctttctgatctgtccaacctcctttgtgccacacggtgctggtcacagggcttcagtagtgtttgtgttgtgcgctcaccccattccagaacaaatccaagaggccagtcctccataagcacaaatggaattgtgcaaccaccagaaaaacactactgtggcaaactggagaagtgccaatttaattctaactgccacgttctcatgatgtgctccaccaactttttagtatatgagtcactggttttataaggttgtttttaccacagtggtctttttaaaccacctgcccactcccttaacaagagttttataccaattattagtcaacactgataaaaggcttttttagggctttatttgtttgagccttttcagtgaaagaaggaacatttcctatggtgctgtctcactgccttaaaacagatttctatgacagtttaacagttggtttaaatcctaaaccattggtaatttccactgtcttttcatttacaaccaagcaacaccagttaacatagtagcctcatctctatatatctttctcttttttttttttttgaagaaatggataggagaaagatcagtatttttagccttgtgaatagatcgctttgcctatcctccaaaatattaaaataacccagaaatgctctttgaccgtcacttaaaacctaagacatgtggcgaaattccatccagttctaagtgaaagagtttcagaaggcagaagattttgaattattatccagcagggctggaagcactagatgcagcatgagcacaactattcggctttccttccctattgtttttgtttttttaatgagttttgacgcatgttgttttgattgctattgttgtacatgagaaattcagcattaaagaacactgaagcggtaaggtcactgtggaagaggaagcgtttatactgtaaaagaaggttagatttgcacagtctactgggtaggtattgtaaataataatttttaaaacttgcacaaatcaaaacaaacacaaacaaaattgtattttatcctgttggtgttaagaggtgtttcacttgctgagatttcctgtacattgcaaacaaatacagaatgcaaaccctcaaagctgtattatctggtgtgtttgtcctgtatttacagttgtttttgactatgcaggagctatcagtgctagagtgagcatgcttcaaaactgtacatgaagccaatatatttttggataagtaaaactgtctgaaagtacatctgtcatggcaggctttaaagagagtgcatgaaaactgatcagtcattggagaagttaccaccacacacaaaggacaggttttaagtttatgaaacccaagggctaggccatggtatagacttcttctatgagtgtgtgaaaatgtgttacttttaggacgtgtatttggtgctactctctgtgaccaccaatgggtcagttgctatagaacaacaacaccacgaaacatctgtgcagttttcagagtgtcacaaagtcaataggtccttacacggtgctattgccctaagggaaatccgaactgaatttatgcacatagaattgtcaccctgactttgaagcctcaaacatggatcaaatctgttgtgaaacatcaatatatgtagctggatgagtgactagtttcccttgtataatatgtgatctaagaaaattgctaatctttccctgccattttgagaaacacagtccaaacatgagcataaacagaatttcctgcaatacatcccagtaggtccacctagtttacaacttaaactagtttgtgaaacatttgtctgtatacattttatattttgtacattttgatgtaacatatcatgtaaataggcagaaacagtgaaataaatcatctgaaaagttttgtagtctttgtaaagccccaacaataagtacttggtgtcaatggacttaactggatgatgtattttctattggtttattgttcctctagcttgtaaaccagcttgcatatatttttttgcaaatgtgcaccctgtatctgtctaaattattactttgccattaaagtggaattatttattgac

SEQ ID NO: 158933 - DNA, 698 bp, Homo sapiens
  Payload ID: 11097
  Gene Symbol: NAV3
  Gene Name: neuron navigator 3
  ENST ID: ENST00000550503
  CDS Start-End: 1-698
aaatgttcaaggtctatctgctgaagaaataagaaatggaaacttaaaagccattctagggctgtttttcagtttatctcgctacaagcagcaacaacaccatcaacaacagtactatcagtccttggtggaacttcagcagcgagttactcacgcttcccctccatcggaagccagccaggccaaaacccagcaagatatgcagtccaggcttccagggccctctagggtgcctgctgcaggaagcagcagcaaggtccagggagcctctaatttaaataggagaagtcagagctttaacagcattgacaaaaacaagcctccaaattatgcaaatggaaacgaaaaagattcctccaaaggacctcaatcgtcttcaggtgtaaatggtaacgtgcagcctcccagtactgctgggcagcctcctgcctctgccatcccttctccaagtgccagcaagccctggcgcagcaagtccatgaatgtcaaacacagtgccacctccaccatgttgactgtaaagcagtcaagtacagccacctcccccacaccatcttcagacagactgaagccacctgtctcagaaggggtcaaaactgctccctcaggacagaaatccatgcttgagaaattcaagctagtcaatgcccggactgctttacgccccccgcagcctcccagttcaggacctagtgatg

SEQ ID NO: 158934 - DNA, 1226 bp, Homo sapiens
  Payload ID: 11097
  Gene Symbol: NAV3
  Gene Name: neuron navigator 3
  ENST ID: ENST00000551162
  CDS Start-End: 1-760
agcatttagactcccactcacttctgacgcacatgagcttctttttagctcaaaaagtagagttagctacattatagctctcatcctagtagacctcctaacacctttgatcatgaaaaggtgggtattatgtgcaaatcatacagaaccagtgaaaggctttttaggcagatatcttcgaagaaaactcatagagatagaaattgaaaggaacattcgcaataatgacctagtcaaaattatagattggattccgaagacgtggcatcatctcaacagttttttggaaacacacagttcttctgacgttaccattggtccccgactattccttccttgccccatggatgtagaaggttctagagtatggttcatggatctctggaactattctttagtaccttatattctggaggcagtgagagagggtcttcagatgtatgggaaacgcacaccatgggaagatccttcaaagtgggtgcttgacacatatccatggagctcagcaactctgcctcaggagagcccagccttacttcagctgcgaccagaagatgttgggtatgaaagctgcacatccactaaggaagccacaacctcaaagcacattccgcaaactgacacagaaggagatcccctgatgaatatgctaatgaaactccaagaagcagccaattactcgagcacacaaagctgcgacagcgaaagcaccagccaccatgaagacattttggattcatctcttgaatctaccctctagagggtgaaaaaagttaagggaaaagactttgcttttaaaaaaatgtttcaaaagaaaggtattttcactaaaccactgccagtataaaagcaccctgtcaagggccctgacccagagttgtggtctccaaggaggcagcagaactaagtctgaaccgccaagatgctaaattgcaatggaagcttaactttagtttatttctaagcattttttatatctgtggagtaatagaaagctccattactcaactggaaaggaccctaatgacagggcaactgaacagattgcacatgggatagccaaactggactttctttgtttcctctttaaaagtttacaatgcagaccattttttgtcccttccttttgtttcctctgaggggctgttcgccccaggcagggtccatctttctgatctgtccaacctcctttgtgccacacggtgctggtcacagggcttcagtag

SEQ ID NO: 158935 - DNA, 2398 bp, Homo sapiens
  Payload ID: 11097
  Gene Symbol: NAV3
  Gene Name: neuron navigator 3
  ENST ID: ENST00000550788
  CDS Start-End: 1-2398
aaggatactccgagctaccagtccatgactagcctccacacgagctctgagtccattgacctccccctcagccatcatggctccttgtctggactgaccacaggcactcacgaggtccagagcctgctcatgagaacgggtagtgtgagatctactctctcagaaagatataccccatcatctcggcaggccaaccaagaagagggcaaagagtggttgcgttctcattctactggagggcttcaggacactggcaaccagtcacctctggtttccccttctgccatgtcatcttctgcagctggaaaataccacttttctaacttggtgagcccaacaaatttgtctcagtttaaccttcccgggcccagcatgatgcgctcaaacagcatcccagcccaagactcttccttcgatctctatgatgactcccagctttgtgggagtgccacttctctggaggaaagacctcgtgccatcagtcattcgggctcattcagagacagcatggaagaagttcatggctcttcattatcactggtgtccagcacttcttctctttactctacagctgaagaaaaggctcattcagagcaaatccataaactgcggagagagctggttgcatcacaagaaaaagttgctaccctcacatctcagctttcagcaaatgctcaccttgtagcagcttttgaaaagagcttagggaatatgactggccgattgcaaagtctaactatgacagcggaacaaaaggaatctgaacttatagaactaagagaaaccattgaaatgctgaaggctcagaattctgctgcccaggcggctattcagggagcactgaatggtccagaccatcctcccaaagatcttcgcatcagaagacagcattcctctgaaagtgtttctagtatcaacagtgccacaagccattccagtattggcagtggtaatgatgccgactccaagaagaagaaaaagaaaaactggctgagaagttctttcaaacaagcctttgggaagaaaaagtccaccaagcctccttcatcacattctgacattgaagagcttactgattcatcccttccggcatcccccaagttaccccataatgctggtgactgtggctcagcatccatgaagccctcacaatctgcttcagcgatctgtgaatgcacagaagctgaggcagagataattctgcagctgaagagcgagctcagagaaaaggaattaaaattaacggatattcggctggaggccctcagctctgctcatcatcttgatcagatccgggaagccatgaaccggatgcagaatgaaattgaaatactgaaagctgaaaatgaccggttgaaggcagaaactggtaacacagctaagcctactcggccaccgtcagaatcctcaagcagcacctcctcttcatcttccaggcagtcattaggactttctctaaacaatttgaacatcacagaggctgttagctcagatattttgctagatgatgctggtgatgcaactggacataaagatggccgcagtgtgaaaattatagtctccataagcaagggctatggtcgagcaaaggaccaaaaatctcaggcatatttgataggatccattggtgttagtggaaaaaccaagtgggatgtcttagatggtgtaataagacgtctctttaaggaatatgtattccgaattgatacatccactagccttggtctgagctctgactgcattgctagctactgtataggagacttaattagatcccataacctagaagtgcctgaattgctgccttgtggataccttgttggagataataacatcatcactgtgaacctcaaaggggtagaagaaaatagtttggacagttttgtttttgatacgctgattcctaaaccaattacccaaaggtactttaacttgttgatggagcatcacagaattatactctcaggaccgagtggtactggaaagacctatttggcaaacaaacttgctgaatatgtaataaccaaatctggaaggaaaaaaacagaggatgcaattgccacttttaatgtggaccacaagtcaagtaaggaattgcaacaatatctagctaacctggctgaacagtgcagtgctgataataatggagtggagctcccagttgtaataattcttgataatcttcatcatgtgggctctctgagtgatatcttcaatggttttctcaattgtaaatacaacaaatgtccatatattattggaacaatgaatcagggagtttcttcatcaccaaatctagagctgcatcacaatttcaggtgggtattatgtgcaaatcatacagaaccagtgaaaggctttttaggcagatatcttcgaagaaaactcatagagatag

SEQ ID NO: 158936 - DNA, 2650 bp, Homo sapiens
  Payload ID: 11098
  Gene Symbol:
  Gene Name: neuron specific gene family member 1 [Source:EntrezGene
  Acc:27065]
  Uniprot ID: P42857
  ENST ID: ENST00000397958
  CDS Start-End: 470-1027
aggatgctcgggcggcggctgcagtgggacctccaccttctctgccaaccagagcggaggaacctttccgcctccctccaagcggcgcactgagcgctctttgcctagaacgacttccctcccgctgcctggggcagcctcaccctgggcgcccacaccccagccctgggagagcgctactccgcctcccgcaccaccgaaaacctcctcctcctttacgggccgcgcctcctttacgggccgcgccccctttatacgcggacgcgccctcttttggtcgccccctccccaacccagcactaaggagcaccctgctctggtctccgccaccacccagcgcctcctggacccatccccccaaacccttgaacgtcctcaggacccccaggagcaggagacgcggagctcggagcgctcagctgacctgccggagccgggcgtgggctgcagcctcggagctcccggaacgatggtgaagttggggaacaatttcgcagagaagggcaccaagcagccgctgctggaggatggcttcgacaccattcccctgatgacgcccctcgatgtcaatcagctgcagttcccgcccccggataaggtggtcgtgaaaactaagaccgagtatgaacctgaccgcaagaaagggaaagcacgtcctccccaaattgctgagttcaccgtcagcatcacggagggtgtcaccgagaggtttaaggtctccgtgttggtcctcttcgccctggccttcctcacctgcgtcgtcttcctggttgtctacaaggtgtacaagtatgaccgcgcctgccccgatgggttcgtcctcaagaacacccagtgcatcccagaaggcttggagagctactacgcggagcaagactccagtgcccgggagaaattttacacagtcataaaccactacaacctggccaagcagagcatcacgcgctccgtatcgccctggatgtcagttctgtcagaagagaagctgtccgagcaggagactgaagcggctgagaagtcagcttagcgggatgggcaagttccttacaatgtgtcacttgcaaataacaaagggactttgagggacatttcattaaatataattactgatactttagaggttactcatttacggtgcaattgcttctgtttgctaatgctgctttgcaaataaaacttgctgccgaccacccacgggcataaaatcaagtgcatttcagcattgcctaaagagctctgacaccacttttcatgttaagatcttcatttagctcctttactgggatttattggatgctgtaaaaaaataaatttacactggatatgcgaagggtttggatctcagataaatgcattttgtggaattgattttctgaaccgaccctgctgtctgcaaaccttcctccatagccatatctagagtgatctctcgctgtgctaagagcaagcctacttcgcatttcttcctcggccatcagcgggtaacagtgctgactgctgccaaggtgcactgtagtaagtaagtggcatagagaacgaggaaaaagacccccccacccctccctgtgctgactcctgagtcggggtgggacggccctgcaatgtggcaggctcggtgtggattgactactccctcccctctgactctggcatcttggtaaggagggaggggcaccacccatctgggtggagacagctggggtttgctccagtgtgtgtagactggcagagcatgtgagggagagggctgggaagagacggccctgggcccgtgaggtgcagaactctccctgcaggtagtctgtctgctctgtgatgtgctgataggaaagagcccccactggccctctggttcacttctattatgaataaatttgcaccaatagccccattagtttttaaagaaatgagctgggtgggaaaagtggaaatgtaatttctggtaagcttgagctactttaatttttattctatgaaactgatatcccttgatgtgggaaacaggcaggaaaggctgtggggtgggggtgggggactggtgtggcaccgtgcaaacaaaatgacaaatttcaactcacaatctttgtaagaaaattgttccagtttgaatcttgatattaaagtttatgtttacaaaactgccagttagatgaactaagtgtgtaaaacaaatagaaaagacattcgcagacatttcttctatgttattgaatgtgttgtttctggtgtacgtgtcaaaagtttcagttttttagatcagaaataaacgacaaatagtgtgagatgtgttgtgaacaggcatggtgaccgtggtcagcgccactcttgtttcctgaaatgtgcttctaagacagaaaatgtattttctcatcaagggtgtctggagacacagaccgtgaccttggcgcagcggtgtgcatcagaggcgtgtgctgagaagggtggtgttaagctgtggaaaatgactcaagagcaataaatcagtgccaaagcttccctgcgcatctgaatagacacaagtgaagcccgtgtgcgcacagtgcagaggccgagcctgtatttccaggtagacgtggactttattgactgtgaattcatttacatgtaacttctgacatttcactctgtgcaaataaagaacatgaggata

SEQ ID NO: 158937 - DNA, 4172 bp, Homo sapiens
  Payload ID: 11098
  Gene Symbol:
  Gene Name: neuron specific gene family member 1 [Source:EntrezGene
  Acc:27065]
  Uniprot ID: P42857
  ENST ID: ENST00000421177
  CDS Start-End: 1992-2549
tgttttttgagacagagtcttgttctgtggcccaggctggagtgcaatggtgtaatctcagctcgccacaacctccacctcctgagttcaagcgattctcctgcctcagcctcctaagtagctgggattacaggcatgcgccaccacgcccggctaatttttgtatttttagtagagatggggtttcaccatgttggtcaggctggttttgaactcctgaccttgtgatctgctggtcttggcctcccaaagtgctggtgtgtctggaattggttacttctggtgcgttcttcgtctcgctgacttcaagaatgaagccacggaccctcgcgagttggacaggttggattatttgaaaacagcctgggttgtgagaggaaaatgagcaggccagaggaatttggagctgccagcatcttggagggcccagatacaatcagcagaggaagaaaaccacaggatgaaacagtcccaatgaccagcaccagtgaagacccaagacagcacaaaaggccagctagcagagaaacatgattgttcaccgtccatctctgggacaacctagatgcctgggcagatttctgaagtggagcaagagaaatcttctcttcttcacctgcttcagggaggcatcaaagtgccaaaaaggattctcagacggctgatggaaaacgccccggaccctccgtagtgccgcggggaagtccccggaaagggtgtgaaaaagtatcgaatttgggtgatgcctcctcctcgtccagcgcctgacagggcccagctcctggcccaggtgcccaggaggcaccgatccccgcagccggcctcctcccgcgcgggctccactcccatttcggcctcgcccccacaccccatagtctttcatccgtgagtcctgcaggcaggacgggttggaggtctgcaaacaggaccctctctgggaagccgcgacagcggctgagctcggggtttgggggcgcaggtcgggctagaaccaccccccttctctccgcgtccgggcatcgtcccagcggcccctcctctgtgcccaggatgctcgggcggcggctgcagtgggacctccaccttctctgccaaccagagcggaggaacctttccgcctccctccaagcggcgcactgagcgctctttgcctagaacgacttccctcccgctgcctggggcagcctcaccctgggcgcccacaccccagccctgggagagcgctactccgcctcccgcaccaccgaaaacctcctcctcctttacgggccgcgcctcctttacgggccgcgccccctttatacgcggacgcgccctcttttggtcgccccctccccaacccagcactaaggagcaccctgctctggtctccgccaccacccagcgcctcctggacccatccccccaaacccttgaacgtcctcaggacccccaggtgagcgcggcgcgctgcgggcggggaccctctctgcacctccccgcacccctgggggtcgctctgtccctacggtccccgcctcccctttctcctttctaagcgcctcgcgcccaggccgccgcccggggtggcgcagcccgcagccctcccgctccgggcgccctccgccgctccgagaccccctgggggcgcgtcctctcccgctcccctgttccctcccccggctcagggcgggcgcgtggtcccaggggaggctcccgcccagccccgcactcctttgtgcggccgggcgggcgctgcgtcaaggtggaggcgcggccacacgcgcgcacccacccgcgcgcacccagcccccgggagaggcaggaagggaggcggcggcgcgaggaggagggagcggccgtggagcccaatcgttcgctccccttcccgggtccgcgcgcggcgccgcctccgccattgctgcgagcaggagcaggagacgcggagctcggagcgctcagctgacctgccggagccgggcgtgggctgcagcctcggagctcccggaacgatggtgaagttggggaacaatttcgcagagaagggcaccaagcagccgctgctggaggatggcttcgacaccattcccctgatgacgcccctcgatgtcaatcagctgcagttcccgcccccggataaggtggtcgtgaaaactaagaccgagtatgaacctgaccgcaagaaagggaaagcacgtcctccccaaattgctgagttcaccgtcagcatcacggagggtgtcaccgagaggtttaaggtctccgtgttggtcctcttcgccctggccttcctcacctgcgtcgtcttcctggttgtctacaaggtgtacaagtatgaccgcgcctgccccgatgggttcgtcctcaagaacacccagtgcatcccagaaggcttggagagctactacgcggagcaagactccagtgcccgggagaaattttacacagtcataaaccactacaacctggccaagcagagcatcacgcgctccgtatcgccctggatgtcagttctgtcagaagagaagctgtccgagcaggagactgaagcggctgagaagtcagcttagcgggatgggcaagttccttacaatgtgtcacttgcaaataacaaagggactttgagggacatttcattaaatataattactgatactttagaggttactcatttacggtgcaattgcttctgtttgctaatgctgctttgcaaataaaacttgctgccgaccacccacgggcataaaatcaagtgcatttcagcattgcctaaagagctctgacaccacttttcatgttaagatcttcatttagctcctttactgggatttattggatgctgtaaaaaaataaatttacactggatatgcgaagggtttggatctcagataaatgcattttgtggaattgattttctgaaccgaccctgctgtctgcaaaccttcctccatagccatatctagagtgatctctcgctgtgctaagagcaagcctacttcgcatttcttcctcggccatcagcgggtaacagtgctgactgctgccaaggtgcactgtagtaagtaagtggcatagagaacgaggaaaaagacccccccacccctccctgtgctgactcctgagtcggggtgggacggccctgcaatgtggcaggctcggtgtggattgactactccctcccctctgactctggcatcttggtaaggagggaggggcaccacccatctgggtggagacagctggggtttgctccagtgtgtgtagactggcagagcatgtgagggagagggctgggaagagacggccctgggcccgtgaggtgcagaactctccctgcaggtagtctgtctgctctgtgatgtgctgataggaaagagcccccactggccctctggttcacttctattatgaataaatttgcaccaatagccccattagtttttaaagaaatgagctgggtgggaaaagtggaaatgtaatttctggtaagcttgagctactttaatttttattctatgaaactgatatcccttgatgtgggaaacaggcaggaaaggctgtggggtgggggtgggggactggtgtggcaccgtgcaaacaaaatgacaaatttcaactcacaatctttgtaagaaaattgttccagtttgaatcttgatattaaagtttatgtttacaaaactgccagttagatgaactaagtgtgtaaaacaaatagaaaagacattcgcagacatttcttctatgttattgaatgtgttgtttctggtgtacgtgtcaaaagtttcagttttttagatcagaaataaacgacaaatagtgtgagatgtgttgtgaacaggcatggtgaccgtggtcagcgccactcttgtttcctgaaatgtgcttctaagacagaaaatgtattttctcatcaagggtgtctggagacacagaccgtgaccttggcgcagcggtgtgcatcagaggcgtgtgctgagaagggtggtgttaagctgtggaaaatgactcaagagcaataaatcagtgccaaagcttccctgcgcatctgaatagacacaagtgaagcccgtgtgcgcacagtgcagaggccgagcctgtatttccaggtagacgtggactttattgactgtgaattcatttacatgtaacttctgacatttcactctgtgcaaataaagaacatgaggata

SEQ ID NO: 158938 - DNA, 2254 bp, Homo sapiens
  Payload ID: 11098
  Gene Symbol:
  Gene Name: neuron specific gene family member 1 [Source:EntrezGene
  Acc:27065]
  Uniprot ID: P42857
  ENST ID: ENST00000433139
  CDS Start-End: 133-690
ccctccccaacccagcactaaggagcaccctgctctggtctccgccaccacccagcgcctcctggacccatccccccaaacccttgaacgtcctcaggacccccaggctgcagcctcggagctcccggaacgatggtgaagttggggaacaatttcgcagagaagggcaccaagcagccgctgctggaggatggcttcgacaccattcccctgatgacgcccctcgatgtcaatcagctgcagttcccgcccccggataaggtggtcgtgaaaactaagaccgagtatgaacctgaccgcaagaaagggaaagcacgtcctccccaaattgctgagttcaccgtcagcatcacggagggtgtcaccgagaggtttaaggtctccgtgttggtcctcttcgccctggccttcctcacctgcgtcgtcttcctggttgtctacaaggtgtacaagtatgaccgcgcctgccccgatgggttcgtcctcaagaacacccagtgcatcccagaaggcttggagagctactacgcggagcaagactccagtgcccgggagaaattttacacagtcataaaccactacaacctggccaagcagagcatcacgcgctccgtatcgccctggatgtcagttctgtcagaagagaagctgtccgagcaggagactgaagcggctgagaagtcagcttagcgggatgggcaagttccttacaatgtgtcacttgcaaataacaaagggactttgagggacatttcattaaatataattactgatactttagaggttactcatttacggtgcaattgcttctgtttgctaatgctgctttgcaaataaaacttgctgccgaccacccacgggcataaaatcaagtgcatttcagcattgcctaaagagctctgacaccacttttcatgttaagatcttcatttagctcctttactgggatttattggatgctgtaaaaaaataaatttacactggatatgcgaagggtttggatctcagataaatgcattttgtggaattgattttctgaaccgaccctgctgtctgcaaaccttcctccatagccatatctagagtgatctctcgctgtgctaagagcaagcctacttcgcatttcttcctcggccatcagcgggtaacagtgctgactgctgccaaggtgcactgtagtaagtaagtggcatagagaacgaggaaaaagacccccccacccctccctgtgctgactcctgagtcggggtgggacggccctgcaatgtggcaggctcggtgtggattgactactccctcccctctgactctggcatcttggtaaggagggaggggcaccacccatctgggtggagacagctggggtttgctccagtgtgtgtagactggcagagcatgtgagggagagggctgggaagagacggccctgggcccgtgaggtgcagaactctccctgcaggtagtctgtctgctctgtgatgtgctgataggaaagagcccccactggccctctggttcacttctattatgaataaatttgcaccaatagccccattagtttttaaagaaatgagctgggtgggaaaagtggaaatgtaatttctggtaagcttgagctactttaatttttattctatgaaactgatatcccttgatgtgggaaacaggcaggaaaggctgtggggtgggggtgggggactggtgtggcaccgtgcaaacaaaatgacaaatttcaactcacaatctttgtaagaaaattgttccagtttgaatcttgatattaaagtttatgtttacaaaactgccagttagatgaactaagtgtgtaaaacaaatagaaaagacattcgcagacatttcttctatgttattgaatgtgttgtttctggtgtacgtgtcaaaagtttcagttttttagatcagaaataaacgacaaatagtgtgagatgtgttgtgaacaggcatggtgaccgtggtcagcgccactcttgtttcctgaaatgtgcttctaagacagaaaatgtattttctcatcaagggtgtctggagacacagaccgtgaccttggcgcagcggtgtgcatcagaggcgtgtgctgagaagggtggtgttaagctgtggaaaatgactcaagagcaataaatcagtgccaaagcttccctgcgcatctgaatagacacaagtgaagcccgtgtgcgcacagtgcagaggccgagcctgtatttccaggtagacgtggactttattgactgtg

SEQ ID NO: 158939 - DNA, 973 bp, Homo sapiens
  Payload ID: 11098
  Gene Symbol:
  Gene Name: neuron specific gene family member 1 [Source:EntrezGene
  Acc:27065]
  Uniprot ID: P42857
  ENST ID: ENST00000505246
  CDS Start-End: 231-788
ggaagaaaaccacaggatgaaacagtcccaatgaccagcaccagtgaagacccaagacagcacaaaaggccagctagcagagaaacatgattgttcaccgtccatctctgggacaacctagatgcctgggcagatttctgaagtggagcaagagaaatcttctcttcttcacctgcttcagggaggcatcaaagtgccaaaaaggctgcagcctcggagctcccggaacgatggtgaagttggggaacaatttcgcagagaagggcaccaagcagccgctgctggaggatggcttcgacaccattcccctgatgacgcccctcgatgtcaatcagctgcagttcccgcccccggataaggtggtcgtgaaaactaagaccgagtatgaacctgaccgcaagaaagggaaagcacgtcctccccaaattgctgagttcaccgtcagcatcacggagggtgtcaccgagaggtttaaggtctccgtgttggtcctcttcgccctggccttcctcacctgcgtcgtcttcctggttgtctacaaggtgtacaagtatgaccgcgcctgccccgatgggttcgtcctcaagaacacccagtgcatcccagaaggcttggagagctactacgcggagcaagactccagtgcccgggagaaattttacacagtcataaaccactacaacctggccaagcagagcatcacgcgctccgtatcgccctggatgtcagttctgtcagaagagaagctgtccgagcaggagactgaagcggctgagaagtcagcttagcgggatgggcaagttccttacaatgtgtcacttgcaaataacaaagggactttgagggacatttcattaaatataattactgatactttagaggttactcatttacggtgcaattgcttctgtttgctaatgctgctttgcaaataaaacttgctgccgaccacccacgggcataaaatcaagtg

SEQ ID NO: 158940 - DNA, 1486 bp, Homo sapiens
  Payload ID: 11098
  Gene Symbol:
  Gene Name: neuron specific gene family member 1 [Source:EntrezGene
  Acc:27065]
  Uniprot ID: P42857
  ENST ID: ENST00000513829
  CDS Start-End: 162-719
gggagcggccgtggagcccaatcgttcgctccccttcccgggtccgcgcgcggcgccgcctccgccattgctgcgagcaggagcaggagacgcggagctcggagcgctcagctgacctgccggagccgggcgtgggctgcagcctcggagctcccggaacgatggtgaagttggggaacaatttcgcagagaagggcaccaagcagccgctgctggaggatggcttcgacaccattcccctgatgacgcccctcgatgtcaatcagctgcagttcccgcccccggataaggtggtcgtgaaaactaagaccgagtatgaacctgaccgcaagaaagggaaagcacgtcctccccaaattgctgagttcaccgtcagcatcacggagggtgtcaccgagaggtttaaggtctccgtgttggtcctcttcgccctggccttcctcacctgcgtcgtcttcctggttgtctacaaggtgtacaagtatgaccgcgcctgccccgatgggttcgtcctcaagaacacccagtgcatcccagaaggcttggagagctactacgcggagcaagactccagtgcccgggagaaattttacacagtcataaaccactacaacctggccaagcagagcatcacgcgctccgtatcgccctggatgtcagttctgtcagaagagaagctgtccgagcaggagactgaagcggctgagaagtcagcttagcgggatgggcaagttccttacaatgtgtcacttgcaaataacaaagggactttgagggacatttcattaaatataattactgatactttagaggttactcatttacggtgcaattgcttctgtttgctaatgctgctttgcaaataaaacttgctgccgaccacccacgggcataaaatcaagtgcatttcagcattgcctaaagagctctgacaccacttttcatgttaagatcttcatttagctcctttactgggatttattggatgctgtaaaaaaataaatttacactggatatgcgaagggtttggatctcagataaatgcattttgtggaattgattttctgaaccgaccctgctgtctgcaaaccttcctccatagccatatctagagtgatctctcgctgtgctaagagcaagcctacttcgcatttcttcctcggccatcagcgggtaacagtgctgactgctgccaaggtgcactgtagtaaggtgtctggagacacagaccgtgaccttggcgcagcggtgtgcatcagaggcgtgtgctgagaagggtggtgttaagctgtggaaaatgactcaagagcaataaatcagtgccaaagcttccctgcgcatctgaatagacacaagtgaagcccgtgtgcgcacagtgcagaggccgagcctgtatttccaggtagacgtggactttattgactgtgaattcatttacatgtaacttctgacatttcactctgtgcaaataaagaacatgaggata

SEQ ID NO: 158941 - DNA, 798 bp, Homo sapiens
  Payload ID: 11098
  Gene Symbol:
  Gene Name: neuron specific gene family member 1 [Source:EntrezGene
  Acc:27065]
  Uniprot ID: P42857
  ENST ID: ENST00000506380
  CDS Start-End: 193-750
cctgaccagtgggtcactctcatggcagatgcctgggcagatttctgaagtggagcaagagaaatcttctcttcttcacctgcttcagggaggcatcaaagtgccaaaaaggagcaggagacgcggagctcggagcgctcagctgacctgccggagccgggcgtgggctgcagcctcggagctcccggaacgatggtgaagttggggaacaatttcgcagagaagggcaccaagcagccgctgctggaggatggcttcgacaccattcccctgatgacgcccctcgatgtcaatcagctgcagttcccgcccccggataaggtggtcgtgaaaactaagaccgagtatgaacctgaccgcaagaaagggaaagcacgtcctccccaaattgctgagttcaccgtcagcatcacggagggtgtcaccgagaggtttaaggtctccgtgttggtcctcttcgccctggccttcctcacctgcgtcgtcttcctggttgtctacaaggtgtacaagtatgaccgcgcctgccccgatgggttcgtcctcaagaacacccagtgcatcccagaaggcttggagagctactacgcggagcaagactccagtgcccgggagaaattttacacagtcataaaccactacaacctggccaagcagagcatcacgcgctccgtatcgccctggatgtcagttctgtcagaagagaagctgtccgagcaggagactgaagcggctgagaagtcagcttagcgggatgggcaagttccttacaatgtgtcacttgcaaataacaaaggg

SEQ ID NO: 158942 - DNA, 980 bp, Homo sapiens
  Payload ID: 11098
  Gene Symbol:
  Gene Name: neuron specific gene family member 1 [Source:EntrezGene
  Acc:27065]
  ENST ID: ENST00000504171
  CDS Start-End: 96-536
attgctgcgagcaggagcaggagacgcggagctcggagcgctcagctgacctgccggagccgggcgtgggctgcagcctcggagctcccggaacgatggtgaagttggggaacaatttcgcagagaagggcaccaagcagccgctgctggaggatggcttcgacaccattcccctgatgacgcccctcgatgtcaatcagctgcagttcccgcccccggataaggtctccgtgttggtcctcttcgccctggccttcctcacctgcgtcgtcttcctggttgtctacaaggtgtacaagtatgaccgcgcctgccccgatgggttcgtcctcaagaacacccagtgcatcccagaaggcttggagagctactacgcggagcaagactccagtgcccgggagaaattttacacagtcataaaccactacaacctggccaagcagagcatcacgcgctccgtatcgccctggatgtcagttctgtcagaagagaagctgtccgagcaggagactgaagcggctgagaagtcagcttagcgggatgggcaagttccttacaatgtgtcacttgcaaataacaaagggactttgagggacatttcattaaatataattactgatactttagaggttactcatttacggtgcaattgcttctgtttgctaatgctgctttgcaaataaaacttgctgccgaccacccacgggcataaaatcaagtgcatttcagcattgcctaaagagctctgacaccacttttcatgttaagatcttcatttagctcctttactgggatttattggatgctgtaaaaaaataaatttacactggatatgcgaagggtttggatctcagataaatgcattttgtggaattgattttctgaaccgaccctgctgtctgcaaaccttcctccatagccatatctagagtgatctctcgctgtgctaagagcaagcctacttcgcatttcttcctcgg

SEQ ID NO: 158943 - DNA, 3291 bp, Homo sapiens
  Payload ID: 11098
  Gene Symbol:
  Gene Name: neuron specific gene family member 1 [Source:EntrezGene
  Acc:27065]
  Uniprot ID: P42857
  ENST ID: ENST00000513555
  CDS Start-End: 1111-1668
agagatggggtttcaccatgttggtcaggctggttttgaactcctgaccttgtgatctgctggtcttggcctcccaaagtgctggtgtgtctggaattggttacttctggtgcgttcttcgtctcgctgacttcaagaatgaagccacggaccctcgcgatgcctgggcagatttctgaagtggagcaagagaaatcttctcttcttcacctgcttcagggaggcatcaaagtgccaaaaaggattctcagacggctgatggaaaacgccccggaccctccgtagtgccgcggggaagtccccggaaagggtgtgaaaaagtatcgaatttgggtgatgcctcctcctcgtccagcgcctgacagggcccagctcctggcccaggtgcccaggaggcaccgatccccgcagccggcctcctcccgcgcgggctccactcccatttcggcctcgcccccacaccccatagtctttcatccgtgagtcctgcaggcaggacgggttggaggtctgcaaacaggaccctctctgggaagccgcgacagcggctgagctcggggtttgggggcgcaggtcgggctagaaccaccccccttctctccgcgtccgggcatcgtcccagcggcccctcctctgtgcccaggatgctcgggcggcggctgcagtgggacctccaccttctctgccaaccagagcggaggaacctttccgcctccctccaagcggcgcactgagcgctctttgcctagaacgacttccctcccgctgcctggggcagcctcaccctgggcgcccacaccccagccctgggagagcgctactccgcctcccgcaccaccgaaaacctcctcctcctttacgggccgcgcctcctttacgggccgcgccccctttatacgcggacgcgccctcttttggtcgccccctccccaacccagcactaaggagcaccctgctctggtctccgccaccacccagcgcctcctggacccatccccccaaacccttgaacgtcctcaggacccccaggagcaggagacgcggagctcggagcgctcagctgacctgccggagccgggcgtgggctgcagcctcggagctcccggaacgatggtgaagttggggaacaatttcgcagagaagggcaccaagcagccgctgctggaggatggcttcgacaccattcccctgatgacgcccctcgatgtcaatcagctgcagttcccgcccccggataaggtggtcgtgaaaactaagaccgagtatgaacctgaccgcaagaaagggaaagcacgtcctccccaaattgctgagttcaccgtcagcatcacggagggtgtcaccgagaggtttaaggtctccgtgttggtcctcttcgccctggccttcctcacctgcgtcgtcttcctggttgtctacaaggtgtacaagtatgaccgcgcctgccccgatgggttcgtcctcaagaacacccagtgcatcccagaaggcttggagagctactacgcggagcaagactccagtgcccgggagaaattttacacagtcataaaccactacaacctggccaagcagagcatcacgcgctccgtatcgccctggatgtcagttctgtcagaagagaagctgtccgagcaggagactgaagcggctgagaagtcagcttagcgggatgggcaagttccttacaatgtgtcacttgcaaataacaaagggactttgagggacatttcattaaatataattactgatactttagaggttactcatttacggtgcaattgcttctgtttgctaatgctgctttgcaaataaaacttgctgccgaccacccacgggcataaaatcaagtgcatttcagcattgcctaaagagctctgacaccacttttcatgttaagatcttcatttagctcctttactgggatttattggatgctgtaaaaaaataaatttacactggatatgcgaagggtttggatctcagataaatgcattttgtggaattgattttctgaaccgaccctgctgtctgcaaaccttcctccatagccatatctagagtgatctctcgctgtgctaagagcaagcctacttcgcatttcttcctcggccatcagcgggtaacagtgctgactgctgccaaggtgcactgtagtaagtaagtggcatagagaacgaggaaaaagacccccccacccctccctgtgctgactcctgagtcggggtgggacggccctgcaatgtggcaggctcggtgtggattgactactccctcccctctgactctggcatcttggtaaggagggaggggcaccacccatctgggtggagacagctggggtttgctccagtgtgtgtagactggcagagcatgtgagggagagggctgggaagagacggccctgggcccgtgaggtgcagaactctccctgcaggtagtctgtctgctctgtgatgtgctgataggaaagagcccccactggccctctggttcacttctattatgaataaatttgcaccaatagccccattagtttttaaagaaatgagctgggtgggaaaagtggaaatgtaatttctggtaagcttgagctactttaatttttattctatgaaactgatatcccttgatgtgggaaacaggcaggaaaggctgtggggtgggggtgggggactggtgtggcaccgtgcaaacaaaatgacaaatttcaactcacaatctttgtaagaaaattgttccagtttgaatcttgatattaaagtttatgtttacaaaactgccagttagatgaactaagtgtgtaaaacaaatagaaaagacattcgcagacatttcttctatgttattgaatgtgttgtttctggtgtacgtgtcaaaagtttcagttttttagatcagaaataaacgacaaatagtgtgagatgtgttgtgaacaggcatggtgaccgtggtcagcgccactcttgtttcctgaaatgtgcttctaagacagaaaatgtattttctcatcaagggtgtctggagacacagaccgtgaccttggcgcagcggtgtgcatcagaggcgtgtgctgagaagggtggtgttaagctgtggaaaatgactcaagagcaataaatcagtgccaaagcttccctgcgcatctgaatagacacaagtgaagcccgtgtgcgcacagtgcagaggccgagcctgtatttccaggtagacgtggactttattgactgtgaattcatttacatgtaacttctgacatttcactctgtgcaaataaagaacatgaggata

SEQ ID NO: 158944 - DNA, 1483 bp, Homo sapiens
  Payload ID: 11098
  Gene Symbol:
  Gene Name: neuron specific gene family member 1 [Source:EntrezGene
  Acc:27065]
  Uniprot ID: P42857
  ENST ID: ENST00000621129
  CDS Start-End: 162-719
gggagcggccgtggagcccaatcgttcgctccccttcccgggtccgcgcgcggcgccgcctccgccattgctgcgagcaggagcaggagacgcggagctcggagcgctcagctgacctgccggagccgggcgtgggctgcagcctcggagctcccggaacgatggtgaagttggggaacaatttcgcagagaagggcaccaagcagccgctgctggaggatggcttcgacaccattcccctgatgacgcccctcgatgtcaatcagctgcagttcccgcccccggataaggtggtcgtgaaaactaagaccgagtatgaacctgaccgcaagaaagggaaagcacgtcctccccaaattgctgagttcaccgtcagcatcacggagggtgtcaccgagaggtttaaggtctccgtgttggtcctcttcgccctggccttcctcacctgcgtcgtcttcctggttgtctacaaggtgtacaagtatgaccgcgcctgccccgatgggttcgtcctcaagaacacccagtgcatcccagaaggcttggagagctactacgcggagcaagactccagtgcccgggagaaattttacacagtcataaaccactacaacctggccaagcagagcatcacgcgctccgtatcgccctggatgtcagttctgtcagaagagaagctgtccgagcaggagactgaagcggctgagaagtcagcttagcgggatgggcaagttccttacaatgtgtcacttgcaaataacaaagggactttgagggacatttcattaaatataattactgatactttagaggttactcatttacggtgcaattgcttctgtttgctaatgctgctttgcaaataaaacttgctgccgaccacccacgggcataaaatcaagtgcatttcagcattgcctaaagagctctgacaccacttttcatgttaagatcttcatttagctcctttactgggatttattggatgctgtaaaaaaataaatttacactggatatgcgaagggtttggatctcagataaatgcattttgtggaattgattttctgaaccgaccctgctgtctgcaaaccttcctccatagccatatctagagtgatctctcgctgtgctaagagcaagcctacttcgcatttcttcctcggccatcagcgggtaacagtgctgactgctgccaaggtgcactgtagtaaggtgtctggagacacagaccgtgaccttggcgcagcggtgtgcatcagaggcgtgtgctgagaagggtggtgttaagctgtggaaaatgactcaagagcaataaatcagtgccaaagcttccctgcgcatctgaatagacacaagtgaagcccgtgtgcgcacagtgcagaggccgagcctgtatttccaggtagacgtggactttattgactgtgaattcatttacatgtaacttctgacatttcactctgtgcaaataaagaacatgagg

SEQ ID NO: 158945 - DNA, 4991 bp, Homo sapiens
  Payload ID: 11099
  Gene Symbol: NCS1
  Gene Name: neuronal calcium sensor 1
  Uniprot ID: P62166
  ENST ID: ENST00000372398
  CDS Start-End: 87-659
ccggcccggcccgcccggcccagccgctcctgctgggcgccccaaccgggtccggcccgggggggcgggggccgcggccgccgaggatggggaaatccaacagcaagttgaagcccgaagttgtggaggagctgaccaggaagacctactttaccgagaaggaggtccagcagtggtacaaaggcttcatcaaggactgccccagtgggcagctggatgcggcaggcttccagaagatctacaagcaattcttcccgttcggagaccccaccaagtttgccacatttgttttcaacgtctttgatgaaaacaaggacgggcgaattgagttctccgagttcatccaggcgctgtcggtgacctcacggggaaccctggatgagaagctacggtgggccttcaagctctacgacttggacaatgatggctacatcaccaggaatgagatgctggacattgtggatgccatttaccagatggtggggaataccgtggagctcccagaggaggagaacactcctgagaagagggtggaccggatctttgccatgatggataagaatgccgacgggaagctgaccctgcaggagttccaggagggttccaaggcagacccgtccattgtgcaggcgctgtccctctacgacgggctggtatagtcccaggctggagctggatgcctgggaaccactcacctccttctgtgccatgaggccacctcagccctgacaccaaccccgtgcgtccacccagccttcttccgcatccacacacagccggctgcccttgacccgggaggccccggctctcctctcccctgtcctgcacccatcccccgcctgaagccaccggctccaattgccagcaacctctgcttgtccggaaaacgacaacacgaaatggaaaaggctacagccctctgcataaaccaaggacttggctgcctcgcaggcagcctccgttcctcccgctctcttgcgcgtgtgcttttgttttttattttgaacagacgttttaaaagaaaaaaaaacaactaccttctgtcctagaagacacagactgacagatggggtgaaggcctggggacctcagagaactctgccttgccctcgtccctcgtccttcggcagccggagaggctgtgggtgggccgagggtgtctaggggttctgcctggtcaacgttatttgtcgtcccatcttttggcagcaaaaccacctgcgtggctaggatgattaattatgaggatgatgattttttttgtgataacagtattgtgctttttgtggggaaagtgaggtttttttttatatacatatataattgatatctttaatttattggttgttaactgttgctgctgcctggtgtgtcctcagctcccagggctgcgggcccaccgtttacatgtgcacgccctgacccacctgcccacgccgacttgggaggatggtggcctgcagcggccaagaagccaaaaaaaattttttttttttcagatactgtgcttgatttttggagaggggagaggtggaaattcctaaatggctaatgcactgttccctccagcccgaatgcctcctgccaaaccccttttccctgctgcctctgtccccgcatccttgttctcccctgggtccgtaacattttttccgaggatgaacaggggacatctttaggtttctcaactcttgctttggtgtttgccgcagcatggaaaacagggcgcctaaggctgggagctggaagaaggggcattgggtacccaggcagagtcaggagaggtggtctttgaagtaagttagcagaaatcaaggggacccccgcctccttgggctggggaggggatttcaagatagttcatgactctctcccgctctgccttccctccttcctatctgctttttccagtaaactgcatggtgtccttccctggccttctcttggctcaaaggctgggagggagggaaggagagaagagttccaggcaatcccatcaatatagtccctacacctggggctgcggcccacatgtcttcacggaggcttccagcggtgcctgccactgaggcaggtgcggccccaggaccatcaccaggaatgcgaggccaccctggaccagaggtaggagcccaaggtccggcccttgctctttgattgtgggcagcctcctgccctctctgggtctcagttgccccatctgcagagcgaggaggcccgggctggttggtcttgaaggcccttttccatgccgacatcatgtcactctaggcctggggttcagtttcctgtggctggtgatgctgtggttaagtttgcttgaccccagcagcccgagggactgtctgagtcacagcacagcccctattgcgtggctgctggtgtgtggggtcagttccagcagatgaatgtgtcatgtggcacaccttgtcccttcccgcagcatttcctggttccccccagacccttgagcgctctttgggacccagaaggagtccttgcacagggaaggcttgaggtgagaagccgcttcccagactgtcagggccaggcctgggtctagaattcttgctgctgctttgcagagtcaacagcccatcagcccatgttttagaggggacactttggtcctcggttcccaccctcagcaagcaggcctccagcccgaggaaggcctctgccgtagtgacgttgccgtgtggggctgcgtggctgttccccttggctggagcattcagccaaccccagcgtcccccctgaggcgttcattggcagccccctaggactgcacgctggccccacggtaaccccccctcccccaccaacatcctgcagggatggggtcagtggttccaccttcacaggccactttgaagggtggattctttgaggcccctgccagtcggctccctgctcagctgctggcccgggcgacctgggactcagcaccaacggctgaagtttctcagctgggctctgacctggggtctggggcagggaacgaacatggtggctttgggctgagaggatgagggaggtctttcccaggtcaaattactttcctttggcctctgcctgaggctcgatttgcctctctggtccaatgggactgacactgttgtacaacctgacctgtggctgagggtgtctgggcttaagcatgtggaccccttcggtgtgtccggccttcctccatcgtcctgccctttggccttttggtttgaagccacaggtgtggcttctggccttagcagatggtatgcttgcggaccgcagcccagcatgccggtgggcccacagcccgagccagcccagagctgccggaagggccgcccttcccggccctggcggggtgctggacactggccattttcactagagtttgcctggcagggaccgatctctgccccctcctctccccaggcctctggctgcagtgatgccgcagaatcctgagccaggtgcctcctgagcagcccgtgcgcctctccacagcggcgtttgccacccaatgcggctcgcttcagatgctctgatgcagagggcacgcccatagtccctctgcagagcctcgcactggggccagggcaggcaccagccccaggcggccagtcggccacggcctgtcctcttcctcgtagcgtctgctcctcactttgtgttgatggtgacttaggagaatgttccgattttccatgatctaagcaggccacgtttaaaataacatcaaggcaagcgtacgtgtcaccctctgtactgacatctcttcccctgaaatgcttttcagtttgacagcccgtttcctagacaagtgcacctggggtttcaggaactttgtgttttttcggagggggttggtggggaggtcgggatgcctgggatcccttcctggagaggcaggctgtctctggaaaaagcctccattgcccacccgccaggcggaaagtcaccctgttcccagcgcggtttcagcatttaattttaagggagctaaggaagcgcggcgcgccccctggtggtggtaagccgccaacgcacctgggggctgcaaccccaccggacgggtggtccggagggaggctggagcggggaggcgaggagggggctgtgagtcctcagaggccctgggccaccacatttctggcagcgtttcccagacacccctctgctaggccatccctggatagcaagtgaattaacttaagggcactgtgatgggaagccttgcccccctcttttttttttttttttaatatctgcggaataaacccaatggttaatttttgaatgaataaaaggcttttgttgaataaacagctggtcccatcttctgtcttggcatcttagcatccaggctcaggctctgccccttctccaggatggggtagccccgagtcgccctccccagtctgcacattccctgttgtccctgttcctgcagtggctcccggccccagggaggcccacctcactcccagcctgactcggtggctggcttccttcaggactttgcgcaagtcagttctgctcattgggtctcaatttccccatcccttggatgggagcaagagtctctgctgggcctgcctcgcaggggcctggtgagacccaaatgtgagtgtcatcatcaaagcccctcacagaagtggaggacggtgcccaagagtagcggtttggactgctgctgcctcccacccggagcctgccacttgggggagaaattggtataatgcttgcaaaaacaaacaaacaaaaggcaatgtcttctggttgtggttatttcctttcctgcttgcctccccagccccctttgagtctctttttggggtgccgtcctgtctgaacctgccggtgtgtgtctctggggccagggtcagggcgaggcccaggggtggacaggggccgtgtagcatgccccagcctccccaagctcctgctgtatgtcgtccatgtcacgccaattaaacacgcttcctggacttgtcctcgcc

SEQ ID NO: 158946 - DNA, 1092 bp, Homo sapiens
  Payload ID: 11099
  Gene Symbol: NCS1
  Gene Name: neuronal calcium sensor 1
  Uniprot ID: P62166
  ENST ID: ENST00000630865
  CDS Start-End: 171-689
gaccacagagaggggctgcagggacaggctgacagggagggtggtccacccttctgctgagagctgccccttttcagcctagctccccccacccccccacataggtggggcagccgagtgcctggggaagccagggccttccctgacatcccgtccccagggattgagagatggcaacgattaccgagaaggaggtccagcagtggtacaaaggcttcatcaaggactgccccagtgggcagctggatgcggcaggcttccagaagatctacaagcaattcttcccgttcggagaccccaccaagtttgccacatttgttttcaacgtctttgatgaaaacaaggacgggcgaattgagttctccgagttcatccaggcgctgtcggtgacctcacggggaaccctggatgagaagctacggtgggccttcaagctctacgacttggacaatgatggctacatcaccaggaatgagatgctggacattgtggatgccatttaccagatggtggggaataccgtggagctcccagaggaggagaacactcctgagaagagggtggaccggatctttgccatgatggataagaatgccgacgggaagctgaccctgcaggagttccaggagggttccaaggcagacccgtccattgtgcaggcgctgtccctctacgacgggctggtatagtcccaggctggagctggatgcctgggaaccactcacctccttctgtgccatgaggccacctcagccctgacaccaaccccgtgcgtccacccagccttcttccgcatccacacacagccggctgcccttgacccgggaggccccggctctcctctcccctgtcctgcacccatcccccgcctgaagccaccggctccaattgccagcaacctctgcttgtccggaaaacgacaacacgaaatggaaaaggctacagccctctgcataaaccaaggacttggctgcctcgcaggcagcctccgttcctcccgctctcttgcgcgtgtgcttttgttttttattttgaacagacgttttaaaagaaaaaaaaacaactaccttctgtcctagaagacacagactg

SEQ ID NO: 158947 - DNA, 6228 bp, Homo sapiens
  Payload ID: 11100
  Gene Symbol: NRCAM
  Gene Name: neuronal cell adhesion molecule
  Uniprot ID: Q92823
  ENST ID: ENST00000351718
  CDS Start-End: 429-3980
agccagaggggatagcttcgtcgagaacggaggacaccggcggtccagggtcctgggcagtcgcgccagagctgagcggagggcgcggcgcgagaacgaatctttgtgacattctctctcagcattctttatcccctgtttgctgaagacttcgacaaaagctggtcttagctgttggcattctcctgagaaaaggatagcttcagaaatcagaaaaacatttgggaggtgtctagcccagtggaccttctgaagagcaatgctaagaagacgtttggtttaaagaattaaaaggaagaacaacttaagagcttcttcaaagtttcccgcatgaaaattacttaaacgttgcacacaacgtttcacaaaatcttttgtgaaagaagaaaaggaaattcagtgtgtgagtctcagcaggagttaagctaatgcagcttaaaataatgccgaaaaagaagcgcttatctgcgggcagagtgcccctgattctcttcctgtgccagatgattagtgcactggaagtacctcttgatctggtacagcctccaaccatcacccaacagtctccaaaagattacattattgaccctcgggagaatattgtaatccagtgtgaagccaaagggaaaccgcccccaagcttttcctggacccgtaatgggactcattttgacatcgataaagaccctctggtcaccatgaagcctggcacaggaacgctcataattaacatcatgagcgaagggaaagctgagacctatgaaggagtctatcagtgtacagcaaggaacgaacgcggagctgcagtttctaataacattgttgtccgcccatccagatcaccattgtggaccaaagaaaaacttgaaccaatcacacttcaaagtggtcagtctttagtacttccctgcagacccccaattggattaccaccacctataatattttggatggataattcctttcaaagacttccacaaagtgagagagtttctcaaggtttgaatggggacctttatttttccaatgtcctcccagaggacacccgcgaagactatatctgttatgctagatttaatcatactcaaaccatacagcagaagcaacctatttctgtgaaggtgatttcagtggatgaattgaatgacactatagctgctaatttgagtgacactgagttttatggtgctaaatcaagtagagagaggccaccaacatttttaactccagaaggcaatgcaagtaacaaagaggaattaagaggaaatgtgctttcactggagtgcattgcagaaggactgcctaccccaattatttactgggcaaaggaagatggaatgctacccaaaaacaggacagtttataagaactttgagaaaaccttgcagatcattcatgtttcagaagcagactctggaaattaccaatgtatagcaaaaaacgcattaggagccatccaccataccatttctgttagagttaaagcggctccatactggatcacagcccctcaaaatcttgtgctgtccccaggagaggatgggaccttgatctgcagagctaatggcaaccccaaacccagaattagctggttaacaaatggagtcccaatagaaattgcccctgatgaccccagcagaaaaatagatggcgataccattattttttcaaatgttcaagaaagatcaagtgcagtctatcagtgcaatgcctctaatgaatatggatatttactggcaaacgcatttgtaaatgtgctggctgagccaccacgaatcctcacacctgcaaacacactctaccaggtcattgcaaacaggcctgctttactagactgtgccttctttgggtctcctctcccaaccatcgagtggtttaaaggagctaaaggaagtgctcttcatgaagatatttatgttttacatgaaaatggaactttggaaattcctgtggcccaaaaggacagtacaggaacttatacgtgtgttgcaaggaataaattagggatggcgaagaatgaagttcacttagaaatcaaagatcctacatggatcgttaaacagcccgaatatgcagttgtgcaaagagggagcatggtgtcctttgaatgcaaagtgaaacatgatcacaccttatccctcactgtcctgtggctgaaggacaacagggaactgcccagtgatgaaaggttcactgttgacaaggatcatctagtggtagctgatgtcagtgacgatgacagcgggacctacacgtgtgtggccaacaccactctggacagcgtctccgccagcgctgtgcttagcgttgttgatgtcccaaatcctccctttgacttagaactgacagatcaacttgacaaaagtgttcagctgtcatggaccccaggcgatgacaacaatagccccattacaaaattcatcatcgaatatgaagatgcaatgcacaagccagggctgtggcaccaccaaactgaagtttctggaacacagaccacagcccagctgaagctgtctccttacgtgaactactccttccgcgtgatggcagtgaacagcattgggaagagcttgcccagcgaggcgtctgagcagtatttgacgaaagcctcagaaccagataaaaaccccacagctgtggaaggactgggatcagagcctgataatttggtgattacgtggaagcccttgaatggtttcgaatctaatgggccaggccttcagtacaaagttagctggcgccagaaagatggtgatgatgaatggacatctgtggttgtggcaaatgtatccaaatatattgtctcaggcacgccaacctttgttccatacctgatcaaagttcaggccctgaatgacatggggtttgcccccgagccagctgtagtcatgggacattctggagaagacctcccaatggtggctcctgggaacgtgcgtgtgaatgtggtgaacagtaccttagccgaggtgcactgggacccagtacctctgaaaagcatccgaggacacctacaaggctatcggatttactattggaagacccagagttcatctaaaagaaacagacgtcacattgagaaaaagatcctcaccttccaaggcagcaagactcatggcatgttgccggggctagagccctttagccactacacactgaatgtccgagtggtcaatgggaaaggggagggcccagccagccctgacagagtctttaatactccagaaggagtccccagtgctccctcgtctttgaagattgtgaatccaacactggactctctcactttggaatgggatccaccgagccacccgaatggcattttgacagagtacaccttaaagtatcagccaattaacagcacacatgaattaggccctctggtagatttgaaaattcctgccaacaagacacggtggactttaaaaaatttaaatttcagcactcgatataagttttatttctatgcacaaacatcagcaggatcaggaagtcaaattacagaggaagcagtaacaactgtggatgaagcgatggcaagccggcaggtggatattgcaactcagggctggttcattggtctgatgtgtgctgttgctctccttatcttaattttgctgattgtttgcttcatcagaagaaacaagggtggtaaatatccagttaaagaaaaggaagatgcccatgctgaccctgaaatccagcctatgaaggaagatgatgggacatttggagaatacagtgatgcagaagaccacaagcctttgaaaaaaggaagtcgaactccttcagacaggactgtgaaaaaagaagatagtgacgacagcctagttgactatggagaaggggttaatggccagttcaatgaggatggctcctttattggacaatacagtggtaagaaagagaaagagccggctgaaggaaacgaaagctcagaggcaccttctcctgtcaacgccatgaattcctttgtttaatttttaagctctttgccaatattccatttctctagaatgtttatcctaagcacttgtttgtcagccctctcatactatgaacatatgggtagagagtatattttctgctgtatgttagtattatgagaatagttacagcaaaaacataactcagtcaaatgatatgttaatatgaactggaatgcaaagtgcatactttttcattcaaaatgggtattcttgatttcctcagaactgataaaaaataatgcaacatcaccaacagatcctgttatttcctctgcaggatacagttcaatatgatgcatgaaaaatgctccacatttaaaggacatacccgtgtatgttatgaaaacatggtttgatactttgtttatactaccctcagctgaacccctatatatgaattccgttttcattgtcaagaatgttactgtagtattctctagaacttcaatgtctttgtggacattgttgtgaaattggtgactatgtatagctgtcgttagtctttttgggagactgttaggaacagtttgtacagtatatacttgctaaatgagttcattatgacagtcacattgctgatgcttactgagaactattacctactcttggctcctgttactccgtaggcttcttaatcttccaggcattacagcagcacagtgttctactttttacatcatttctatgttcggttgtttttaggcataaacaatgtgtattgcagtgcatttcggcatttgtgccatactgaaagaatcaaaaacaaatcatccaaattaaatttcaaacattatttcagagaacacagggcaagacacatacagtgccttcagatattaagcattccacaacatcgtgcattctgtatcagctggtccagtccattctgggtcctagattactgtcattgtctaaaagtaacttttaaaaagcagagttcatgaaaactgcaatgctgggaaaagaaggaaacatgaaaataaaaataagacagtttattagaaatagcatttcctcataagcataaaaagaaaatctttgttgccaactgaagcacatgatgattttgtggtcctttatggtttctattacattcagtaagaaagatgtcaacatgctagaaaattaattttaaaactaagttattccaacactaaaagcatacaacagcatgccaacagtaatatattattctccaagactttacctatgtaagtgttcaaaactctgcagcattaaacaacgtgtatgcaaattgttatggatacatttcagaatctaagaaatcaggcaagtgcttaaaaggccaacggtccaagggattacatctgcagtttaaaaagtaaatatatattctatcgtattcataaacaatatctatcaaatgggttacctccaaatatgaaaatctataacaacctatggttgaaggaatgctcagtttcatttgccaataaattggtttctcataacttgcatcaagtttaattttaagtaaagctttttatatgtagatattttgttgaatttgtaaatacacttaaaatgtagatgctatatgcttataggtgttacatacaaataaacatgcaatgtttatgttgtactgtataagaggtaagctaattaatgcagtgaatgggattggaaagcatctacttaaatatctattgggttcccccctccccccaccttttttgctgtgaaactgaaatagtgaacttttctacgtattgacagcagatttttcgatgaaatcttcagagctttgcctatggggcacagtaggcctagtaacctggcatgtttgatatatgtaggtaaagcataatttaaagtaatcccaggtaaagatggccctaaatactttcatgtctctatattcatttttcacagatccacctgtctcttgaaaatataaaaagacaaaacaggtttgccttggcatcagagagcacaaagattaaaagttactttaaatttgccaatattttgggagaacaataaaactacattttttcctcttccatactggtagatgcgaaatttatctgtgcatgaaagggtcacttctgtaatagtgcaacagatttggtattaaaaattaaatgtggttttaaaagttcctctctcttttgtaatttatgttcccaattgagtgtgaatgtccaagtaatggtgtatgtaatggtacaggcaaatgtgactggatttccctcaaaaaagtaactattaaaca

SEQ ID NO: 158948 - DNA, 3900 bp, Homo sapiens
  Payload ID: 11100
  Gene Symbol: NRCAM
  Gene Name: neuronal cell adhesion molecule
  ENST ID: ENST00000379022
  CDS Start-End: 1-3900
atgccgaaaaagaagcgcttatctgcgggcagagtgcccctgattctcttcctgtgccagatgattagtgcactggaagtacctcttgatccaaaacttcttgaagacttggtacagcctccaaccatcacccaacagtctccaaaagattacattattgaccctcgggagaatattgtaatccagtgtgaagccaaagggaaaccgcccccaagcttttcctggacccgtaatgggactcattttgacatcgataaagaccctctggtcaccatgaagcctggcacaggaacgctcataattaacatcatgagcgaagggaaagctgagacctatgaaggagtctatcagtgtacagcaaggaacgaacgcggagctgcagtttctaataacattgttgtccgcccatccagatcaccattgtggaccaaagaaaaacttgaaccaatcacacttcaaagtggtcagtctttagtacttccctgcagacccccaattggattaccaccacctataatattttggatggataattcctttcaaagacttccacaaagtgagagagtttctcaaggtttgaatggggacctttatttttccaatgtcctcccagaggacacccgcgaagactatatctgttatgctagatttaatcatactcaaaccatacagcagaagcaacctatttctgtgaaggtgatttcagtggatgaattgaatgacactatagctgctaatttgagtgacactgagttttatggtgctaaatcaagtagagagaggccaccaacatttttaactccagaaggcaatgcaagtaacaaagaggaattaagaggaaatgtgctttcactggagtgcattgcagaaggactgcctaccccaattatttactgggcaaaggaagatggaatgctacccaaaaacaggacagtttataagaactttgagaaaaccttgcagatcattcatgtttcagaagcagactctggaaattaccaatgtatagcaaaaaacgcattaggagccatccaccataccatttctgttagagttaaagcggctccatactggatcacagcccctcaaaatcttgtgctgtccccaggagaggatgggaccttgatctgcagagctaatggcaaccccaaacccagaattagctggttaacaaatggagtcccaatagaaattgcccctgatgaccccagcagaaaaatagatggcgataccattattttttcaaatgttcaagaaagatcaagtgcagtctatcagtgcaatgcctctaatgaatatggatatttactggcaaacgcatttgtaaatgtgctggctgagccaccacgaatcctcacacctgcaaacacactctaccaggtcattgcaaacaggcctgctttactagactgtgccttctttgggtctcctctcccaaccatcgagtggtttaaaggagctaaaggaagtgctcttcatgaagatatttatgttttacatgaaaatggaactttggaaattcctgtggcccaaaaggacagtacaggaacttatacgtgtgttgcaaggaataaattagggatggcgaagaatgaagttcacttagaaatcaaagatcctacatggatcgttaaacagcccgaatatgcagttgtgcaaagagggagcatggtgtcctttgaatgcaaagtgaaacatgatcacaccttatccctcactgtcctgtggctgaaggacaacagggaactgcccagtgatgaaaggttcactgttgacaaggatcatctagtggtagctgatgtcagtgacgatgacagcgggacctacacgtgtgtggccaacaccactctggacagcgtctccgccagcgctgtgcttagcgttgttgctcctactccaactccagctcccgtttacgatgtcccaaatcctccctttgacttagaactgacagatcaacttgacaaaagtgttcagctgtcatggaccccaggcgatgacaacaatagccccattacaagaattcatcatgaatatgaagatgcaatgcacaagccagggctgtggcaccaccaaactgaagtttctggaacacagaccacagcccagctgaagctgtctccttacgtgaactactccttccgcgtgatggcagtgaacagcattgggaagagcttgcccagcgaggcgtctgagcagtatttgacgaaagcctcagaaccagataaaaaccccacagctgtggaaggactgggatcagagcctgataatttggtgattacgtggaagcccttgaatggtttcgaatctaatgggccaggccttcagtacaaagttagctggcgccagaaagatggtgatgatgaatggacatctgtggttgtggcaaatgtatccaaatatattgtctcaggcacgccaacctttgttccatacctgatcaaagttcaggccctgaatgacatggggtttgcccccgagccagctgtagtcatgggacattctggagaagacctcccaatggtggctcctgggaacgtgcgtgtgaatgtggtgaacagtaccttagccgaggtgcactgggacccagtacctctgaaaagcatccgaggacacctacaaggctatcggatttactattggaagacccagagttcatctaaaagaaacagacgtcacattgagaaaaagatcctcaccttccaaggcagcaagactcatggcatgttgccggggctagagccctttagccactacacactgaatgtccgagtggtcaatgggaaaggggagggcccagccagccctgacagagtctttaatactccagaaggagtccccagtgctccctcgtctttgaagattgtgaatccaacactggactctctcactttggaatgggatccaccgagccacccgaatggcattttgacagagtacaccttaaagtatcagccaattaacagcacacatgaattaggccctctggtagatttgaaaattcctgccaacaagacacggtggactttaaaaaatttaaatttcagcactcgatataagttttatttctatgcacaaacatcagcaggatcaggaagtcaaattacagaggaagcagtaacaactgtggatgaagctggtattcttccacctgatgtaggtgcaggcaaagttcaagcagtaaatcccaggatcagcaatcttactgctgcagctgctgagacctatgccaatatcagttgggaatatgagggaccagagcatgtgaacttttatgttgaatatggtgtagcaggcagcaaagaagaatggagaaaagaaattgtaaatggttctcggagcttctttgggttaaagggtctaatgccaggaacagcatacaaagttcgagttggtgctgtgggggactctggttttgtgagttcagaggatgtgtttgagacaggcccagcgatggcaagccggcaggtggatattgcaactcagggctggttcattggtctgatgtgtgctgttgctctccttatcttaattttgctgattgtttgcttcatcagaagaaacaagggtggtaaatatccagttaaagaaaaggaagatgcccatgctgaccctgaaatccagcctatgaaggaagatgatgggacatttggagaatacagtgatgcagaagaccacaagcctttgaaaaaaggaagtcgaactccttcagacaggactgtgaaaaaagaagatagtgacgacagcctagttgactatggagaaggggttaatggccagttcaatgaggatggctcctttattggacaatacagtggtaagaaagagaaagagccggctgaaggaaacgaaagctcagaggcaccttctcctgtcaacgccatgaattcctttgtttaa

SEQ ID NO: 158949 - DNA, 5782 bp, Homo sapiens
  Payload ID: 11100
  Gene Symbol: NRCAM
  Gene Name: neuronal cell adhesion molecule
  Uniprot ID: Q92823
  ENST ID: ENST00000379024
  CDS Start-End: 411-3989
cgtcgagaacggaggacaccggcggtccagggtcctgggcagtcgcgccagagctgagcggagggcgcggcgcgagaacgaatctttgtgacattctctctcagcattctttatcccctgtttgctgaagacttcgacaaaagctggtcttagctgttggcattctcctgagaaaaggatagcttcagaaatcagaaaaacatttgggaggtgtctagcccagtggaccttctgaagagcaatgctaagaagacgtttggtttaaagaattaaaaggaagaacaacttaagagcttcttcaaagtttcccgcatgaaaattacttaaacgttgcacacaacgtttcacaaaatcttttgtgaaagaagaaaaggaaattcagtgtgtgagtctcagcaggagttaagctaatgcagcttaaaataatgccgaaaaagaagcgcttatctgcgggcagagtgcccctgattctcttcctgtgccagatgattagtgcactggaagtacctcttgatccaaaacttcttgaagacttggtacagcctccaaccatcacccaacagtctccaaaagattacattattgaccctcgggagaatattgtaatccagtgtgaagccaaagggaaaccgcccccaagcttttcctggacccgtaatgggactcattttgacatcgataaagaccctctggtcaccatgaagcctggcacaggaacgctcataattaacatcatgagcgaagggaaagctgagacctatgaaggagtctatcagtgtacagcaaggaacgaacgcggagctgcagtttctaataacattgttgtccgcccatccagatcaccattgtggaccaaagaaaaacttgaaccaatcacacttcaaagtggtcagtctttagtacttccctgcagacccccaattggattaccaccacctataatattttggatggataattcctttcaaagacttccacaaagtgagagagtttctcaaggtttgaatggggacctttatttttccaatgtcctcccagaggacacccgcgaagactatatctgttatgctagatttaatcatactcaaaccatacagcagaagcaacctatttctgtgaaggtgatttcagctaaatcaagtagagagaggccaccaacatttttaactccagaaggcaatgcaagtaacaaagaggaattaagaggaaatgtgctttcactggagtgcattgcagaaggactgcctaccccaattatttactgggcaaaggaagatggaatgctacccaaaaacaggacagtttataagaactttgagaaaaccttgcagatcattcatgtttcagaagcagactctggaaattaccaatgtatagcaaaaaacgcattaggagccatccaccataccatttctgttagagttaaagcggctccatactggatcacagcccctcaaaatcttgtgctgtccccaggagaggatgggaccttgatctgcagagctaatggcaaccccaaacccagaattagctggttaacaaatggagtcccaatagaaattgcccctgatgaccccagcagaaaaatagatggcgataccattattttttcaaatgttcaagaaagatcaagtgcagtctatcagtgcaatgcctctaatgaatatggatatttactggcaaacgcatttgtaaatgtgctggctgagccaccacgaatcctcacacctgcaaacacactctaccaggtcattgcaaacaggcctgctttactagactgtgccttctttgggtctcctctcccaaccatcgagtggtttaaaggagctaaaggaagtgctcttcatgaagatatttatgttttacatgaaaatggaactttggaaattcctgtggcccaaaaggacagtacaggaacttatacgtgtgttgcaaggaataaattagggatggcgaagaatgaagttcacttagaaatcaaagatcctacatggatcgttaaacagcccgaatatgcagttgtgcaaagagggagcatggtgtcctttgaatgcaaagtgaaacatgatcacaccttatccctcactgtcctgtggctgaaggacaacagggaactgcccagtgatgaaaggttcactgttgacaaggatcatctagtggtagctgatgtcagtgacgatgacagcgggacctacacgtgtgtggccaacaccactctggacagcgtctccgccagcgctgtgcttagcgttgttgctcctactccaactccagctcccgtttacgatgtcccaaatcctccctttgacttagaactgacagatcaacttgacaaaagtgttcagctgtcatggaccccaggcgatgacaacaatagccccattacaaaattcatcatcgaatatgaagatgcaatgcacaagccagggctgtggcaccaccaaactgaagtttctggaacacagaccacagcccagctgaagctgtctccttacgtgaactactccttccgcgtgatggcagtgaacagcattgggaagagcttgcccagcgaggcgtctgagcagtatttgacgaaagcctcagaaccagataaaaaccccacagctgtggaaggactgggatcagagcctgataatttggtgattacgtggaagcccttgaatggtttcgaatctaatgggccaggccttcagtacaaagttagctggcgccagaaagatggtgatgatgaatggacatctgtggttgtggcaaatgtatccaaatatattgtctcaggcacgccaacctttgttccatacctgatcaaagttcaggccctgaatgacatggggtttgcccccgagccagctgtagtcatgggacattctggagaagacctcccaatggtggctcctgggaacgtgcgtgtgaatgtggtgaacagtaccttagccgaggtgcactgggacccagtacctctgaaaagcatccgaggacacctacaaggctatcggatttactattggaagacccagagttcatctaaaagaaacagacgtcacattgagaaaaagatcctcaccttccaaggcagcaagactcatggcatgttgccggggctagagccctttagccactacacactgaatgtccgagtggtcaatgggaaaggggagggcccagccagccctgacagagtctttaatactccagaaggagtccccagtgctccctcgtctttgaagattgtgaatccaacactggactctctcactttggaatgggatccaccgagccacccgaatggcattttgacagagtacaccttaaagtatcagccaattaacagcacacatgaattaggccctctggtagatttgaaaattcctgccaacaagacacggtggactttaaaaaatttaaatttcagcactcgatataagttttatttctatgcacaaacatcagcaggatcaggaagtcaaattacagaggaagcagtaacaactgtggatgaagctggtattcttccacctgatgtaggtgcaggcaaagcgatggcaagccggcaggtggatattgcaactcagggctggttcattggtctgatgtgtgctgttgctctccttatcttaattttgctgattgtttgcttcatcagaagaaacaagggtggtaaatatccagttaaagaaaaggaagatgcccatgctgaccctgaaatccagcctatgaaggaagatgatgggacatttggagaatacagtgatgcagaagaccacaagcctttgaaaaaaggaagtcgaactccttcagacaggactgtgaaaaaagaagatagtgacgacagcctagttgactatggagaaggggttaatggccagttcaatgaggatggctcctttattggacaatacagtggtaagaaagagaaagagccggctgaaggaaacgaaagctcagaggcaccttctcctgtcaacgccatgaattcctttgtttaatttttaagctctttgccaatattccatttctctagaatgtttatcctaagcacttgtttgtcagccctctcatactatgaacatatgggtagagagtatattttctgctgtatgttagtattatgagaatagttacagcaaaaacataactcagtcaaatgatatgttaatatgaactggaatgcaaagtgcatactttttcattcaaaatgggtattcttgatttcctcagaactgataaaaaataatgcaacatcaccaacagatcctgttatttcctctgcaggatacagttcaatatgatgcatgaaaaatgctccacatttaaaggacatacccgtgtatgttatgaaaacatggtttgatactttgtttatactaccctcagctgaacccctatatatgaattccgttttcattgtcaagaatgttactgtagtattctctagaacttcaatgtctttgtggacattgttgtgaaattggtgactatgtatagctgtcgttagtctttttgggagactgttaggaacagtttgtacagtatatacttgctaaatgagttcattatgacagtcacattgctgatgcttactgagaactattacctactcttggctcctgttactccgtaggcttcttaatcttccaggcattacagcagcacagtgttctactttttacatcatttctatgttcggttgtttttaggcataaacaatgtgtattgcagtgcatttcggcatttgtgccatactgaaagaatcaaaaacaaatcatccaaattaaatttcaaacattatttcagagaacacagggcaagacacatacagtgccttcagatattaagcattccacaacatcgtgcattctgtatcagctggtccagtccattctgggtcctagattactgtcattgtctaaaagtaacttttaaaaagcagagttcatgaaaactgcaatgctgggaaaagaaggaaacatgaaaataaaaataagacagtttattagaaatagcatttcctcataagcataaaaagaaaatctttgttgccaactgaagcacatgatgattttgtggtcctttatggtttctattacattcagtaagaaagatgtcaacatgctagaaaattaattttaaaactaagttattccaacactaaaagcatacaacagcatgccaacagtaatatattattctccaagactttacctatgtaagtgttcaaaactctgcagcattaaacaacgtgtatgcaaattgttatggatacatttcagaatctaagaaatcaggcaagtgcttaaaaggccaacggtccaagggattacatctgcagtttaaaaagtaaatatatattctatcgtattcataaacaatatctatcaaatgggttacctccaaatatgaaaatctataacaacctatggttgaaggaatgctcagtttcatttgccaataaattggtttctcataacttgcatcaagtttaattttaagtaaagctttttatatgtagatattttgttgaatttgtaaatacacttaaaatgtagatgctatatgcttataggtgttacatacaaataaacatgcaatgtttatgttgtactgtataagaggtaagctaattaatgcagtgaatgggattggaaagcatctacttaaatatctattgggttcccccctccccccaccttttttgctgtgaaactgaaatagtgaacttttctacgtattgacagcagatttttcgatgaaatcttcagagctttgcctatggggcaca

SEQ ID NO: 158950 - DNA, 6685 bp, Homo sapiens
  Payload ID: 11100
  Gene Symbol: NRCAM
  Gene Name: neuronal cell adhesion molecule
  Uniprot ID: Q92823
  ENST ID: ENST00000379028
  CDS Start-End: 487-4401
agtccgagcctcagacgcgcgggcgcgggggacggcgcaggggccgcctggctggagcagccagaggggatagcttcgtcgagaacggaggacaccggcggtccagggtcctgggcagtcgcgccagagctgagcggagggcgcggcgcgagaacgaatctttgtgacattctctctcagcattctttatcccctgtttgctgaagacttcgacaaaagctggtcttagctgttggcattctcctgagaaaaggatagcttcagaaatcagaaaaacatttgggaggtgtctagcccagtggaccttctgaagagcaatgctaagaagacgtttggtttaaagaattaaaaggaagaacaacttaagagcttcttcaaagtttcccgcatgaaaattacttaaacgttgcacacaacgtttcacaaaatcttttgtgaaagaagaaaaggaaattcagtgtgtgagtctcagcaggagttaagctaatgcagcttaaaataatgccgaaaaagaagcgcttatctgcgggcagagtgcccctgattctcttcctgtgccagatgattagtgcactggaagtacctcttgatccaaaacttcttgaagacttggtacagcctccaaccatcacccaacagtctccaaaagattacattattgaccctcgggagaatattgtaatccagtgtgaagccaaagggaaaccgcccccaagcttttcctggacccgtaatgggactcattttgacatcgataaagaccctctggtcaccatgaagcctggcacaggaacgctcataattaacatcatgagcgaagggaaagctgagacctatgaaggagtctatcagtgtacagcaaggaacgaacgcggagctgcagtttctaataacattgttgtccgcccatccagatcaccattgtggaccaaagaaaaacttgaaccaatcacacttcaaagtggtcagtctttagtacttccctgcagacccccaattggattaccaccacctataatattttggatggataattcctttcaaagacttccacaaagtgagagagtttctcaaggtttgaatggggacctttatttttccaatgtcctcccagaggacacccgcgaagactatatctgttatgctagatttaatcatactcaaaccatacagcagaagcaacctatttctgtgaaggtgatttcagtggatgaattgaatgacactatagctgctaatttgagtgacactgagttttatggtgctaaatcaagtagagagaggccaccaacatttttaactccagaaggcaatgcaagtaacaaagaggaattaagaggaaatgtgctttcactggagtgcattgcagaaggactgcctaccccaattatttactgggcaaaggaagatggaatgctacccaaaaacaggacagtttataagaactttgagaaaaccttgcagatcattcatgtttcagaagcagactctggaaattaccaatgtatagcaaaaaacgcattaggagccatccaccataccatttctgttagagttaaagcggctccatactggatcacagcccctcaaaatcttgtgctgtccccaggagaggatgggaccttgatctgcagagctaatggcaaccccaaacccagaattagctggttaacaaatggagtcccaatagaaattgcccctgatgaccccagcagaaaaatagatggcgataccattattttttcaaatgttcaagaaagatcaagtgcagtctatcagtgcaatgcctctaatgaatatggatatttactggcaaacgcatttgtaaatgtgctggctgagccaccacgaatcctcacacctgcaaacacactctaccaggtcattgcaaacaggcctgctttactagactgtgccttctttgggtctcctctcccaaccatcgagtggtttaaaggagctaaaggaagtgctcttcatgaagatatttatgttttacatgaaaatggaactttggaaattcctgtggcccaaaaggacagtacaggaacttatacgtgtgttgcaaggaataaattagggatggcgaagaatgaagttcacttagaaatcaaagatcctacatggatcgttaaacagcccgaatatgcagttgtgcaaagagggagcatggtgtcctttgaatgcaaagtgaaacatgatcacaccttatccctcactgtcctgtggctgaaggacaacagggaactgcccagtgatgaaaggttcactgttgacaaggatcatctagtggtagctgatgtcagtgacgatgacagcgggacctacacgtgtgtggccaacaccactctggacagcgtctccgccagcgctgtgcttagcgttgttgctcctactccaactccagctcccgtttacgatgtcccaaatcctccctttgacttagaactgacagatcaacttgacaaaagtgttcagctgtcatggaccccaggcgatgacaacaatagccccattacaaaattcatcatcgaatatgaagatgcaatgcacaagccagggctgtggcaccaccaaactgaagtttctggaacacagaccacagcccagctgaagctgtctccttacgtgaactactccttccgcgtgatggcagtgaacagcattgggaagagcttgcccagcgaggcgtctgagcagtatttgacgaaagcctcagaaccagataaaaaccccacagctgtggaaggactgggatcagagcctgataatttggtgattacgtggaagcccttgaatggtttcgaatctaatgggccaggccttcagtacaaagttagctggcgccagaaagatggtgatgatgaatggacatctgtggttgtggcaaatgtatccaaatatattgtctcaggcacgccaacctttgttccatacctgatcaaagttcaggccctgaatgacatggggtttgcccccgagccagctgtagtcatgggacattctggagaagacctcccaatggtggctcctgggaacgtgcgtgtgaatgtggtgaacagtaccttagccgaggtgcactgggacccagtacctctgaaaagcatccgaggacacctacaaggctatcggatttactattggaagacccagagttcatctaaaagaaacagacgtcacattgagaaaaagatcctcaccttccaaggcagcaagactcatggcatgttgccggggctagagccctttagccactacacactgaatgtccgagtggtcaatgggaaaggggagggcccagccagccctgacagagtctttaatactccagaaggagtccccagtgctccctcgtctttgaagattgtgaatccaacactggactctctcactttggaatgggatccaccgagccacccgaatggcattttgacagagtacaccttaaagtatcagccaattaacagcacacatgaattaggccctctggtagatttgaaaattcctgccaacaagacacggtggactttaaaaaatttaaatttcagcactcgatataagttttatttctatgcacaaacatcagcaggatcaggaagtcaaattacagaggaagcagtaacaactgtggatgaagctggtattcttccacctgatgtaggtgcaggcaaagttcaagcagtaaatcccaggatcagcaatcttactgctgcagctgctgagacctatgccaatatcagttgggaatatgagggaccagagcatgtgaacttttatgttgaatatggtgtagcaggcagcaaagaagaatggagaaaagaaattgtaaatggttctcggagcttctttgggttaaagggtctaatgccaggaacagcatacaaagttcgagttggtgctgtgggggactctggttttgtgagttcagaggatgtgtttgagacaggcccagcgatggcaagccggcaggtggatattgcaactcagggctggttcattggtctgatgtgtgctgttgctctccttatcttaattttgctgattgtttgcttcatcagaagaaacaagggtggtaaatatccagttaaagaaaaggaagatgcccatgctgaccctgaaatccagcctatgaaggaagatgatgggacatttggagaatacagtgatgcagaagaccacaagcctttgaaaaaaggaagtcgaactccttcagacaggactgtgaaaaaagaagatagtgacgacagcctagttgactatggagaaggggttaatggccagttcaatgaggatggctcctttattggacaatacagtggtaagaaagagaaagagccggctgaaggaaacgaaagctcagaggcaccttctcctgtcaacgccatgaattcctttgtttaatttttaagctctttgccaatattccatttctctagaatgtttatcctaagcacttgtttgtcagccctctcatactatgaacatatgggtagagagtatattttctgctgtatgttagtattatgagaatagttacagcaaaaacataactcagtcaaatgatatgttaatatgaactggaatgcaaagtgcatactttttcattcaaaatgggtattcttgatttcctcagaactgataaaaaataatgcaacatcaccaacagatcctgttatttcctctgcaggatacagttcaatatgatgcatgaaaaatgctccacatttaaaggacatacccgtgtatgttatgaaaacatggtttgatactttgtttatactaccctcagctgaacccctatatatgaattccgttttcattgtcaagaatgttactgtagtattctctagaacttcaatgtctttgtggacattgttgtgaaattggtgactatgtatagctgtcgttagtctttttgggagactgttaggaacagtttgtacagtatatacttgctaaatgagttcattatgacagtcacattgctgatgcttactgagaactattacctactcttggctcctgttactccgtaggcttcttaatcttccaggcattacagcagcacagtgttctactttttacatcatttctatgttcggttgtttttaggcataaacaatgtgtattgcagtgcatttcggcatttgtgccatactgaaagaatcaaaaacaaatcatccaaattaaatttcaaacattatttcagagaacacagggcaagacacatacagtgccttcagatattaagcattccacaacatcgtgcattctgtatcagctggtccagtccattctgggtcctagattactgtcattgtctaaaagtaacttttaaaaagcagagttcatgaaaactgcaatgctgggaaaagaaggaaacatgaaaataaaaataagacagtttattagaaatagcatttcctcataagcataaaaagaaaatctttgttgccaactgaagcacatgatgattttgtggtcctttatggtttctattacattcagtaagaaagatgtcaacatgctagaaaattaattttaaaactaagttattccaacactaaaagcatacaacagcatgccaacagtaatatattattctccaagactttacctatgtaagtgttcaaaactctgcagcattaaacaacgtgtatgcaaattgttatggatacatttcagaatctaagaaatcaggcaagtgcttaaaaggccaacggtccaagggattacatctgcagtttaaaaagtaaatatatattctatcgtattcataaacaatatctatcaaatgggttacctccaaatatgaaaatctataacaacctatggttgaaggaatgctcagtttcatttgccaataaattggtttctcataacttgcatcaagtttaattttaagtaaagctttttatatgtagatattttgttgaatttgtaaatacacttaaaatgtagatgctatatgcttataggtgttacatacaaataaacatgcaatgtttatgttgtactgtataagaggtaagctaattaatgcagtgaatgggattggaaagcatctacttaaatatctattgggttcccccctccccccaccttttttgctgtgaaactgaaatagtgaacttttctacgtattgacagcagatttttcgatgaaatcttcagagctttgcctatggggcacagtaggcctagtaacctggcatgtttgatatatgtaggtaaagcataatttaaagtaatcccaggtaaagatggccctaaatactttcatgtctctatattcatttttcacagatccacctgtctcttgaaaatataaaaagacaaaacaggtttgccttggcatcagagagcacaaagattaaaagttactttaaatttgccaatattttgggagaacaataaaactacattttttcctcttccatactggtagatgcgaaatttatctgtgcatgaaagggtcacttctgtaatagtgcaacagatttggtattaaaaattaaatgtggttttaaaagttcctctctcttttgtaatttatgttcccaattgagtgtgaatgtccaagtaatggtgtatgtaatggtacaggcaaatgtgactggatttccctcaaaaaagtaactattaaacagtcttgatctctttgtgacttttaactttttcaaac

SEQ ID NO: 158951 - DNA, 1594 bp, Homo sapiens
  Payload ID: 11100
  Gene Symbol: NRCAM
  Gene Name: neuronal cell adhesion molecule
  ENST ID: ENST00000417701
  CDS Start-End: 301-1594
gattttccatgggcaggagccagaggacgggctggaccattgcttcgtcctcctctaacagaatctacactagagacgatttgtggctaatggtgcagtttaacttaaaacttctgaggagaacccccatcttcagttatcgtagttcatgacctcccagcagtatgaggatttattaactcatgtctctttaatttcccgcatgaaaattacttaaacgttgcacacaacgtttcacaaaatcttttgtgaaagaagaaaaggaaattcagtgtgtgagtctcagcaggagttaagctaatgcagcttaaaataatgccgaaaaagaagcgcttatctgcgggcagagtgcccctgattctcttcctgtgccagatgattagtgcactggaagtacctcttgatctggtacagcctccaaccatcacccaacagtctccaaaagattacattattgaccctcgggagaatattgtaatccagtgtgaagccaaagggaaaccgcccccaagcttttcctggacccgtaatgggactcattttgacatcgataaagaccctctggtcaccatgaagcctggcacaggaacgctcataattaacatcatgagcgaagggaaagctgagacctatgaaggagtctatcagtgtacagcaaggaacgaacgcggagctgcagtttctaataacattgttgtccgcccatccagatcaccattgtggaccaaagaaaaacttgaaccaatcacacttcaaagtggtcagtctttagtacttccctgcagacccccaattggattaccaccacctataatattttggatggataattcctttcaaagacttccacaaagtgagagagtttctcaaggtttgaatggggacctttatttttccaatgtcctcccagaggacacccgcgaagactatatctgttatgctagatttaatcatactcaaaccatacagcagaagcaacctatttctgtgaaggtgatttcagtggatgaattgaatgacactatagctgctaatttgagtgacactgagttttatggtgctaaatcaagtagagagaggccaccaacatttttaactccagaaggcaatgcaagtaacaaagaggaattaagaggaaatgtgctttcactggagtgcattgcagaaggactgcctaccccaattatttactgggcaaaggaagatggaatgctacccaaaaacaggacagtttataagaactttgagaaaaccttgcagatcattcatgtttcagaagcagactctggaaattaccaatgtatagcaaaaaacgcattaggagccatccaccataccatttctgttagagttaaagcggctccatactggatcacagcccctcaaaatcttgtgctgtccccaggagaggatgggaccttgatctgcagagctaatggcaaccccaaacccagaattagctggttaacaaatggagtcccaatagaaattgcccctgatgaccccagcagaaaaatagatggcgataccattattttttcaaatgttcaagaaagatcaagtgcagtctatcagtgcaatgcctctaatgaat

SEQ ID NO: 158952 - DNA, 595 bp, Homo sapiens
  Payload ID: 11100
  Gene Symbol: NRCAM
  Gene Name: neuronal cell adhesion molecule
  ENST ID: ENST00000442580
  CDS Start-End: 242-595
actttgtttaaaatttccctttgctactgggaggaaatggaaagcagtaagataacttcatttgtaagagcaatgctaagaagacgtttggtttaaagaattaaaaggaagaacaacttaagagcttcttcaaagtttcccgcatgaaaattacttaaacgttgcacacaacgtttcacaaaatcttttgtgaaagaagaaaaggaaattcagtgtgtgagtctcagcaggagttaagctaatgcagcttaaaataatgccgaaaaagaagcgcttatctgcgggcagagtgcccctgattctcttcctgtgccagatgattagtgcactggaagtacctcttgatccaaaacttcttgaagacttggtacagcctccaaccatcacccaacagtctccaaaagattacattattgaccctcgggagaatattgtaatccagtgtgaagccaaagggaaaccgcccccaagcttttcctggacccgtaatgggactcattttgacatcgataaagaccctctggtcaccatgaagcctggcacaggaacgctcataattaacatcatgagcgaagggaaagctgagacctatgaa

SEQ ID NO: 158953 - DNA, 562 bp, Homo sapiens
  Payload ID: 11100
  Gene Symbol: NRCAM
  Gene Name: neuronal cell adhesion molecule
  ENST ID: ENST00000418239
  CDS Start-End: 380-562
acacgcgctcgcaggctgacggaggttggcggtggggcggccgctcaggaatctttgtgacattctctctcagcattctttatcccctgtttgctgaagacttcgacaaaagctggtcttagctgttggcattctcctgagaaaaggatagcttcagaaatcagaaaaacatttgggaggtgtctagcccagtggaccttctgaagagcaatgctaagaagacgtttggtttaaagaattaaaaggaagaacaacttaagagcttcttcaaagtttcccgcatgaaaattacttaaacgttgcacacaacgtttcacaaaatcttttgtgaaagaagaaaaggaaattcagtgtgtgagtctcagcaggagttaagctaatgcagcttaaaataatgccgaaaaagaagcgcttatctgcgggcagagtgcccctgattctcttcctgtgccagatgattagtgcactggaagtacctcttgatccaaaacttcttgaagacttggtacagcctccaaccatcacccaacagtctccaaaagattacattattgaccctcgg

SEQ ID NO: 158954 - DNA, 583 bp, Homo sapiens
  Payload ID: 11100
  Gene Symbol: NRCAM
  Gene Name: neuronal cell adhesion molecule
  ENST ID: ENST00000419936
  CDS Start-End: 266-583
atttgcaaaggaaacattgaggctgacgagaggagagttggagactgcagaacttgggagctgtccactgctctgcctttgtcacagcccagagcaatgctaagaagacgtttggtttaaagaattaaaaggaagaacaacttaagagcttcttcaaagtttcccgcatgaaaattacttaaacgttgcacacaacgtttcacaaaatcttttgtgaaagaagaaaaggaaattcagtgtgtgagtctcagcaggagttaagctaatgcagcttaaaataatgccgaaaaagaagcgcttatctgcgggcagagtgcccctgattctcttcctgtgccagatgattagtgcactggaagtacctcttgatctggtacagcctccaaccatcacccaacagtctccaaaagattacattattgaccctcgggagaatattgtaatccagtgtgaagccaaagggaaaccgcccccaagcttttcctggacccgtaatgggactcattttgacatcgataaagaccctctggtcaccatgaagcctggcacaggaacgctcataattaacatcatgagcgaaggg

SEQ ID NO: 158955 - DNA, 569 bp, Homo sapiens
  Payload ID: 11100
  Gene Symbol: NRCAM
  Gene Name: neuronal cell adhesion molecule
  ENST ID: ENST00000445634
  CDS Start-End: 1-569
ctggtattcttccacctgatgtaggtgcaggcaaagttcaagcagtaaatcccaggatcagcaatcttactgctgcagctgctgagacctatgccaatatcagttgggaatatgagggaccagagcatgtgaacttttatgttgaatatggtgtagcaggcacgatggcaagccggcaggtggatattgcaactcagggctggttcattggtctgatgtgtgctgttgctctccttatcttaattttgctgattgtttgcttcatcagaagaaacaagggtggtaaatatccagttaaagaaaaggaagatgcccatgctgaccctgaaatccagcctatgaaggaagatgatgggacatttggagaatacagtgatgcagaagaccacaagcctttgaaaaaaggaagtcgaactccttcagacaggactgtgaaaaaagaagatagtgacgacagcctagttgactatggagaaggggttaatggccagttcaatgaggatggctcctttattggacaatacagtggtaagaaagagaaagagccggctgaaggaaacgaaagctca

SEQ ID NO: 158956 - DNA, 3915 bp, Homo sapiens
  Payload ID: 11100
  Gene Symbol: NRCAM
  Gene Name: neuronal cell adhesion molecule
  Uniprot ID: Q92823
  ENST ID: ENST00000425651
  CDS Start-End: 1-3915
atgcagcttaaaataatgccgaaaaagaagcgcttatctgcgggcagagtgcccctgattctcttcctgtgccagatgattagtgcactggaagtacctcttgatccaaaacttcttgaagacttggtacagcctccaaccatcacccaacagtctccaaaagattacattattgaccctcgggagaatattgtaatccagtgtgaagccaaagggaaaccgcccccaagcttttcctggacccgtaatgggactcattttgacatcgataaagaccctctggtcaccatgaagcctggcacaggaacgctcataattaacatcatgagcgaagggaaagctgagacctatgaaggagtctatcagtgtacagcaaggaacgaacgcggagctgcagtttctaataacattgttgtccgcccatccagatcaccattgtggaccaaagaaaaacttgaaccaatcacacttcaaagtggtcagtctttagtacttccctgcagacccccaattggattaccaccacctataatattttggatggataattcctttcaaagacttccacaaagtgagagagtttctcaaggtttgaatggggacctttatttttccaatgtcctcccagaggacacccgcgaagactatatctgttatgctagatttaatcatactcaaaccatacagcagaagcaacctatttctgtgaaggtgatttcagtggatgaattgaatgacactatagctgctaatttgagtgacactgagttttatggtgctaaatcaagtagagagaggccaccaacatttttaactccagaaggcaatgcaagtaacaaagaggaattaagaggaaatgtgctttcactggagtgcattgcagaaggactgcctaccccaattatttactgggcaaaggaagatggaatgctacccaaaaacaggacagtttataagaactttgagaaaaccttgcagatcattcatgtttcagaagcagactctggaaattaccaatgtatagcaaaaaacgcattaggagccatccaccataccatttctgttagagttaaagcggctccatactggatcacagcccctcaaaatcttgtgctgtccccaggagaggatgggaccttgatctgcagagctaatggcaaccccaaacccagaattagctggttaacaaatggagtcccaatagaaattgcccctgatgaccccagcagaaaaatagatggcgataccattattttttcaaatgttcaagaaagatcaagtgcagtctatcagtgcaatgcctctaatgaatatggatatttactggcaaacgcatttgtaaatgtgctggctgagccaccacgaatcctcacacctgcaaacacactctaccaggtcattgcaaacaggcctgctttactagactgtgccttctttgggtctcctctcccaaccatcgagtggtttaaaggagctaaaggaagtgctcttcatgaagatatttatgttttacatgaaaatggaactttggaaattcctgtggcccaaaaggacagtacaggaacttatacgtgtgttgcaaggaataaattagggatggcgaagaatgaagttcacttagaaatcaaagatcctacatggatcgttaaacagcccgaatatgcagttgtgcaaagagggagcatggtgtcctttgaatgcaaagtgaaacatgatcacaccttatccctcactgtcctgtggctgaaggacaacagggaactgcccagtgatgaaaggttcactgttgacaaggatcatctagtggtagctgatgtcagtgacgatgacagcgggacctacacgtgtgtggccaacaccactctggacagcgtctccgccagcgctgtgcttagcgttgttgctcctactccaactccagctcccgtttacgatgtcccaaatcctccctttgacttagaactgacagatcaacttgacaaaagtgttcagctgtcatggaccccaggcgatgacaacaatagccccattacaaaattcatcatcgaatatgaagatgcaatgcacaagccagggctgtggcaccaccaaactgaagtttctggaacacagaccacagcccagctgaagctgtctccttacgtgaactactccttccgcgtgatggcagtgaacagcattgggaagagcttgcccagcgaggcgtctgagcagtatttgacgaaagcctcagaaccagataaaaaccccacagctgtggaaggactgggatcagagcctgataatttggtgattacgtggaagcccttgaatggtttcgaatctaatgggccaggccttcagtacaaagttagctggcgccagaaagatggtgatgatgaatggacatctgtggttgtggcaaatgtatccaaatatattgtctcaggcacgccaacctttgttccatacctgatcaaagttcaggccctgaatgacatggggtttgcccccgagccagctgtagtcatgggacattctggagaagacctcccaatggtggctcctgggaacgtgcgtgtgaatgtggtgaacagtaccttagccgaggtgcactgggacccagtacctctgaaaagcatccgaggacacctacaaggctatcggatttactattggaagacccagagttcatctaaaagaaacagacgtcacattgagaaaaagatcctcaccttccaaggcagcaagactcatggcatgttgccggggctagagccctttagccactacacactgaatgtccgagtggtcaatgggaaaggggagggcccagccagccctgacagagtctttaatactccagaaggagtccccagtgctccctcgtctttgaagattgtgaatccaacactggactctctcactttggaatgggatccaccgagccacccgaatggcattttgacagagtacaccttaaagtatcagccaattaacagcacacatgaattaggccctctggtagatttgaaaattcctgccaacaagacacggtggactttaaaaaatttaaatttcagcactcgatataagttttatttctatgcacaaacatcagcaggatcaggaagtcaaattacagaggaagcagtaacaactgtggatgaagctggtattcttccacctgatgtaggtgcaggcaaagttcaagcagtaaatcccaggatcagcaatcttactgctgcagctgctgagacctatgccaatatcagttgggaatatgagggaccagagcatgtgaacttttatgttgaatatggtgtagcaggcagcaaagaagaatggagaaaagaaattgtaaatggttctcggagcttctttgggttaaagggtctaatgccaggaacagcatacaaagttcgagttggtgctgtgggggactctggttttgtgagttcagaggatgtgtttgagacaggcccagcgatggcaagccggcaggtggatattgcaactcagggctggttcattggtctgatgtgtgctgttgctctccttatcttaattttgctgattgtttgcttcatcagaagaaacaagggtggtaaatatccagttaaagaaaaggaagatgcccatgctgaccctgaaatccagcctatgaaggaagatgatgggacatttggagaatacagtgatgcagaagaccacaagcctttgaaaaaaggaagtcgaactccttcagacaggactgtgaaaaaagaagatagtgacgacagcctagttgactatggagaaggggttaatggccagttcaatgaggatggctcctttattggacaatacagtggtaagaaagagaaagagccggctgaaggaaacgaaagctcagaggcaccttctcctgtcaacgccatgaattcctttgtttaa

SEQ ID NO: 158957 - DNA, 6406 bp, Homo sapiens
  Payload ID: 11100
  Gene Symbol: NRCAM
  Gene Name: neuronal cell adhesion molecule
  ENST ID: ENST00000413765
  CDS Start-End: 487-4122
agtccgagcctcagacgcgcgggcgcgggggacggcgcaggggccgcctggctggagcagccagaggggatagcttcgtcgagaacggaggacaccggcggtccagggtcctgggcagtcgcgccagagctgagcggagggcgcggcgcgagaacgaatctttgtgacattctctctcagcattctttatcccctgtttgctgaagacttcgacaaaagctggtcttagctgttggcattctcctgagaaaaggatagcttcagaaatcagaaaaacatttgggaggtgtctagcccagtggaccttctgaagagcaatgctaagaagacgtttggtttaaagaattaaaaggaagaacaacttaagagcttcttcaaagtttcccgcatgaaaattacttaaacgttgcacacaacgtttcacaaaatcttttgtgaaagaagaaaaggaaattcagtgtgtgagtctcagcaggagttaagctaatgcagcttaaaataatgccgaaaaagaagcgcttatctgcgggcagagtgcccctgattctcttcctgtgccagatgattagtgcactggaagtacctcttgatccaaaacttcttgaagacttggtacagcctccaaccatcacccaacagtctccaaaagattacattattgaccctcgggagaatattgtaatccagtgtgaagccaaagggaaaccgcccccaagcttttcctggacccgtaatgggactcattttgacatcgataaagaccctctggtcaccatgaagcctggcacaggaacgctcataattaacatcatgagcgaagggaaagctgagacctatgaaggagtctatcagtgtacagcaaggaacgaacgcggagctgcagtttctaataacattgttgtccgcccatccagatcaccattgtggaccaaagaaaaacttgaaccaatcacacttcaaagtggtcagtctttagtacttccctgcagacccccaattggattaccaccacctataatattttggatggataattcctttcaaagacttccacaaagtgagagagtttctcaaggtttgaatggggacctttatttttccaatgtcctcccagaggacacccgcgaagactatatctgttatgctagatttaatcatactcaaaccatacagcagaagcaacctatttctgtgaaggtgatttcagtggatgaattgaatgacactatagctgctaatttgagtgacactgagttttatggtgctaaatcaagtagagagaggccaccaacatttttaactccagaaggcaatgcaagtaacaaagaggaattaagaggaaatgtgctttcactggagtgcattgcagaaggactgcctaccccaattatttactgggcaaaggaagatggaatgctacccaaaaacaggacagtttataagaactttgagaaaaccttgcagatcattcatgtttcagaagcagactctggaaattaccaatgtatagcaaaaaacgcattaggagccatccaccataccatttctgttagagttaaagcggctccatactggatcacagcccctcaaaatcttgtgctgtccccaggagaggatgggaccttgatctgcagagctaatggcaaccccaaacccagaattagctggttaacaaatggagtcccaatagaaattgcccctgatgaccccagcagaaaaatagatggcgataccattattttttcaaatgttcaagaaagatcaagtgcagtctatcagtgcaatgcctctaatgaatatggatatttactggcaaacgcatttgtaaatgtgctggctgagccaccacgaatcctcacacctgcaaacacactctaccaggtcattgcaaacaggcctgctttactagactgtgccttctttgggtctcctctcccaaccatcgagtggtttaaaggagctaaaggaagtgctcttcatgaagatatttatgttttacatgaaaatggaactttggaaattcctgtggcccaaaaggacagtacaggaacttatacgtgtgttgcaaggaataaattagggatggcgaagaatgaagttcacttagaaatcaaagatcctacatggatcgttaaacagcccgaatatgcagttgtgcaaagagggagcatggtgtcctttgaatgcaaagtgaaacatgatcacaccttatccctcactgtcctgtggctgaaggacaacagggaactgcccagtgatgaaaggttcactgttgacaaggatcatctagtggtagctgatgtcagtgacgatgacagcgggacctacacgtgtgtggccaacaccactctggacagcgtctccgccagcgctgtgcttagcgttgttgctcctactccaactccagctcccgtttacgatgtcccaaatcctccctttgacttagaactgacagatcaacttgacaaaagtgttcagctgtcatggaccccaggcgatgacaacaatagccccattacaaaattcatcatcgaatatgaagatgcaatgcacaagccagggctgtggcaccaccaaactgaagtttctggaacacagaccacagcccagctgaagctgtctccttacgtgaactactccttccgcgtgatggcagtgaacagcattgggaagagcttgcccagcgaggcgtctgagcagtatttgacgaaagcctcagaaccagataaaaaccccacagctgtggaaggactgggatcagagcctgataatttggtgattacgtggaagcccttgaatggtttcgaatctaatgggccaggccttcagtacaaagttagctggcgccagaaagatggtgatgatgaatggacatctgtggttgtggcaaatgtatccaaatatattgtctcaggcacgccaacctttgttccatacctgatcaaagttcaggccctgaatgacatggggtttgcccccgagccagctgtagtcatgggacattctggagaagacctcccaatggtggctcctgggaacgtgcgtgtgaatgtggtgaacagtaccttagccgaggtgcactgggacccagtacctctgaaaagcatccgaggacacctacaaggctatcggatttactattggaagacccagagttcatctaaaagaaacagacgtcacattgagaaaaagatcctcaccttccaaggcagcaagactcatggcatgttgccggggctagagccctttagccactacacactgaatgtccgagtggtcaatgggaaaggggagggcccagccagccctgacagagtctttaatactccagaaggagtccccagtgctccctcgtctttgaagattgtgaatccaacactggactctctcactttggaatgggatccaccgagccacccgaatggcattttgacagagtacaccttaaagtatcagccaattaacagcacacatgaattaggccctctggtagatttgaaaattcctgccaacaagacacggtggactttaaaaaatttaaatttcagcactcgatataagttttatttctatgcacaaacatcagcaggatcaggaagtcaaattacagaggaagcagtaacaactgtggatgaagctggtattcttccacctgatgtaggtgcaggcaaagcgatggcaagccggcaggtggatattgcaactcagggctggttcattggtctgatgtgtgctgttgctctccttatcttaattttgctgattgtttgcttcatcagaagaaacaagggtggtaaatatccagttaaagaaaaggaagatgcccatgctgaccctgaaatccagcctatgaaggaagatgatgggacatttggagaatacagtgatgcagaagaccacaagcctttgaaaaaaggaagtcgaactccttcagacaggactgtgaaaaaagaagatagtgacgacagcctagttgactatggagaaggggttaatggccagttcaatgaggatggctcctttattggacaatacagtggtaagaaagagaaagagccggctgaaggaaacgaaagctcagaggcaccttctcctgtcaacgccatgaattcctttgtttaatttttaagctctttgccaatattccatttctctagaatgtttatcctaagcacttgtttgtcagccctctcatactatgaacatatgggtagagagtatattttctgctgtatgttagtattatgagaatagttacagcaaaaacataactcagtcaaatgatatgttaatatgaactggaatgcaaagtgcatactttttcattcaaaatgggtattcttgatttcctcagaactgataaaaaataatgcaacatcaccaacagatcctgttatttcctctgcaggatacagttcaatatgatgcatgaaaaatgctccacatttaaaggacatacccgtgtatgttatgaaaacatggtttgatactttgtttatactaccctcagctgaacccctatatatgaattccgttttcattgtcaagaatgttactgtagtattctctagaacttcaatgtctttgtggacattgttgtgaaattggtgactatgtatagctgtcgttagtctttttgggagactgttaggaacagtttgtacagtatatacttgctaaatgagttcattatgacagtcacattgctgatgcttactgagaactattacctactcttggctcctgttactccgtaggcttcttaatcttccaggcattacagcagcacagtgttctactttttacatcatttctatgttcggttgtttttaggcataaacaatgtgtattgcagtgcatttcggcatttgtgccatactgaaagaatcaaaaacaaatcatccaaattaaatttcaaacattatttcagagaacacagggcaagacacatacagtgccttcagatattaagcattccacaacatcgtgcattctgtatcagctggtccagtccattctgggtcctagattactgtcattgtctaaaagtaacttttaaaaagcagagttcatgaaaactgcaatgctgggaaaagaaggaaacatgaaaataaaaataagacagtttattagaaatagcatttcctcataagcataaaaagaaaatctttgttgccaactgaagcacatgatgattttgtggtcctttatggtttctattacattcagtaagaaagatgtcaacatgctagaaaattaattttaaaactaagttattccaacactaaaagcatacaacagcatgccaacagtaatatattattctccaagactttacctatgtaagtgttcaaaactctgcagcattaaacaacgtgtatgcaaattgttatggatacatttcagaatctaagaaatcaggcaagtgcttaaaaggccaacggtccaagggattacatctgcagtttaaaaagtaaatatatattctatcgtattcataaacaatatctatcaaatgggttacctccaaatatgaaaatctataacaacctatggttgaaggaatgctcagtttcatttgccaataaattggtttctcataacttgcatcaagtttaattttaagtaaagctttttatatgtagatattttgttgaatttgtaaatacacttaaaatgtagatgctatatgcttataggtgttacatacaaataaacatgcaatgtttatgttgtactgtataagaggtaagctaattaatgcagtgaatgggattggaaagcatctacttaaatatctattgggttcccccctccccccaccttttttgctgtgaaactgaaatagtgaacttttctacgtattgacagcagatttttcgatgaaatcttcagagctttgcctatggggcacagtaggcctagtaacctggcatgtttgatatatgtaggtaaagcataatttaaagtaatcccaggtaaagatggccctaaatactttcatgtctctatattcatttttcacagatccacctgtctcttgaaaatataaaaagacaaaacaggtttgccttggcatcagagagcacaaagattaaaagttactttaaatttgccaatattttgggagaacaataaaactacattttttcctcttccatactggtagatgcgaaatttatctgtgcatgaaagggtcacttctgtaatagtgcaacagatttggtattaaaaattaaatgtggttttaaaagttcctctctcttttgtaatttatgttcccaattgagtgtgaatgtccaagtaatggtgtatgtaatggtacaggcaaatgtgactggatttccctcaaaaaagtaactattaaacagtcttgatctctttgtgacttttaactttttcaaac

SEQ ID NO: 158958 - DNA, 726 bp, Homo sapiens
  Payload ID: 11100
  Gene Symbol: NRCAM
  Gene Name: neuronal cell adhesion molecule
  ENST ID: ENST00000456431
  CDS Start-End: 409-726
attgtattgccacaaagccaggctgatcaccctgggaggcctgggaggtctgagcagctttggattggctgtcaggagcaggactttaacattttactgcacatgggccagccacagcagggttcaattgccagtgcttttatctgcagaaatgtgctgggatgggcactttgtttaaaatttccctttgctactgggaggaaatggaaagcagtaagataacttcatttgtaagagcaatgctaagaagacgtttggtttaaagaattaaaaggaagaacaacttaagagcttcttcaaagtttcccgcatgaaaattacttaaacgttgcacacaacgtttcacaaaatcttttgtgaaagaagaaaaggaaattcagtgtgtgagtctcagcaggagttaagctaatgcagcttaaaataatgccgaaaaagaagcgcttatctgcgggcagagtgcccctgattctcttcctgtgccagatgattagtgcactggaagtacctcttgatctggtacagcctccaaccatcacccaacagtctccaaaagattacattattgaccctcgggagaatattgtaatccagtgtgaagccaaagggaaaccgcccccaagcttttcctggacccgtaatgggactcattttgacatcgataaagaccctctggtcaccatgaagcctggcacaggaacgctcataattaacatcatgagcgaaggg

SEQ ID NO: 158959 - DNA, 3025 bp, Homo sapiens
  Payload ID: 11100
  Gene Symbol: NRCAM
  Gene Name: neuronal cell adhesion molecule
  ENST ID: ENST00000613830
  CDS Start-End: 475-2790
agacgcgcgggcgcgggggacggcgcaggggccgcctggctggagcagccagaggggatagcttcgtcgagaacggaggacaccggcggtccagggtcctgggcagtcgcgccagagctgagcggagggcgcggcgcgagaacgaatctttgtgacattctctctcagcattctttatcccctgtttgctgaagacttcgacaaaagctggtcttagctgttggcattctcctgagaaaaggatagcttcagaaatcagaaaaacatttgggaggtgtctagcccagtggaccttctgaagagcaatgctaagaagacgtttggtttaaagaattaaaaggaagaacaacttaagagcttcttcaaagtttcccgcatgaaaattacttaaacgttgcacacaacgtttcacaaaatcttttgtgaaagaagaaaaggaaattcagtgtgtgagtctcagcaggagttaagctaatgcagcttaaaataatgccgaaaaagaagcgcttatctgcgggcagagtgcccctgattctcttcctgtgccagatgattagtgcactggaagtacctcttgatctggtacagcctccaaccatcacccaacagtctccaaaagattacattattgaccctcgggagaatattgtaatccagtgtgaagccaaagggaaaccgcccccaagcttttcctggacccgtaatgggactcattttgacatcgataaagaccctctggtcaccatgaagcctggcacaggaacgctcataattaacatcatgagcgaagggaaagctgagacctatgaaggagtctatcagtgtacagcaaggaacgaacgcggagctgcagtttctaataacattgttgtccgcccatccagatcaccattgtggaccaaagaaaaacttgaaccaatcacacttcaaagtggtcagtctttagtacttccctgcagacccccaattggattaccaccacctataatattttggatggataattcctttcaaagacttccacaaagtgagagagtttctcaaggtttgaatggggacctttatttttccaatgtcctcccagaggacacccgcgaagactatatctgttatgctagatttaatcatactcaaaccatacagcagaagcaacctatttctgtgaaggtgatttcagtggatgaattgaatgacactatagctgctaatttgagtgacactgagttttatggtgctaaatcaagtagagagaggccaccaacatttttaactccagaaggcaatgcaagtaacaaagaggaattaagaggaaatgtgctttcactggagtgcattgcagaaggactgcctaccccaattatttactgggcaaaggaagatggaatgctacccaaaaacaggacagtttataagaactttgagaaaaccttgcagatcattcatgtttcagaagcagactctggaaattaccaatgtatagcaaaaaacgcattaggagccatccaccataccatttctgttagagttaaagcggctccatactggatcacagcccctcaaaatcttgtgctgtccccaggagaggatgggaccttgatctgcagagctaatggcaaccccaaacccagaattagctggttaacaaatggagtcccaatagaaattgcccctgatgaccccagcagaaaaatagatggcgataccattattttttcaaatgttcaagaaagatcaagtgcagtctatcagtgcaatgcctctaatgaatatggatatttactggcaaacgcatttgtaaatgtgctggctgagccaccacgaatcctcacacctgcaaacacactctaccaggtcattgcaaacaggcctgctttactagactgtgccttctttgggtctcctctcccaaccatcgagtggtttaaaggagctaaaggaagtgctcttcatgaagatatttatgttttacatgaaaatggaactttggaaattcctgtggcccaaaaggacagtacaggaacttatacgtgtgttgcaaggaataaattagggatggcgaagaatgaagttcacttagaaatcaaagatcctacatggatcgttaaacagcccgaatatgcagttgtgcaaagagggagcatggtgtcctttgaatgcaaagtgaaacatgatcacaccttatccctcactgtcctgtggctgaaggacaacagggaactgcccagtgatgaaaggttcactgttgacaaggatcatctagtggtagctgatgtcagtgacgatgacagcgggacctacacgtgtgtggccaacaccactctggacagcgtctccgccagcgctgtgcttagcgttgttgatgtcccaaatcctccctttgacttagaactgacagatcaacttgacaaaagtgttcagctgtcatggaccccaggcgatgacaacaatagccccattacaaaattcatcatcgaatatgaagatgcaatgcacaagccagggctgtggcaccaccaaactgaagtttctggaacacagaccacagcccagctgaagctgtctccttacgtgaactactccttccgcgtgatggcagtgaacagcattgggaagagcttgcccagcgaggcgtctgagcagtatttgacgaaagcctcagaaccagataaaaaccccacagctgtggaaggactgggatcagagcctgataatttggtgattacgtggaagcccttgaatggtttcgaatctaatgggccaggccttcagacaagtactgcctctttttaaaatattaggtttgagtccatctaaaggcaaagtcattatgtgttttgagaggatggttttattaaatataaatgtaaatgacaagagagaaaaaggaagagaataactaaatgggtgcctgtcacaggtttgtactaatgtattttcagctgaatcaggaatgagttactgaaactcaaaaccttgaatcgtgcgagcacggtgaaatgtcaatttaatacatgttgaaacattc

SEQ ID NO: 158960 - DNA, 2852 bp, Homo sapiens
  Payload ID: 11101
  Gene Symbol: NEUROD1
  Gene Name: neuronal differentiation 1
  Uniprot ID: Q13562
  ENST ID: ENST00000295108
  CDS Start-End: 459-1529
tgggccactttcttctggccacaaaggggccggaatggagcgctccgcggcatacaaatgggcaggtcacgtggttccaggctcttggctggaccgggaagaccatatggcgcatgccggggaggaaggaggaggggcgggggtaggggtggagggtgaggggagcggttgtcggaggagggcgggagacgagcaaggcgtggggagaagtggggaggaggggagaacggggagcgcacagcctggacgcgtgcgcaggcgtcaggcgcatagacctgctagcccctcagctagcggccccgcccgcgcttagcatcactaactgggctatataacctgagcgcccgcgcggccacgacacgaggaattcgcccacgcaggaggcgcggcgtccggaggccccagggttatgagactatcactgctcaggacctactaacaacaaaggaaatcgaaacatgaccaaatcgtacagcgagagtgggctgatgggcgagcctcagccccaaggtcctccaagctggacagacgagtgtctcagttctcaggacgaggagcacgaggcagacaagaaggaggacgacctcgaaaccatgaacgcagaggaggactcactgaggaacgggggagaggaggaggacgaagatgaggacctggaagaggaggaagaagaggaagaggaggatgacgatcaaaagcccaagagacgcggccccaaaaagaagaagatgactaaggctcgcctggagcgttttaaattgagacgcatgaaggctaacgcccgggagcggaaccgcatgcacggactgaacgcggcgctagacaacctgcgcaaggtggtgccttgctattctaagacgcagaagctgtccaaaatcgagactctgcgcttggccaagaactacatctgggctctgtcggagatcctgcgctcaggcaaaagcccagacctggtctccttcgttcagacgctttgcaagggcttatcccaacccaccaccaacctggttgcgggctgcctgcaactcaatcctcggacttttctgcctgagcagaaccaggacatgcccccccacctgccgacggccagcgcttccttccctgtacacccctactcctaccagtcgcctgggctgcccagtccgccttacggtaccatggacagctcccatgtcttccacgttaagcctccgccgcacgcctacagcgcagcgctggagcccttctttgaaagccctctgactgattgcaccagcccttcctttgatggacccctcagcccgccgctcagcatcaatggcaacttctctttcaaacacgaaccgtccgccgagtttgagaaaaattatgcctttaccatgcactatcctgcagcgacactggcaggggcccaaagccacggatcaatcttctcaggcaccgctgcccctcgctgcgagatccccatagacaatattatgtccttcgatagccattcacatcatgagcgagtcatgagtgcccagctcaatgccatatttcatgattagaggcacgccagtttcaccatttccgggaaacgaacccactgtgcttacagtgactgtcgtgtttacaaaaggcagccctttgggtactactgctgcaaagtgcaaatactccaagcttcaagtgatatatgtatttattgtcattactgcctttggaagaaacaggggatcaaagttcctgttcaccttatgtattattttctatagctcttctatttaaaaaataaaaaaatacagtaaagtttaaaaaatacaccacgaatttggtgtggctgtattcagatcgtattaattatctgatcgggataacaaaatcacaagcaataattaggatctatgcaatttttaaactagtaatgggccaattaaaatatatataaatatatatttttcaaccagcattttactacttgttacctttcccatgctgaattattttgttgtgattttgtacagaatttttaatgactttttataatgtggatttcctattttaaaaccatgcagcttcatcaatttttatacatatcagaaaagtagaattatatctaatttatacaaaataatttaactaatttaaaccagcagaaaagtgcttagaaagttattgtgttgccttagcacttctttcctctccaattgtaaaaaaaaaaaaaaaaaaaaaaaaaaaaaaaaaattgcacaatttgagcaattcatttcactttaaagtctttccgtctccctaaaataaaaaccagaatcataattttcaagagaagaaaaaattaagagatacattccctatcaaaacatatcaattcaacacattacttgcacaagcttgtatatacatattataaataaatgccaacatacccttctttaaatcaaaagctgcttgactatcacatacaatttgcactgttactttttagtcttttactcctttgcattccatgattttacagagaatctgaagctattgatgtttccagaaaatataaatgcatgattttatacatagtcacaaaaatggtggtttgtcatatattcatgtaataaatctgagcctaaatctaatcaggttgttaatgttgggatttatatctatagtagtcaattagtacagtagcttaaataaattcaaaccatttaattcataattagaacaatagctattgcatgtaaaatgcagtccagaataagtgctgtttgagatgtgatgctggtaccactggaatcgatctgtactgtaattttgtttgtaatcctgtatattatggtgtaatgcacaatttagaaaacattcatccagttgcaataaaatagtattgaaagtga

SEQ ID NO: 158961 - DNA, 2041 bp, Homo sapiens
  Payload ID: 11102
  Gene Symbol: NEUROD2
  Gene Name: neuronal differentiation 2
  Uniprot ID: Q15784
  ENST ID: ENST00000302584
  CDS Start-End: 222-1370
tagaggctggtaccccgcctggtagagatgccacactcgctccgcggttcgcatggcgctctgaagacgccggcgcccgccgccttgaggagccgctgcccccgctccctgaagatgggggaacaatgaaataagcgagaagatccctcttctcccccctctctctcttgccccctccccccctcccctcccctctccccttgactcctctccgaggcaccatgctgacccgcctgttcagcgagcccggccttctctcggacgtgcccaagttcgccagctggggcgacggcgaagacgacgagccgaggagcgacaagggcgacgcgccgccaccgccaccgcctgcgcccgggccaggggctccggggccagcccgggcggccaagccagtccctctccgtggagaagaggggacggaggccacgttggccgaggtcaaggaggaaggcgagctggggggagaggaggaggaggaagaggaggaggaagaaggactggacgaggcggagggcgagcggcccaagaagcgcgggcccaagaagcgcaagatgaccaaggcgcgcttggagcgctccaagcttcggcggcagaaggcgaacgcgcgggagcgcaaccgcatgcacgacctgaacgcagccctggacaacctgcgcaaggtggtgccctgctactccaagacgcagaagctgtccaagatcgagacgctgcgcctagccaagaactatatctgggcgctctcggagatcctgcgctccggcaagcggccagacctagtgtcctacgtgcagactctgtgcaagggtctgtcgcagcccaccaccaatctggtggccggctgtctgcagctcaactctcgcaacttcctcacggagcaaggcgccgacggtgccggccgcttccacggctcgggcggcccgttcgccatgcacccctacccgtacccgtgctcgcgcctggcgggcgcacagtgccaggcggccggcggcctgggcggcggcgcggcgcacgccctgcggacccacggctactgcgccgcctacgagacgctgtatgcggcggcaggcggtggcggcgcgagcccggactacaacagctccgagtacgagggcccgctcagccccccgctctgtctcaatggcaacttctcactcaagcaggactcctcgcccgaccacgagaaaagctaccactactctatgcactactcggcgctgcccggttcgcggcccacgggccacgggctagtcttcggctcgtcggctgtgcgcgggggcgtccactcggagaatctcttgtcttacgatatgcaccttcaccacgaccggggccccatgtacgaggagctcaatgcgttttttcataactgagacttcgcgccggctcccttctttttcttttgcctttgcccgcccccctgtccccagcccccagagcgcagggacacccccatcctaccccggcgccgggcgcggggagcgggccaccggtcctgccgctctcctggggcagcgcagtcctgttacctgtgggtggcctgtcccaggggcctcgcttcccccaggggactcgccttctctctccccaaggggttccctcctcctctctcccaaggagtgcttctccagggacctctctccgggggctccctggaggcacccctcccccattcccaatatcttcgctgaggtttcctcctccccctcctccctgcaggcccaaggcgttggtaagggggcagctgagcaatggaacgcgtttccccctctcattattattttaaaaacagacacccagctgccgaggcaaaaaggagccaggcgctccctctttcttgaagagggtagaagttagggcgccggagcccgggcctggaacgccctcacccccaacctccagtctccgcgttttgcgattttaattttggcgggaggggaagtggattgagaggaaagagagaggccaagacaatttgtaactagaatccgtttttcccttttcctttttttaaacaaacaaacatacaaaaaaaaaaaaaaaa

SEQ ID NO: 158962 - DNA, 3953 bp, Homo sapiens
  Payload ID: 11103
  Gene Symbol: NEUROD4
  Gene Name: neuronal differentiation 4
  Uniprot ID: Q9HD90
  ENST ID: ENST00000242994
  CDS Start-End: 379-1374
aaaactgcagcaagtcagaggctccggccagagagcaggagctgcccagaggcttgtggtcctgaaagctcctctccggggagctaaccagggagaggaggtactgaagagcgactaaactggctgcagcggagagatcagcccgaaggcgtccttgaggagcatacggaactccaaggaaggagtagaataaggagcaggcagagaaaccagacccggtggaatctctaagaggtaacaaccgggtttgacatggatcgctgaaagcgtctcttctaccatctggatggtcagggagacttggcttctctgactgtcctctaagacgcagattcacagagttcactccaggaacggccagtgaccgagagtctggaaatgtcaaaaacttttgtaaaatccaaggagatgggagagctagtcaacacaccatcctggatggataaaggtctgggctcccaaaatgaggtgaaggaggaagagagcagaccaggtacttatgggatgctcagcagcttaactgaagagcatgacagtattgaggaagaagaagaagaggaagaagatggggagaaacctaagagaaggggtcccaagaaaaagaagatgaccaaagctcgccttgagagattcagggctcgaagagtcaaggctaatgccagagaacggacccggatgcatggcctgaatgacgccctggataacctgaggcgagtcatgccatgctactctaaaacccaaaaactttccaagatagagactcttagactggccaggaactatatttgggctttatctgaagtcctggagactggccagacacctgaagggaaaggctttgtggagatgctgtgtaaagggctctctcagcccacaagcaacctggtggctggatgtctccaactgggccctcagtctgtcctcctggagaagcacgaggataaatctcctatttgtgactctgccatctctgtccacaacttcaactatcagtctccggggcttcctagccctccttatggtcatatggaaacacatctccttcatctcaagccccaagtattcaagagtttgggagaatcgtcctttgggagccatctgcctgactgcagtacacccccttatgagggcccactcactccacccctgagcatcagtgggaacttctccttgaagcaagatgggtctcctgacctagaaaaatcctacagcttcatgccacattacccttcttcaagtctaagctcagggcatgtgcattcaactccttttcaggctggtaccccccgttatgatgttcctatagacatgtcctatgattcctacccccatcatggtattgggacccaactcaatacagtcttcactgagtgaggcagttaagttcaatgtttcagagaatgacgtggagacattttccataattcaagtggttgagctaaagattcaatgaccttaaaggatccctatggatatatatcaaacaatagttcaagtccatttaggctttccttcacctatcacctcttttctcatcaccttctcacattgcattgatttctttatagagtcctcaagtgaaaatatttgatgatttaacaaccatgtgaaaatagaacagaagacctgggccctattccagtggtgccaaaaactcattgcataatctgtgccaattaattttccatttctggcctttgtttatttactagcaattgtaaataaacaaattgtatttatatgaggcaactattctaagtccagatgatttctaaagtccttcacagttctgaaatgctataactgtggtgatcactcttgacaatttcttgaaactgaaagaatagagaaataataggaaagggatgctatgcatagaatgatcaaattgaattatcagagggatcacaaggtacatgtctcttggctcacagaatgcaaagcttgtttggatttaatgataggacctctttgtatctattgaaaaatagcttctggaagctaaaagtctaacatggctgtcactgtgaagaacaaaacatgttcgttaagagactaactctatttgttattagactaaaagttgaacatatcttccttatgatttgaagaaccataatagagaaccataatagaggcctcatgccaactttattcttgataatatttcaaaaccatttttctcagtactagaggtagggcaaacaagtcactgaagcctcagactcctataactaatgggacatagagaagtcttttagaccatgacctccataaccagagggctctggaacttctgatgaagctcaggtgctgctgttagaatcagcacacaacacaggtttatattaaagagcaataaaatagctattggctataataactactatagttcagggactctctccagctcacagttgcccatgggaaaaaccaatggatttttttttaagcaagatgaatttcatttggttaaacgtgattaaaaccatccacctctgtccacaccaatatattttccagaagcacaagcaccaatcaatttattgatcaaggttaaatttttccaacatatatgtagttccttatctctccccctacactaattgttacctcttcctcacttctaagatagaatatgttattatatattgtaaataacatttcaggtgaccaaacttaaggatgcagaaatgaaatccaaggttggtgaatatttttaccaactatgtcttcatcacaggtttaacccaatttgcagagtgtttatttttctttatgtaactcctttttcctttatatcaatgctaacttcatcaaatttgtattttttttcagaaaatgggacctgagaaattttcctatcttgttcaatcagccaggacagttatttaagtcaaaccagagcctgaatggcttatttgatagtagattaggtcctgctcctgccagaaaggataagtttaacatgcagggtacatcaatagggccaatttaaaaaatgataacacatattagtatgtcattttctatagctcagctatcccctaaaatctgccaactatatgtgtatcttgtctgtttacctctcttatttattatctccatacagtataagttattttttttccattttgctctcagcacttaccctgctgtattttgcacccttggtttgtaaattcacttgaaagtagccttgcagagagatcttaagccccatcagtcaccaaagtggttcccttcatcacaatctgccctagaggaaataggcaagtaaaatgatatataaagccatactatgtgctttctgagtatatactgcacttacctttgtgagcggctgtaggagggtctatcctcgaagctagcattttctggcatttaagtttgtagataatcactgttgtttgagttatttattagatattatttatttaatttatttctctcttcctttcacgaaaattcctttagccccatagatgtgcttgcaaacccttcctaaaattttatttggaaagtagctcataattttgctaagaactgctgagttttggagtgaggggaaaggaaaaaatagagaattacctctgtgataatttttataaaaagcagcaataattcgaatggctatgcaagttaatgtttttagagtcttttcttcagtctaaaatgagccagagttattctttaataatctgctgtttatgcctttggggagtatggtacccatgagccaagcctccctgaaattgtacagagggattttataattgaattaaaatttaggaatgcaatagcttgtaaagagcctgctctccaacatagggtggtctcattcttctggagacttttttagataaagtaaaataattgtttaaatattttgtttaaaatatgactgtttttcctccctttttcctagcagaaataaagctgtaagtcttatt

SEQ ID NO: 158963 - DNA, 2131 bp, Homo sapiens
  Payload ID: 11104
  Gene Symbol: NEUROD6
  Gene Name: neuronal differentiation 6
  Uniprot ID: Q96NK8
  ENST ID: ENST00000297142
  CDS Start-End: 324-1337
agtctaaccttctgtgttgatgcatgaaggctggtacccacttacagggatgccagatgatcagtgcagaatgaaggtcccaagagagaggatcacatggctctctctgccctgtgacgtcactagcagatggcatgggtaccagctctggcagttggcatcaatgtcactttttagagatcaatgagatagtgcagatatacacagatctagagactccaggagacgatgcgacactcagcctgaaaagatttggaagacccaaaatgaaaactgattattgaatgaaattaaaacctaaggtaatttaagattagagaaccatgttaacactaccgtttgatgagtctgttgtaatgccagaatcccagatgtgcagaaagttttctagagaatgcgaggaccagaagcaaattaagaagccagaaagcttttccaaacagattgtccttcgaggaaagagcatcaaaagggcccctggagaagaaaccgagaaagaagaagaggaggaagacagggaagaggaagatgaaaatgggttgcctagaaggaggggtcttaggaaaaaaaagacaacaaagctgcgattggaaagggtcaagttcaggagacaggaagcgaacgcgcgcgagaggaacaggatgcacggcctcaacgacgctctggacaacttaagaaaagtggtcccctgttattctaaaacccagaaactgtccaaaatagagactttacgactggccaaaaactacatctgggcactttctgaaattctgagaatcggcaagagaccagatctgctcacattcgtccaaaacttatgcaaaggtctttcccagccaactacaaacttggtggcaggctgcttgcagctcaacgccaggagtttcctgatgggtcagggtggggaggctgcacaccacacaaggtcaccctactctaccttctacccaccctaccacagccctgagctcaccactcccccagggcatgggactcttgataattccaagtccatgaaaccctacaattattgcagtgcgtatgaatccttctatgaaagtacttcccctgagtgtgccagccctcagtttgaaggtcccttaagtcctcccccaattaactataatgggatattttccctgaagcaagaagaaaccttggactatggtaaaaattacaattacggcatgcattactgtgcagtgccacccaggggtccccttgggcagggtgccatgttcaggttgcccaccgacagccacttcccttacgacttacatctgcgcagccaatctctcacaatgcaagatgaattaaatgcagtttttcataattaatgaggaaaatgaaaataaacagtggtcattcacctcccctgtctaattaagacaaagcagatgcttgtgggctgagtaattggcacaactctatctaaggtgtttactagtttctgaagtgtgtttcaactattgtgagaattttctatgtaataataaatctcttttcgtatgagaacttcttttcctttccttttgtctgtgaagcactgtgattctgtttctactggaaagatttttttctttttaattttcttttaaacttatttaatttgtttgaacaaggtgtctaagaatatactgttgaataaagacatgcacacagcataattcaatgtctattttggttgtacagtaattataaaatgcatgttattaaaaccagatgagtaaaatgatgtgtttataattattaggaattatatattatgtatcttttaaaaattgaaattttaaaatatggagaatatcactaagctgacaatgatattgggagatgaatttgcaacaatataaaaagctatgcaattttctttttattaaggatgaatctaaatgcattcaattggtaactattcctcttcaagtatttgcagatggggcaacatgatatttgggtagctgatgtcataattcggggacaattatctcaatcatcaagaaaaaaatttcagcacttgttttgtattattcagaaattaactgtacaggtttgttatcacaatgtataattgtgtttttccaccccacatttttaaggcaattaaatatagatatttccactcgtaaaggac

SEQ ID NO: 158964 - DNA, 1335 bp, Homo sapiens
  Payload ID: 11104
  Gene Symbol: NEUROD6
  Gene Name: neuronal differentiation 6
  ENST ID: ENST00000611245
  CDS Start-End: 149-1141
agagatcaatgagatagtgcagatatacacagatctagagactccaggagacgatgcgacactcagcctgaaaagatttggaagacccaaaatgaaaactgattattgaatgaaattaaaacctaaggtaatttaagattagagaaccatgttaacactaccgtttgatgagtctgttgtaatgccagaatcccagatgtgcagaaagttttctagagaatgcgaggaccagaagcaaattaagaagccagaaagcttttccaaacagattgtccttcgaggaaagagcatcaaaagggcccctggagaagaaaccgagaaagaagaagaggaggaagacagggaagaggaagatgaaaatgggttgcctagaaggaggggtcttaggaaaaaaaagacaacaaagctgcgattggaaagggtcaagttcaggagacaggaagcgaacgcgcgcgagaggaacaggatgcacggcctcaacgacgctctggacaacttaagaaaagtggtcccctgttattctaaaacccagaaactgtccaaaatagagactttacgactggccaaaaactacatctgggcactttctgaaattctgagaatcggcaagagaccagatctgctcacattcgtccaaaacttatgcaaaggtctttcccagccaactacaaacttggtggcaggctgcttgcagctcaacgccaggagtttcctgatgggtcagggtggggaggctgcacaccacacaaggtcaccctactctaccttctacccaccctaccacagccctgagctcaccactcccccagggcatgggactcttgataattccaagtccatgaaaccctacaattattgcagtgcgtatgaatccttctatgaaagtacttcccctgagtgtgccagccctcagtttgaaggtcccttaagtcctcccccaattaactataatgggatattttccctgaagcaagaagaaaccttggactatggtaaaaattacaattacggcatgcattactgtgcagtgccacccaggggtccccttgggcaggtgccatgttcaggttgcccaccgacagccacttcccttacgacttacatctgcgcagccaatctctcacaatgcaagatgaattaaatgcagtttttcataattaatgaggaaaatgaaaataaacagtggtcattcacctcccctgtctaattaagacaaagcagatgcttgtgggctgagtaattggcacaactctatctaaggtgtttactagtttctgaagtgtgtttcaactattgtgagaattttctatgtaataataaatctcttttcgtatg

SEQ ID NO: 158965 - DNA, 5577 bp, Homo sapiens
  Payload ID: 11105
  Gene Symbol: NEGR1
  Gene Name: neuronal growth regulator 1
  Uniprot ID: Q7Z3B1
  ENST ID: ENST00000306821
  CDS Start-End: 395-1075
gccatgtgaggacacagagagaaggcagccatctgcaagccaggaatagagccctcaccagagacctaatttgccagcatcttgatcatgtacttccagcctccagaactgtgagaaaatgcatttctgttgttaagccacccaatctgtggattttgttatggaagcccgagcaaactaatacaggtgttatttggaagatggagcttcaaagggtgcctggctgaaccggtcaagtattatttttgcgggaggtgataagtggtcagtggatcctcgagtttcaatttcaacattgaataaaagggactacagcctccagatacagaatgtagatgtgacagatgatggcccatacacgtgttctgttcagactcaacatacacccagaacaatgcaggtgcatctaactgtgcaagttcctcctaagatatatgacatctcaaatgatatgaccgtcaatgaaggaaccaacgtcactcttacttgtttggccactgggaaaccagagccttccatttcttggcgacacatctccccatcagcaaaaccatttgaaaatggacaatatttggacatttatggaattacaagggaccaggctggggaatatgaatgcagtgcggaaaatgatgtgtcattcccagatgtgaggaaagtaaaagttgttgtcaactttgctcctactattcaggaaattaaatctggcaccgtgacccccggacgcagtggcctgataagatgtgaaggtgcaggtgtgccgcctccagcctttgaatggtacaaaggagagaagaagctcttcaatggccaacaaggaattattattcaaaattttagcacaagatccattctcactgttaccaacgtgacacaggagcacttcggcaattatacctgtgtggctgccaacaagctaggcacaaccaatgcgagcctgcctcttaaccctccaagtacagcccagtatggaattaccgggagcgctgatgttcttttctcctgctggtaccttgtgttgacactgtcctctttcaccagcatattctacctgaagaatgccattctacaataaattcaaagacccataaaaggcttttaaggattctctgaaagtgctgatggctggatccaatctggtacagtttgttaaaagcagcgtgggatataatcagcagtgcttacatggggatgatcgccttctgtagaattgctcattatgtaaatactttaattctactcttttttgattagctacattaccttgtgaagcagtacacattgtcctttttttaagacgtgaaagctctgaaattacttttagaggatattaattgtgatttcatgtttgtaatctacaacttttcaaaagcattcagtcatggtctgctaggttgcaggctgtagtttacaaaaacgaatattgcagtgaatatgtgattctttaaggctgcaatacaagcattcagttccctgtttcaataagagtcaatccacatttacaaagatgcatttttttcttttttgataaaaaagcaaataatattgccttcagattatttcttcaaaatataacacatatctagatttttctgctcgcatgatattcaggtttcaggaatgagccttgtaatataactggctgtgcagctctgcttctctttcctgtaagttcagcatgggtgtgccttcatacaataatatttttctctttgtctccaactaatataaaatgttttgctaaatcttacaatttgaaagtaaaaataaaccagagtgatcaagttaaaccatacactatctctaagtaacgaaggagctattggactgtaaaaatctcttcctgcactgacaatggggtttgagaattttgccccacactaactcagttcttgtgatgagagacaatttaataacagtatagtaaatataccatatgatttctttagttgtagctaaatgttagatccaccgtgggaaatcattccctttaaaatgacagcacagtccactcaaaggattgcctagcaatacagcatcttttcctttcactagtccaagccaaaaattttaagatgatttgtcagaaagggcacaaagtcctatcacctaatattacaagagttggtaagcgctcatcattaattttattttgtggcagctaagttagtatgacagaggcagtgctcctgtggacaggagcattttgcatattttccatctgaaagtatcactcagttgatagtctggaatgcatgttatatattttaaaacttccaaaatatattataacaaacattctatatcggtatgtagcagaccaatctctaaaatagctaattcttcaataaaatctttctatatagccatttcagtgcaaacaagtaaaatcaaaaaagaccatcctttatttttccttacatgatatatgtaagatgcgatcaaataaagacaaaacaccagtgatgagaatatcttaagataagtaattatcaaattattgtgaatgttaaattatttctactataaagaagcaaaactacatttttgaaggaaaatgctgttactctaacattaatttacaggaatagtttgatggtttcactctttactaaagaaaggccatcaccttgaaagccattttacaggtttgatgaagttaccaatttcagtacacctaaatttctacaaatagtccccttttacaagttgtaacaacaaagaccctataataaaattagatacaagaaattttgcagtggttatacatatttgagatatctagtatgttgccctagcagggatggcttaaaaactgtgattttttttcttcaagtaaaacttagtcccaaagtacatcataaatcaattttaattagaaaaatgaatcttaaatgaggggacataagtatactctttccacaaaatggcaataataaggcataaagctagtaaatctactaactgtaataaatgtatgacattattttgattgatacattaaaaaagagtttttagaacaaatatggcatttaactttattatttatttgcttttaagaaatattctttgtggaattgttgaataaactataaaatattattttgtattgcagctttaaagtggcacactccataataatctacttactagaaatagtggtgctaccacaaaaaatgttaaccatcagtaccattgtttgggagaaagaaacagatcaagaatgcatattattcagtgaccgctttcctagagttaaaatacctcctctttgtaaggtttgtaggtaaattgaggtataaactatggatgaaccaaataattagttcaaagtgttgtcatgattccaaatttgtggagtctggtgtttttaccatagaatgtgacagaagtacagtcatagctcagtagctatatgtatttgcctttatgttagaagagactttcttgagtgacatttttaaatagaggaggtattcactatgtttttctgtatcacagcagcattcctagtccttaggccctcggacagagtgaaatcatgagtatttatgagttcaatattgtcaaataaggctacagtatttgcttttttgtgtgaatgtattgcatataatgttcaagtagatgattttacatttatggacatataaaatgtctgattaccccattttatcagtcctgactgtacaagattgttgcaatttcagaatagcagttttataaattgatttatcttttaatctataacaatttgtgttagctgttcatttcaggattatattttctacaagttccacttgtgggactccttttgttgcccctatttttttttaaagaaggaagaaagaaaaataagtagcagtttaaaaatgagaatggagagaaaagaaaaagaatgaaaaggaaaggcagtaaagagggaaaaaaaggaaggatggaaggaatgaaggaaggaagggaggaaggggagaaggtaggaagaaagaaaggatgagagggaaggaagaatcagagtattagggtagttaacttacacatttgcattcttagtttaactgcaagtggtgtaactacgtttttcaatgatcgcatttgaaacataagtcctattataccattaagttcctattatgcagcaattatataataaaaagtactgcccaagttatagtaatgtgggtgtttttgagacactaaaagatttgagagggagaatttcaaacttaaagccacttttggggggtttataacttaactgaaaaattaatgcttcatcataacatttaagctatatctagaaagtagactggagaactgagaaaattacccaggtaattcagggaaaaaaaaaaatatatatatatataaatacccctacatttgaagtcagaaaactctgaaaaactgaattatcaaagtcaatcatctataatgatcaaatttactgaacaattgttaatttatccattgtgcttagctttgtgacacagccaaaagttacctatttaatcttttcaataaaaattgttttttgaaatccagaaatgatttaaaaagaggtcaggtttttaactatttattgaagtatgtggatgtacagtatttcaatagatatgaatatgaataaatggtatgccttaagattctttgaatatgtatttactttaaagactggaaaaagctcttcctgtcttttagtaaaacatccatatttcataacctgatgtaaaatatgttgtactgtttccaataggtgaatataaactcagtttatcaattaaaatatgtatttgactcattttaaaactctattagcttaagagaaagaaggaagaaataataatttgaagatatttctgctattctctttatttcctgtattacactcatctttctgcttactctaaagcagtacagggtaaaaattctagatgctacagtttcaaatgactccacactatattctttcttgctgttgctgattcctaaaaggtttgatgagctgaactacatctaaactaaaaataaattttctggaaacattttattattaattatttagaacctttacctggtaaaatacagcagagttagcaacagagactaaatatcctgttgataaaatcctgatgatcttacaggctaaacaactgaaaactcaaacgcttgtaagagccaggcagagtgtaatttcttaacagctgggtataaaacaacgggcacctgaaggtattcagatacaatttccttaaaaataccttggtttccaagcaaaacacgttatttggctgagaacctttagtttgtaaataccaaaccataatatacaaatgagatctcaagccaaatgaattttttaagccctctttcccatatctgttcatctatgatagtcaactgaataaatgagaacaatgtgatagataaaacaacaaagcataaaaaagattcatgcttggttttataagctattttgaaatataagtatcattgctattctgagaaatctatatacaccaaagccctccctccacaaaaaaactggaaatgttctaataaatgtctgatttcccc

SEQ ID NO: 158966 - DNA, 12811 bp, Homo sapiens
  Payload ID: 11105
  Gene Symbol: NEGR1
  Gene Name: neuronal growth regulator 1
  Uniprot ID: Q7Z3B1
  ENST ID: ENST00000357731
  CDS Start-End: 241-1305
gaagaggaggaggggaggcaaaaacaccgaaaaacaaaaagagagaaacaacacccaacaactggggtggggggaagaaagaaagaaaagaaacccacccacccaccaaaaaaaaaaaaaaaaaaaaaaaaaaaaaaaaatcctgtggcgcgccgcctggttcccgggaagactcgccagcaccagggggtgggggagtgcgagctgaaagctgctggagagtgagcagccctagcagggatggacatgatgctgttggtgcagggtgcttgttgctcgaaccagtggctggcggcggtgctcctcagcctgtgctgcctgctaccctcctgcctcccggctggacagagtgtggacttcccctgggcggccgtggacaacatgatggtcagaaaaggggacacggcggtgcttaggtgttatttggaagatggagcttcaaagggtgcctggctgaaccggtcaagtattatttttgcgggaggtgataagtggtcagtggatcctcgagtttcaatttcaacattgaataaaagggactacagcctccagatacagaatgtagatgtgacagatgatggcccatacacgtgttctgttcagactcaacatacacccagaacaatgcaggtgcatctaactgtgcaagttcctcctaagatatatgacatctcaaatgatatgaccgtcaatgaaggaaccaacgtcactcttacttgtttggccactgggaaaccagagccttccatttcttggcgacacatctccccatcagcaaaaccatttgaaaatggacaatatttggacatttatggaattacaagggaccaggctggggaatatgaatgcagtgcggaaaatgatgtgtcattcccagatgtgaggaaagtaaaagttgttgtcaactttgctcctactattcaggaaattaaatctggcaccgtgacccccggacgcagtggcctgataagatgtgaaggtgcaggtgtgccgcctccagcctttgaatggtacaaaggagagaagaagctcttcaatggccaacaaggaattattattcaaaattttagcacaagatccattctcactgttaccaacgtgacacaggagcacttcggcaattatacctgtgtggctgccaacaagctaggcacaaccaatgcgagcctgcctcttaaccctccaagtacagcccagtatggaattaccgggagcgctgatgttcttttctcctgctggtaccttgtgttgacactgtcctctttcaccagcatattctacctgaagaatgccattctacaataaattcaaagacccataaaaggcttttaaggattctctgaaagtgctgatggctggatccaatctggtacagtttgttaaaagcagcgtgggatataatcagcagtgcttacatggggatgatcgccttctgtagaattgctcattatgtaaatactttaattctactcttttttgattagctacattaccttgtgaagcagtacacattgtcctttttttaagacgtgaaagctctgaaattacttttagaggatattaattgtgatttcatgtttgtaatctacaacttttcaaaagcattcagtcatggtctgctaggttgcaggctgtagtttacaaaaacgaatattgcagtgaatatgtgattctttaaggctgcaatacaagcattcagttccctgtttcaataagagtcaatccacatttacaaagatgcatttttttcttttttgataaaaaagcaaataatattgccttcagattatttcttcaaaatataacacatatctagatttttctgctcgcatgatattcaggtttcaggaatgagccttgtaatataactggctgtgcagctctgcttctctttcctgtaagttcagcatgggtgtgccttcatacaataatatttttctctttgtctccaactaatataaaatgttttgctaaatcttacaatttgaaagtaaaaataaaccagagtgatcaagttaaaccatacactatctctaagtaacgaaggagctattggactgtaaaaatctcttcctgcactgacaatggggtttgagaattttgccccacactaactcagttcttgtgatgagagacaatttaataacagtatagtaaatataccatatgatttctttagttgtagctaaatgttagatccaccgtgggaaatcattccctttaaaatgacagcacagtccactcaaaggattgcctagcaatacagcatcttttcctttcactagtccaagccaaaaattttaagatgatttgtcagaaagggcacaaagtcctatcacctaatattacaagagttggtaagcgctcatcattaattttattttgtggcagctaagttagtatgacagaggcagtgctcctgtggacaggagcattttgcatattttccatctgaaagtatcactcagttgatagtctggaatgcatgttatatattttaaaacttccaaaatatattataacaaacattctatatcggtatgtagcagaccaatctctaaaatagctaattcttcaataaaatctttctatatagccatttcagtgcaaacaagtaaaatcaaaaaagaccatcctttatttttccttacatgatatatgtaagatgcgatcaaataaagacaaaacaccagtgatgagaatatcttaagataagtaattatcaaattattgtgaatgttaaattatttctactataaagaagcaaaactacatttttgaaggaaaatgctgttactctaacattaatttacaggaatagtttgatggtttcactctttactaaagaaaggccatcaccttgaaagccattttacaggtttgatgaagttaccaatttcagtacacctaaatttctacaaatagtccccttttacaagttgtaacaacaaagaccctataataaaattagatacaagaaattttgcagtggttatacatatttgagatatctagtatgttgccctagcagggatggcttaaaaactgtgattttttttcttcaagtaaaacttagtcccaaagtacatcataaatcaattttaattagaaaaatgaatcttaaatgaggggacataagtatactctttccacaaaatggcaataataaggcataaagctagtaaatctactaactgtaataaatgtatgacattattttgattgatacattaaaaaagagtttttagaacaaatatggcatttaactttattatttatttgcttttaagaaatattctttgtggaattgttgaataaactataaaatattattttgtattgcagctttaaagtggcacactccataataatctacttactagaaatagtggtgctaccacaaaaaatgttaaccatcagtaccattgtttgggagaaagaaacagatcaagaatgcatattattcagtgaccgctttcctagagttaaaatacctcctctttgtaaggtttgtaggtaaattgaggtataaactatggatgaaccaaataattagttcaaagtgttgtcatgattccaaatttgtggagtctggtgtttttaccatagaatgtgacagaagtacagtcatagctcagtagctatatgtatttgcctttatgttagaagagactttcttgagtgacatttttaaatagaggaggtattcactatgtttttctgtatcacagcagcattcctagtccttaggccctcggacagagtgaaatcatgagtatttatgagttcaatattgtcaaataaggctacagtatttgcttttttgtgtgaatgtattgcatataatgttcaagtagatgattttacatttatggacatataaaatgtctgattaccccattttatcagtcctgactgtacaagattgttgcaatttcagaatagcagttttataaattgatttatcttttaatctataacaatttgtgttagctgttcatttcaggattatattttctacaagttccacttgtgggactccttttgttgcccctatttttttttaaagaaggaagaaagaaaaataagtagcagtttaaaaatgagaatggagagaaaagaaaaagaatgaaaaggaaaggcagtaaagagggaaaaaaaggaaggatggaaggaatgaaggaaggaagggaggaaggggagaaggtaggaagaaagaaaggatgagagggaaggaagaatcagagtattagggtagttaacttacacatttgcattcttagtttaactgcaagtggtgtaactacgtttttcaatgatcgcatttgaaacataagtcctattataccattaagttcctattatgcagcaattatataataaaaagtactgcccaagttatagtaatgtgggtgtttttgagacactaaaagatttgagagggagaatttcaaacttaaagccacttttggggggtttataacttaactgaaaaattaatgcttcatcataacatttaagctatatctagaaagtagactggagaactgagaaaattacccaggtaattcagggaaaaaaaaaaatatatatatatataaatacccctacatttgaagtcagaaaactctgaaaaactgaattatcaaagtcaatcatctataatgatcaaatttactgaacaattgttaatttatccattgtgcttagctttgtgacacagccaaaagttacctatttaatcttttcaataaaaattgttttttgaaatccagaaatgatttaaaaagaggtcaggtttttaactatttattgaagtatgtggatgtacagtatttcaatagatatgaatatgaataaatggtatgccttaagattctttgaatatgtatttactttaaagactggaaaaagctcttcctgtcttttagtaaaacatccatatttcataacctgatgtaaaatatgttgtactgtttccaataggtgaatataaactcagtttatcaattaaaatatgtatttgactcattttaaaactctattagcttaagagaaagaaggaagaaataataatttgaagatatttctgctattctctttatttcctgtattacactcatctttctgcttactctaaagcagtacagggtaaaaattctagatgctacagtttcaaatgactccacactatattctttcttgctgttgctgattcctaaaaggtttgatgagctgaactacatctaaactaaaaataaattttctggaaacattttattattaattatttagaacctttacctggtaaaatacagcagagttagcaacagagactaaatatcctgttgataaaatcctgatgatcttacaggctaaacaactgaaaactcaaacgcttgtaagagccaggcagagtgtaatttcttaacagctgggtataaaacaacgggcacctgaaggtattcagatacaatttccttaaaaataccttggtttccaagcaaaacacgttatttggctgagaacctttagtttgtaaataccaaaccataatatacaaatgagatctcaagccaaatgaattttttaagccctctttcccatatctgttcatctatgatagtcaactgaataaatgagaacaatgtgatagataaaacaacaaagcataaaaaagattcatgcttggttttataagctattttgaaatataagtatcattgctattctgagaaatctatatacaccaaagccctccctccacaaaaaaactggaaatgttctaataaatgtctgatttcccccacagcttcattatttcttcccttttcaacatctatcttatctatcttgcataaattacatcacagaaacagaaacatcaagtatcagacatggaaaaccagcacatgaaacagagctagtttccctctcaaaagaatagggcaaaacatagatgcttcaaaatcatatcttggtatacagaaaataattattcactttaacctgacagtcagaaatgtaagtaagaatttgtagagataattttccaaggtaattcattcaagttagtggaatttgatccaaacacccgtcaatgtactccctctgaactttccaagaatcatacaccttcacatttacattcactgtttttctagtaattccaaacttactcaaaagtatttcagaattgatatcactggtggaaagagagcaatttagcaaacaaatacatgctttccggtattcctagagaaaaggaaaagaggaatacgtttcattcttctccctagaagctctacccacagtcatcctaaagctagaccaatctctcccagggctttccttcagtctaagaaacatgcttcatttcagagacaattgtggcaactatagttttccccaaagggtcacaactacctctcctttgcattttacaatggagcacttttgcaagtgttgctattgtggctttctcaacactttcaaatacttaaaggagaaaatattactattgtcatgtattgatggtgaaaacgagattcagaaattttgagtcacttgctgaagattatacttcaactaagtggcagatctgagccaaatatgcaatgaaaaatgttcccaatttgtttccagtcccagactacctaggaaaaagaaaagcatataatcacattgctagcttcatagacaactatttgcatatttttatttatatatttatataaatataagcacattttaaatataaatatagatatttatgacatccttgtattttccaatacctgcagagggtatgagatttaaaggctaatcagattgtacatgtcatctaaaactttggaaacgtgaaactcacagtacagttgcctttggacacacagccttgggttgtatgagactggtcacaccaagtggagaatcttgtcataatcgcatgtatcttctttttgtatagcattttgcaaaaaatgtgtcaagtttgggataatccactaagactattcctcagacatctgcaatcaacagaattttgggggaaatggagatcagaatacatacacacttttaaaaaaattcacaatactgattttaatctgagtgatgttgtttgaggccatttatattgaaatactaacatgaacatctgtttgtgctgggacagtagaacaagagaaagattctaattctagaaattaaatgatatgcaacctaagaaatacatttgtactttgttttcaaaatatgaatataatacaaatcctatggatatcaccacttagtttgaaaaacataaaaagtgtgattttcatacacttatgaaatgaataaattaattcattaatgaaggacctgataagacattacaaccagataaaaggataatttaaagaacatacacatttatagatcaaaaaccttgaaattaatgtactaatagaggcaaaactggcttccagagtgaggaggagaattcaattgaatctttacccctcagaatttatttccatatctgtagacgagaaatattttgccttagtattatttatttacaacttgaaaaagagttcaaatataatgaaaaatacagaggctccaaaagaatcagaatcaggtaacctgtaaaagtgtgttccaagtaattagtggtttttcatttcagcaaaaattcttctctgcaatgaagagacataatttttttttctttttcagagttttgctcggttgccctggatggagtgcagtggtgtgatcttggctcactgcaacctccgcctcctgggttcaagcgattctcctgcatcagcctccccagtagctgggattataggcacgtgccaccacacctggctaagttttgtatttttagtagaggtggggtttcaccatgttggccagtctggtctagaactcctgacctcaagtgatccacttccctcggcctcctaaagtgctgggattacaggcgtgagccaccgctcccagacgagatgtaaaatttttaaagccattgaattaaattcattgctaacattttgagctttgataatgtaatgcctactttaatgacccaaaaaaaaaaaaacccaagtaacctatctatctaataatctatgttttttaattactccttttcttccttatctcacaaaccataatccaatagtctaggacatgtgaaagagaaagtaaacagtcacaagaactaccttgcttcgagaatccaccttgttgaaaaaataatatattttgggcacttgttaaaaagaattaacagaaaaagtctttttttttttgtcacaggggcatttaattcatggtataacaggaattttatatcaaaaacagtaagaaaaatgaagtaacagttgagatagcaataattcatcaaccaaatactatgataatgataaaaacattgcaagaagctatagccagaactgagtgttctgctcctacttagtgctaatgagcccagtcctagcacacatcttggtttggtagaaactacaggaggtagcatggttcattacaccttcaaaactttaaaatgttaaagagggtggtttccctccttcatttcaaatggattgctaaaagcactgggctattccttggtggaaatttgaatttgccagtttcttcatcaattttgactttttacattcaaaaaggagttaactttacactaagtcacagcagacttagacctcccgcagttctgaattgtgcttaaacaagtattcaagcacatggggatttctcaagaaaatttggggaccatatcttagaaaaaaaacttacaaaatattcgttgaagactataatatgctaaagctaaggaacaaaattctcttgattgttctaaaaatacctagtaagagccacagaactcttccatagttttctaagtagtttcataagtgtggattgtggttgccctgaaacttgacatctccctaccaagtacttgacaagtgacctggcaaaaatgtgttcaatagctcatttttgacatactccttaagaaatcattgccagagatttgaaactgcttcaagctgatgtctttttcaaaacaaaacacatactcacacacaaatacaaaatcgcattgctatcagtgatctggaaaataagcttgcaagctggccatgtggtgttctgaataatttttttaaagtagaagaagaaatgacaacagtgcaaccaacagtttctgtttaagttttatttgctaagacgttagcataaggaacatcttgtgatttaattaatcagaagatggcacctgctgtaaatactgacatggagaaaagcagatttttaaaaaaatttggaataaattaatttcttgtaatacatttttcttgttgataaacaactaaattatgctttgaaatgtgttactgtctaataactttaaatgttgacaaggagaaagactgggtttttttttttacatttgaataagcaatttttttctggaaacatatatatttctaatttatagataaactagtatgtgtgttcagaattcctgctctctcattattcaggtttcaaaatgtattaacaaagcttttatggttttataatagacaattagatatctttcatcaggtaatgtaagaacttgtatagtggtatattagtcagttttcacactgctgataaagatatacccgagacagggcaatatgcaaaagaaagaggtttttttggacctacagttccatgtggctggggaagcctcacaatcacagtggaaggtgaaaggcacgtctcatatggcagcagacaagagaaaagagcttgtgcagataaactcccccttataaaaccatcagatctcatgagacccattcactatcacaagaacagcatgggaaagacctgctcccatgattcaattacctcccaccaagtccctcccacaatccgtgggaattccaaatgagacttgggtggggacacagccaaaccatatcattccacccctggtccctcccaaatctcatgtcctcacatttcaaaaccaatcatgctttcccaacagtccctcaaagtcttaactcatttcagcactatctcaaaagtccacagtctaaagtctcatctgagacaaggcaagtctcttctgcctatgagcagccagtaaaatcaaaagcaagttagttacttcctagatgcaatggaagtacaggcattgggtaagcatagccattccaagtggaagaaattggccagaacaaagggactacaggggcggtcaagtcttaaagctccaaaatgatctcctttgactccatttctcacatccaggtcatgctgatgcaagaggtgggctcccatggccttaggcagctccgcctctgcagctttgcagggtatagccctcctcctggctgctttcaccagctggcattgagtgtctgtgccttttccaggtgcatggtgcaagctgttagtggatttatgattctgggatctggaggacagtggcccacttctcacagctccactacgtggtgtcccagtagggactctgtgtggggctcactccacattttccttctgcactgccctagcagaggttctccatgaggagaacttcattctgggcatccaggcatttctatacatcctctgaaatttaggtggtggtttccaagcctcaatttttgacttccatgcacccacaggctcaacaccatgtggaagctgccaaggcttggggcttccactgtctgaagcaacagcccaagctgtaccttggcttcatttaaatcatcctgggagcaactgggaggcagagcaccaagttcctagactgcacatagcagagggaccctgggccaggcccacaaaaccatttttttcctccaaaacctaggggcctgtgatggcaggggctgctgcaaaggtctctgacgtgccctggagacatattccccactgtcttggtgacattcagctcctcattacttatgcaattttctgcagccagcttgaatttctcctcaggaaatgggattttcttttctatcacattttcagtctgtaaatttttcaaacttttatactgtttcccttttaaaactgaatgccagccaggtgcactggctcatgcttgtaatctcagcactttgggagtctgagacaggcagatcacctgaggtcacgaatttgagaccaacctggccaacatgataaaaccccaactctactaaaaatataaaaattagtgaggcatggtggcacatgcctgtaatctcaactgcttgggaggctgaagcagaagaattgcttgaacccaggaggcagaggttgcagtgagctgagatcatgccactgcactcctgcctgggtgacaaagtgagactctgtctcaaaaacaaaacaaaacagaacagaacactgaatgcctttaacaacacccaagtcacctgttgaatgctttgctgcttagaaatttcttcctccaaatatcctaaatcacctctctcaacttcaaagttctacacatctctagggcaagggcaaaatgctacccatctctttgctaaaacataacaagagtcacctttgctccagttcccaacaagttattcatttccatctgagaccacctcagcctggattttattgtccatatcattatcagcattttggtcaaaaccattcaacaagtctctaggaagttccaaactttcccacattttcctgtcttcttctgagccctccaaactattccaacccctgcctgttacccagttccaaagtcacttccacattttcaggtatcttttcagcagcactccactcctgatactaatttactatattagtcagttttcacactgctgataaagacatacctgaggctgggcaatttacaaaagaaagaggtttatcagacttacagttccacgtggctggggaggcctcacaatcatggtggaaggtgaaaggcacatctcacatggcagcagagaagagaagagaacttgtgaaggaaaactcccgcttataaaaccatcagatctcatgagacttactcactgtcatgagaacagcatgggaaagacctgcccccatggttcaattacctcccaccaagtccctctcacaatatgtgggaattcaaaatgagatttgtgtggggacatggccaaacaatatcaaatggttttgatttttatgttgaggcacattctcaagctagtatcatttcaagaagaacctgttatttgttgattttggaaattttaaaaatcagatttaatttacactgaaaagtggttgaccttaacgtttctcagataacctgaaatgttcatgtggcattcattcattcattaatccatccacttatttgacaataaaatatgatttaggtgacctctgaagagctgtctaaaaagaattacctggtagagttaatctggatgtttaggacactatgatcaaactgaagaaaaaggcacccatttctctaatcctttctttgggaagctgatttcactttaaactgaaagtgagaaaggaaaaggaagaagaaaagaaacagagggtaaaagaagagaaagaggaagggaaagaaagagattaatgtatattttctcctaagaaaggctcttttgtgtgtgtcggtgtgtgtgtgcatgtgtgtttcctgttgcctggatctatcataaaaagcaatgtcttctctggaatggggcttcagtttccacatttacaattagtacatattacaattagtgatatgaataaaggctgttatcctacattt

SEQ ID NO: 158967 - DNA, 5404 bp, Homo sapiens
  Payload ID: 11105
  Gene Symbol: NEGR1
  Gene Name: neuronal growth regulator 1
  ENST ID: ENST00000434200
  CDS Start-End: 1-900
gtaatttgtaggtgttatttggaagatggagcttcaaagggtgcctggctgaaccggtcaagtattatttttgcgggaggtgataagtggtcagtggatcctcgagtttcaatttcaacattgaataaaagggactacagcctccagatacagaatgtagatgtgacagatgatggcccatacacgtgttctgttcagactcaacatacacccagaacaatgcaggtgcatctaactgtgcaagttcctcctaagatatatgacatctcaaatgatatgaccgtcaatgaaggaaccaacgtcactcttacttgtttggccactgggaaaccagagccttccatttcttggcgacacatctccccatcagcaaaaccatttgaaaatggacaatatttggacatttatggaattacaagggaccaggctggggaatatgaatgcagtgcggaaaatgatgtgtcattcccagatgtgaggaaagtaaaagttgttgtcaactttgctcctactattcaggaaattaaatctggcaccgtgacccccggacgcagtggcctgataagatgtgaaggtgcaggtgtgccgcctccagcctttgaatggtacaaaggagagaagaagctcttcaatggccaacaaggaattattattcaaaattttagcacaagatccattctcactgttaccaacgtgacacaggagcacttcggcaattatacctgtgtggctgccaacaagctaggcacaaccaatgcgagcctgcctcttaaccctccaagtacagcccagtatggaattaccgggagcgctgatgttcttttctcctgctggtaccttgtgttgacactgtcctctttcaccagcatattctacctgaagaatgccattctacaataaattcaaagacccataaaaggcttttaaggattctctgaaagtgctgatggctggatccaatctggtacagtttgttaaaagcagcgtgggatataatcagcagtgcttacatggggatgatcgccttctgtagaattgctcattatgtaaatactttaattctactcttttttgattagctacattaccttgtgaagcagtacacattgtcctttttttaagacgtgaaagctctgaaattacttttagaggatattaattgtgatttcatgtttgtaatctacaacttttcaaaagcattcagtcatggtctgctaggttgcaggctgtagtttacaaaaacgaatattgcagtgaatatgtgattctttaaggctgcaatacaagcattcagttccctgtttcaataagagtcaatccacatttacaaagatgcatttttttcttttttgataaaaaagcaaataatattgccttcagattatttcttcaaaatataacacatatctagatttttctgctcgcatgatattcaggtttcaggaatgagccttgtaatataactggctgtgcagctctgcttctctttcctgtaagttcagcatgggtgtgccttcatacaataatatttttctctttgtctccaactaatataaaatgttttgctaaatcttacaatttgaaagtaaaaataaaccagagtgatcaagttaaaccatacactatctctaagtaacgaaggagctattggactgtaaaaatctcttcctgcactgacaatggggtttgagaattttgccccacactaactcagttcttgtgatgagagacaatttaataacagtatagtaaatataccatatgatttctttagttgtagctaaatgttagatccaccgtgggaaatcattccctttaaaatgacagcacagtccactcaaaggattgcctagcaatacagcatcttttcctttcactagtccaagccaaaaattttaagatgatttgtcagaaagggcacaaagtcctatcacctaatattacaagagttggtaagcgctcatcattaattttattttgtggcagctaagttagtatgacagaggcagtgctcctgtggacaggagcattttgcatattttccatctgaaagtatcactcagttgatagtctggaatgcatgttatatattttaaaacttccaaaatatattataacaaacattctatatcggtatgtagcagaccaatctctaaaatagctaattcttcaataaaatctttctatatagccatttcagtgcaaacaagtaaaatcaaaaaagaccatcctttatttttccttacatgatatatgtaagatgcgatcaaataaagacaaaacaccagtgatgagaatatcttaagataagtaattatcaaattattgtgaatgttaaattatttctactataaagaagcaaaactacatttttgaaggaaaatgctgttactctaacattaatttacaggaatagtttgatggtttcactctttactaaagaaaggccatcaccttgaaagccattttacaggtttgatgaagttaccaatttcagtacacctaaatttctacaaatagtccccttttacaagttgtaacaacaaagaccctataataaaattagatacaagaaattttgcagtggttatacatatttgagatatctagtatgttgccctagcagggatggcttaaaaactgtgattttttttcttcaagtaaaacttagtcccaaagtacatcataaatcaattttaattagaaaaatgaatcttaaatgaggggacataagtatactctttccacaaaatggcaataataaggcataaagctagtaaatctactaactgtaataaatgtatgacattattttgattgatacattaaaaaagagtttttagaacaaatatggcatttaactttattatttatttgcttttaagaaatattctttgtggaattgttgaataaactataaaatattattttgtattgcagctttaaagtggcacactccataataatctacttactagaaatagtggtgctaccacaaaaaatgttaaccatcagtaccattgtttgggagaaagaaacagatcaagaatgcatattattcagtgaccgctttcctagagttaaaatacctcctctttgtaaggtttgtaggtaaattgaggtataaactatggatgaaccaaataattagttcaaagtgttgtcatgattccaaatttgtggagtctggtgtttttaccatagaatgtgacagaagtacagtcatagctcagtagctatatgtatttgcctttatgttagaagagactttcttgagtgacatttttaaatagaggaggtattcactatgtttttctgtatcacagcagcattcctagtccttaggccctcggacagagtgaaatcatgagtatttatgagttcaatattgtcaaataaggctacagtatttgcttttttgtgtgaatgtattgcatataatgttcaagtagatgattttacatttatggacatataaaatgtctgattaccccattttatcagtcctgactgtacaagattgttgcaatttcagaatagcagttttataaattgatttatcttttaatctataacaatttgtgttagctgttcatttcaggattatattttctacaagttccacttgtgggactccttttgttgcccctatttttttttaaagaaggaagaaagaaaaataagtagcagtttaaaaatgagaatggagagaaaagaaaaagaatgaaaaggaaaggcagtaaagagggaaaaaaaggaaggatggaaggaatgaaggaaggaagggaggaaggggagaaggtaggaagaaagaaaggatgagagggaaggaagaatcagagtattagggtagttaacttacacatttgcattcttagtttaactgcaagtggtgtaactacgtttttcaatgatcgcatttgaaacataagtcctattataccattaagttcctattatgcagcaattatataataaaaagtactgcccaagttatagtaatgtgggtgtttttgagacactaaaagatttgagagggagaatttcaaacttaaagccacttttggggggtttataacttaactgaaaaattaatgcttcatcataacatttaagctatatctagaaagtagactggagaactgagaaaattacccaggtaattcagggaaaaaaaaaaatatatatatatataaatacccctacatttgaagtcagaaaactctgaaaaactgaattatcaaagtcaatcatctataatgatcaaatttactgaacaattgttaatttatccattgtgcttagctttgtgacacagccaaaagttacctatttaatcttttcaataaaaattgttttttgaaatccagaaatgatttaaaaagaggtcaggtttttaactatttattgaagtatgtggatgtacagtatttcaatagatatgaatatgaataaatggtatgccttaagattctttgaatatgtatttactttaaagactggaaaaagctcttcctgtcttttagtaaaacatccatatttcataacctgatgtaaaatatgttgtactgtttccaataggtgaatataaactcagtttatcaattaaaatatgtatttgactcattttaaaactctattagcttaagagaaagaaggaagaaataataatttgaagatatttctgctattctctttatttcctgtattacactcatctttctgcttactctaaagcagtacagggtaaaaattctagatgctacagtttcaaatgactccacactatattctttcttgctgttgctgattcctaaaaggtttgatgagctgaactacatctaaactaaaaataaattttctggaaacattttattattaattatttagaacctttacctggtaaaatacagcagagttagcaacagagactaaatatcctgttgataaaatcctgatgatcttacaggctaaacaactgaaaactcaaacgcttgtaagagccaggcagagtgtaatttcttaacagctgggtataaaacaacgggcacctgaaggtattcagatacaatttccttaaaaataccttggtttccaagcaaaacacgttatttggctgagaacctttagtttgtaaataccaaaccataatatacaaatgagatctcaagccaaatgaattttttaagccctctttcccatatctgttcatctatgatagtcaactgaataaatgagaacaatgtgatagataaaacaacaaagcataaaaaagattcatgcttggttttataagctattttgaaatataagtatcattgctattctgagaaatctatatacaccaaagccctccctccacaaaaaaactggaaatgttctaataaatgtctgatttccccca

SEQ ID NO: 158968 - DNA, 3215 bp, Homo sapiens
  Payload ID: 11106
  Gene Symbol: NGEF
  Gene Name: neuronal guanine nucleotide exchange factor
  Uniprot ID: Q8N5V2
  ENST ID: ENST00000264051
  CDS Start-End: 280-2412
aggtctaaaggtcgggaatgcttaccagtgaagcttttccaggacaggacgaagtttttggctgtgggctctctgggacagagtggagcgcctgtggatttagccggggacacaccatcctgctcgcaggtgcctggacaggacaggggacgagggaggaacactctctgaggaagcccaactcctatgagctcctctctggcagcactcaaaccagtgaagcttgggaaagtcattgacctccagtcgttctgctgagaaacatctggctctatttccatggagaccagggaatctgaagatttggaaaagacccggaggaaatcagcaagtgatcaatggaacactgataatgaaccagccaaggtgaaacctgagttactcccagaaaaagaggagacttctcaagctgaccaggatatccaagacaaagagcctcattgccacatcccaattaagagaaattccatcttcaatcgctccataagacgcaaaagcaaagccaaggccagagacaaccccgaacggaacgccagctgcctggcagattcacaggacaatggaaaatctgtaaatgagcccctgaccttgaatatcccctggagcagaatgcctccttgcagaacagcaatgcagacagacccaggagcccaggaaatgagtgagtcgtcctccaccccgggaaatggggccacgcccgaggagtggccggccctggccgacagccccaccacgctcaccgaggccctgcggatgatccaccccattcccgccgactcctggagaaacctcattgaacaaatagggctcctgtatcaggaataccgagataaatcgactctccaagaaatcgaaaccaggaggcaacaggatgcagaaatagaagacaataccaatgggtccccggccagtgaggacaccccggaggaggaagaagaagaggaggaggaggaggagccggccagcccaccagagaggaagactctgccccagatctgcctgctcagtaacccccactcaaggttcaacctctggcaggatcttcccgagatccggagcagcggggtgcttgagatcctacagcccgaggagattaagctgcaggaggccatgttcgagctggtcacttccgaggcgtcctactacaagagtctgaacctgctcgtgtcccacttcatggagaacgagcggataaggaagatcctgcacccgtccgaggcgcacatcctcttctccaacgtcctggacgtgctggctgtcagtgagcggttcctcctggagctggagcaccggatggaggagaacatcgtcatctctgacgtgtgtgacattgtgtaccgttatgcggccgaccacttctctgtctacatcacctacgtcagcaatcagacctaccaggagcggacctataagcagctgctccaggagaaggcagctttccgggagctgatcgcgcagctagagctcgaccccaagtgcagggggctgcccttctcctccttcctcatcctgcctttccagaggatcacacgcctcaagctgttggtccagaacatcctgaagagggtagaagagaggtctgagcgggagtgcactgctttggatgctcacaaggagctggaaatggtggtgaaggcatgcaacgagggcgtcaggaaaatgagccgcacggaacagatgatcagcattcagaagaagatggagttcaagatcaagtcggtgcccatcatctcccactcccgctggctgctgaagcagggtgagctgcagcagatgtcaggccccaagacctcccggaccctgaggaccaagaagctcttccacgaaatttacctcttcctgttcaacgacctgctggtgatctgccggcagattccaggagacaagtaccaggtatttgactcagctccgcggggactgctgcgtgtggaggagctggaggaccagggccagacgctggccaacgtgttcatcctgcggctgctggagaacgcagatgaccgggaggccacctacatgctaaaggcgtcctctcagagtgagatgaagcgttggatgacctcactggcccccaacaggaggaccaagtttgtttcgttcacatcccggctgctggactgcccccaggtccagtgcgtgcacccatacgtggctcagcagccagacgagctgacgctggagctcgccgacatcctcaacatcctggacaagactgacgacgggtggatctttggcgagcgtctgcacgaccaggagagaggctggttccccagctccatgactgaggagatcttgaatcccaagatccggtcccagaacctcaaggaatgtttccgtgtccacaagatggatgaccctcagcgcagccagaacaaggaccgcaggaagctgggcagccggaatcggcaatgacccccacccagggggccagcgggagcagggcctgcatgagaccccgacagaaggtgggggggggggggctctgggaagcacaggccagcacctccccaggtggcaggatctggcttggggtgcccggccctcatccctgcccacgcagtgagtgctcatgtgtcttggccccttgctcgcaaactggataaagggtgcccaagcctctcctgatgcatttgtaaacaagaaggtttcagcagtattacaccacctccctcatgcctccgagggggtggaagggggtgggcacactccagggccccccatgcccctggcccccagggactggaagaggctcccaacccagagtgtccctgtgggaggcaggcagaaggtgacaattgacacgatttcctgcacgcgtcctcctctaccttggaagcagttagaatctaccaggcacagatgaggccgcccttgcctgacggagcttgatgagcagcccttggtctccggttccaggactgagagcccagctgcctctgcccacccttccccaggcctctgccagcctctggctgcacggtcaggccctgccccatggcaggcctgccagagcttggctggggacccctcccgcctctggctccctgatgggctggatgtaacttgtgtcttctagccccttaaggagcccaggtgttttaaggaatgaattggtcactgcatcttgtatcgattatggttctgagaaaagcaaatatcacttttggctgcattaaaagaagcatcatatataaaataaagaagatgaaggtcta

SEQ ID NO: 158969 - DNA, 2286 bp, Homo sapiens
  Payload ID: 11106
  Gene Symbol: NGEF
  Gene Name: neuronal guanine nucleotide exchange factor
  Uniprot ID: Q8N5V2
  ENST ID: ENST00000373552
  CDS Start-End: 156-2012
ggagtgctcggcagcggtggcggcggcggctgcagctccggtcgagccgcgcgcgctgcgaccccgctccgcagcccgctagtcgcccccgacccagcccagggccccggcgtggcccccgacccggcccccgcacccgccccgccgccgaccctatggagctgctggccgctgccttcagcgccgcctgcgccgtggaccacgacagttccacctcggaaagcgacgcgcgcgactcggcggcgggacacctgcccggcagtgagtcgtcctccaccccgggaaatggggccacgcccgaggagtggccggccctggccgacagccccaccacgctcaccgaggccctgcggatgatccaccccattcccgccgactcctggagaaacctcattgaacaaatagggctcctgtatcaggaataccgagataaatcgactctccaagaaatcgaaaccaggaggcaacaggatgcagaaatagaagacaataccaatgggtccccggccagtgaggacaccccggaggaggaagaagaagaggaggaggaggaggagccggccagcccaccagagaggaagactctgccccagatctgcctgctcagtaacccccactcaaggttcaacctctggcaggatcttcccgagatccggagcagcggggtgcttgagatcctacagcccgaggagattaagctgcaggaggccatgttcgagctggtcacttccgaggcgtcctactacaagagtctgaacctgctcgtgtcccacttcatggagaacgagcggataaggaagatcctgcacccgtccgaggcgcacatcctcttctccaacgtcctggacgtgctggctgtcagtgagcggttcctcctggagctggagcaccggatggaggagaacatcgtcatctctgacgtgtgtgacattgtgtaccgttatgcggccgaccacttctctgtctacatcacctacgtcagcaatcagacctaccaggagcggacctataagcagctgctccaggagaaggcagctttccgggagctgatcgcgcagctagagctcgaccccaagtgcagggggctgcccttctcctccttcctcatcctgcctttccagaggatcacacgcctcaagctgttggtccagaacatcctgaagagggtagaagagaggtctgagcgggagtgcactgctttggatgctcacaaggagctggaaatggtggtgaaggcatgcaacgagggcgtcaggaaaatgagccgcacggaacagatgatcagcattcagaagaagatggagttcaagatcaagtcggtgcccatcatctcccactcccgctggctgctgaagcagggtgagctgcagcagatgtcaggccccaagacctcccggaccctgaggaccaagaagctcttccacgaaatttacctcttcctgttcaacgacctgctggtgatctgccggcagattccaggagacaagtaccaggtatttgactcagctccgcggggactgctgcgtgtggaggagctggaggaccagggccagacgctggccaacgtgttcatcctgcggctgctggagaacgcagatgaccgggaggccacctacatgctaaaggcgtcctctcagagtgagatgaagcgttggatgacctcactggcccccaacaggaggaccaagtttgtttcgttcacatcccggctgctggactgcccccaggtccagtgcgtgcacccatacgtggctcagcagccagacgagctgacgctggagctcgccgacatcctcaacatcctggacaagactgacgacgggtggatctttggcgagcgtctgcacgaccaggagagaggctggttccccagctccatgactgaggagatcttgaatcccaagatccggtcccagaacctcaaggaatgtttccgtgtccacaagatggatgaccctcagcgcagccagaacaaggaccgcaggaagctgggcagccggaatcggcaatgacccccacccagggggccagcgggagcagggcctgcatgagaccccgacagaaggtgggggggggggggctctgggaagcacaggccagcacctccccaggtggcaggatctggcttggggtgcccggccctcatccctgcccacgcagtgagtgctcatgtgtcttggccccttgctcgcaaactggataaagggtgcccaagcctctcctgatgcatttgtaaacaagaaggtttcagcagtattacaccacctccctcatgcctccgagggg

SEQ ID NO: 158970 - DNA, 1022 bp, Homo sapiens
  Payload ID: 11106
  Gene Symbol: NGEF
  Gene Name: neuronal guanine nucleotide exchange factor
  Uniprot ID: Q8N5V2
  ENST ID: ENST00000409079
  CDS Start-End: 156-872
ggagtgctcggcagcggtggcggcggcggctgcagctccggtcgagccgcgcgcgctgcgaccccgctccgcagcccgctagtcgcccccgacccagcccagggccccggcgtggcccccgacccggcccccgcacccgccccgccgccgaccctatggagctgctggccgctgccttcagcgccgcctgcgccgtggaccacgacagttccacctcggaaagcgacgcgcgcgactcggcggcgggacacctgcccggcagtgagtcgtcctccaccccgggaaatggggccacgcccgaggagtggccggccctggccgacagccccaccacgctcaccgaggccctgcggatgatccaccccattcccgccgactcctggagaaacctcattgaacaaatagggctcctgtatcaggaataccgagataaatcgactctccaagaaatcgaaaccaggaggcaacaggatgcagaaatagaagacaataccaatgggtccccggccagtgaggacaccccggaggaggaagaagaagaggaggaggaggaggagccggccagcccaccagagaggaagactctgccccagatctgcctgctcagtaacccccactcaaggttcaacctctggcaggatcttcccgagatccggagcagcggggtgcttgagatcctacagcccgaggagattaagctgcaggaggccatgttcgagctggtcacttccgaggcgtcctactacaagagtctgaacctgctcgtgtcccacttcatggagaacgagcggataaggaagatcctgcacccgtccgaggcgcacatcctcttctccaacgtcctggacgtgctggctgtcagtgagcggtgaggacgggggggacagccacctccctcagggcccttcttcatccccagggcacatgcttgagacactgatgacaagtgctcgatactggcttctctacttccagatgtttggaatgttccataataaaatataaataaatgaagaactaaa

SEQ ID NO: 158971 - DNA, 569 bp, Homo sapiens
  Payload ID: 11106
  Gene Symbol: NGEF
  Gene Name: neuronal guanine nucleotide exchange factor
  ENST ID: ENST00000424488
  CDS Start-End: 120-569
attccacgcagagggaaccgcttgtgcaaaggccccaagactgcaagaacatcctgaagagggtagaagagaggtctgagcgggagtgcactgctttggatgctcacaaggagctggaaatggtggtgaaggcatgcaacgagggcgtcaggaaaatgagccgcacggaacagatgatcagcattcagaagaagatggagttcaagatcaagtcggtgcccatcatctcccactcccgctggctgctgaagcagggtgagctgcagcagatgtcaggccccaagacctcccggaccctgaggaccaagaagctcttccacgaaatttacctcttcctgttcaacgacctgctggtgatctgccggcagattccaggagacaagtaccaggtatttgactcagctccgcggggactgctgcgtgtggaggagctggaggaccagggccagacgctggccaacgtgttcatcctgcggctgctggagaacgcagatgaccgggaggccacctacatgctaaaggcgtcctctcagagtgagatgaagcgttggatgacctcactggccccc

SEQ ID NO: 158972 - DNA, 667 bp, Homo sapiens
  Payload ID: 11106
  Gene Symbol: NGEF
  Gene Name: neuronal guanine nucleotide exchange factor
  ENST ID: ENST00000416114
  CDS Start-End: 105-667
aacacaggggtcgggagaagccaaaaaaacaacccaaatcaggctggaatgcacggcccagaggtccacggcgaaccctggatcataaggagaccgtgtaggccatgttcgagctggtcacttccgaggcgtcctactacaagagtctgaacctgctcgtgtcccacttcatggagaacgagcggataaggaagatcctgcacccgtccgaggcgcacatcctcttctccaacgtcctggacgtgctggctgtcagtgagcggttcctcctggagctggagcaccggatggaggagaacatcgtcatctctgacgtgtgtgacattgtgtaccgttatgcggccgaccacttctctgtctacatcacctacgtcagcaatcagacctaccaggagcggacctataagcagctgctccaggagaaggcagctttccgggagctgatcgcgcagctagagctcgaccccaagtgcagggggctgcccttctcctccttcctcatcctgcctttccagaggatcacacgcctcaagctgttggtccagaacatcctgaagagggtagaagagaggtctgagcgggagtgcactgctttggatgctcacaaggagctggaaatggtggtgaaggcatgcaacgagggcgtcaggaaaatgagccgcacgga

SEQ ID NO: 158973 - DNA, 460 bp, Homo sapiens
  Payload ID: 11106
  Gene Symbol: NGEF
  Gene Name: neuronal guanine nucleotide exchange factor
  ENST ID: ENST00000414326
  CDS Start-End: 1-293
ctgagttactcccagaaaaagaggagacttctcaagctgaccaggatatccaagacaaagagcctcattgccacatcccaattaagagaaattccatcttcaatcgctccataagacgcaaaagcaaagccaaggccagagacaaccccgaacggaacgccagctgcctggcagattcacaggacaatggaaaatctgtaaatgagcccctgaccttgaatatcccctggagcagaatgcctccttgcagaacagcaatgcagacagacccaggagcccaggaaatgaggtaagagatggcagatcatgaggaatgctggtctgggaaagatgcatcagaggtcattgctgcaaagacttgacagggttacgagggtgtcatgttaaaaaaaataataataacttttggttgcccgtgctaaaaaaataaataaataaaaactccataatttaaaaaaaa

SEQ ID NO: 158974 - DNA, 1341 bp, Homo sapiens
  Payload ID: 11107
  Gene Symbol: NPAS1
  Gene Name: neuronal PAS domain protein 1
  Uniprot ID: Q99742
  ENST ID: ENST00000439365
  CDS Start-End: 37-741
aatgggagtcatggcagccatggtggtcaggtggagatgacgggcagcagcgtcttcgactacattcaccctggggaccactcagaggtgctggagcaactggggctgcggacgccgacgcccggccccccaaccccgccctccgtctcctcttcctcctcctcttcctcttcgcttgcagatacccccgagatcgaggccagcctcaccaaggtgcccccctcctccctggtccaggagcgctccttctttgtccgcatgaaatccacgctcaccaagagggggctgcacgtcaaggcctcagggtacaaggtcatccacgtgactgggcgccttcgggcccacgccctgggccttgtggccctcgggcacacgttgcccccggcccccctggctgagctgccactccatggacacatgatcgtcttccgtctcagcctgggtctcaccatccttgcttgtgagagcagagtcagcgaccacatggacctggggccctcagagctggtgggccgcagctgctaccagtttgtccacggacaggacgccacgaggatccgccagagccacgtggactcgtgccgggggcttcgtgtggctgcagtctgtggccacagtggctgggagcgggaagagccccggggagcaccatgtgctttgggtcagccacgtgctcagccaagccgagggtggccaaactcctttggatgccttccagcttccagccagcgtggcctgtgaggaggcatccagcccggggccagagcccacagagccggagcctccgacggaagggaagcaggctgccccagcggagaacgaggccccccagacccagggcaaacgcatcaaagtggagcccggcccgagggaaaccaaaggctccgaggacagtggcgacgaggatccctccagccacccggccacaccgaggcccgagttcacctctgtcatccgggcaggggtcctgaagcaggatccggtgcggccatggggcctggcgcctcccggggaccccccgcccaccctcctgcacgcgggcttcctgccgccggtggtgcggggcctgtgcacacccggcaccatccgctacggccccgcggagctgggcctggtgtacccgcacctgcagaggctgggtccgggccccgcgctcccggaggccttttacccgcccctgggcctgccctacccggggcccgcgggcaccaggctgccgcggaagggggactgaggactggcagagctgccggcgccggaccctgcgacaaccggggtcccccaggacagtaggcccggctctgcccgtagccctgagaattaaacgccggctctccctgc

SEQ ID NO: 158975 - DNA, 2043 bp, Homo sapiens
  Payload ID: 11107
  Gene Symbol: NPAS1
  Gene Name: neuronal PAS domain protein 1
  Uniprot ID: Q99742
  ENST ID: ENST00000449844
  CDS Start-End: 163-1935
tcatccaggcccccccccccccagctccttgctgggaccctgagccctgcacggatctcagtttccctagaaggtctcccgagggcactaagcgttgcccctggccccctcccgctgcaggagactcggggctcggagcccgcctgagcgagccccccggagatggcggccccctatcccggcagtggcggcggaagcgaggtcaaatgcgtgggaggccgcggcgccagcgtcccctgggactttctacccgggctgatggtcaaggcgccgtccggaccgtgcctgcaggcgcagcgcaaggagaagtcccggaacgcggcgcgctcgcggcgcgggaaggagaacctggagttcttcgagctggccaagcttctcccgctgcccggcgccatctccagccagctggacaaggcttccatcgtgcgcctcagcgtcacctacctccgcctgcgccggttcgccgcgctgggggcgccgccctgggggctgagagccgcggggccgccagctggcctcgccccaggccgccgcggccccgcagcgctggtctccgaagtcttcgagcagcacctgggaggtcacatcttgcagtccctggatggctttgtgttcgccttgaaccaggaaggaaaattcctctacatctcagagacagtctccatctatctgggtctctcacaggtggagatgacgggcagcagcgtcttcgactacattcaccctggggaccactcagaggtgctggagcaactggggctgcggacgccgacgcccggccccccaaccccgccctccgtctcctcttcctcctcctcttcctcttcgcttgcagatacccccgagatcgaggccagcctcaccaaggtgcccccctcctccctggtccaggagcgctccttctttgtccgcatgaaatccacgctcaccaagagggggctgcacgtcaaggcctcagggtacaaggtcatccacgtgactgggcgccttcgggcccacgccctgggccttgtggccctcgggcacacgttgcccccggcccccctggctgagctgccactccatggacacatgatcgtcttccgtctcagcctgggtctcaccatccttgcttgtgagagcagagtcagcgaccacatggacctggggccctcagagctggtgggccgcagctgctaccagtttgtccacggacaggacgccacgaggatccgccagagccacgtggacttgctggacaagggtcaggtgatgactggttactaccgttggctgcagcgtgccgggggcttcgtgtggctgcagtctgtggccacagtggctgggagcgggaagagccccggggagcaccatgtgctttgggtcagccacgtgctcagccaagccgagggtggccaaactcctttggatgccttccagcttccagccagcgtggcctgtgaggaggcatccagcccggggccagagcccacagagccggagcctccgacggaagggaagcaggctgccccagcggagaacgaggccccccagacccagggcaaacgcatcaaagtggagcccggcccgagggaaaccaaaggctccgaggacagtggcgacgaggatccctccagccacccggccacaccgaggcccgagttcacctctgtcatccgggcaggggtcctgaagcaggatccggtgcggccatggggcctggcgcctcccggggaccccccgcccaccctcctgcacgcgggcttcctgccgccggtggtgcggggcctgtgcacacccggcaccatccgctacggccccgcggagctgggcctggtgtacccgcacctgcagaggctgggtccgggccccgcgctcccggaggccttttacccgcccctgggcctgccctacccggggcccgcgggcaccaggctgccgcggaagggggactgaggactggcagagctgccggcgccggaccctgcgacaaccggggtcccccaggacagtaggcccggctctgcccgtagccctgagaattaaacgccggctctccctgca

SEQ ID NO: 158976 - DNA, 498 bp, Homo sapiens
  Payload ID: 11107
  Gene Symbol: NPAS1
  Gene Name: neuronal PAS domain protein 1
  ENST ID: ENST00000594257
  CDS Start-End: 16-303
ggtggtcaggtggagatgacgggcagcagcgtcttcgactacattcaccctggggaccactcagaggtgctggagcaactggggctgcggacgccgacgcccggccccccaaccccgccctccgtctcctcttcctcctcctcttcctcttcgcttgcagatacccccgagatcgagtcagcgaccacatggacctggggccctcagagctggtgggccgcagctgctaccagtttgtccacggacaggacgccacgaggatccgccagagccacgtggacttgctggacaagggtcaggtgatgactggttactaccgttggctgcagcgtgccgggggcttcgtgtggctgcagtctgtggccacagtggctgggagcgggaagagccccggggagcaccatgtgctttgggtcagccacgtgctcagccaagccgagggtggccaaactcctttggatgccttccagcttccagccagcgtggcctgtgaggagg

SEQ ID NO: 158977 - DNA, 2117 bp, Homo sapiens
  Payload ID: 11107
  Gene Symbol: NPAS1
  Gene Name: neuronal PAS domain protein 1
  Uniprot ID: Q99742
  ENST ID: ENST00000602212
  CDS Start-End: 221-1993
gtctccaagtctgcgaggccgaggtgggcgccgagagctgggcgccacagcccgcgcgtcccgctgcgccccgcgcgccccggggtctatggagctgcccctccgcgccgcccggccggccccacgccgcgcccggagcctgctctgcggccaagtaatcggactggcggtcctgcgggagactcggggctcggagcccgcctgagcgagccccccggagatggcggccccctatcccggcagtggcggcggaagcgaggtcaaatgcgtgggaggccgcggcgccagcgtcccctgggactttctacccgggctgatggtcaaggcgccgtccggaccgtgcctgcaggcgcagcgcaaggagaagtcccggaacgcggcgcgctcgcggcgcgggaaggagaacctggagttcttcgagctggccaagcttctcccgctgcccggcgccatctccagccagctggacaaggcttccatcgtgcgcctcagcgtcacctacctccgcctgcgccggttcgccgcgctgggggcgccgccctgggggctgagagccgcggggccgccagctggcctcgccccaggccgccgcggccccgcagcgctggtctccgaagtcttcgagcagcacctgggaggtcacatcttgcagtccctggatggctttgtgttcgccttgaaccaggaaggaaaattcctctacatctcagagacagtctccatctatctgggtctctcacaggtggagatgacgggcagcagcgtcttcgactacattcaccctggggaccactcagaggtgctggagcaactggggctgcggacgccgacgcccggccccccaaccccgccctccgtctcctcttcctcctcctcttcctcttcgcttgcagatacccccgagatcgaggccagcctcaccaaggtgcccccctcctccctggtccaggagcgctccttctttgtccgcatgaaatccacgctcaccaagagggggctgcacgtcaaggcctcagggtacaaggtcatccacgtgactgggcgccttcgggcccacgccctgggccttgtggccctcgggcacacgttgcccccggcccccctggctgagctgccactccatggacacatgatcgtcttccgtctcagcctgggtctcaccatccttgcttgtgagagcagagtcagcgaccacatggacctggggccctcagagctggtgggccgcagctgctaccagtttgtccacggacaggacgccacgaggatccgccagagccacgtggacttgctggacaagggtcaggtgatgactggttactaccgttggctgcagcgtgccgggggcttcgtgtggctgcagtctgtggccacagtggctgggagcgggaagagccccggggagcaccatgtgctttgggtcagccacgtgctcagccaagccgagggtggccaaactcctttggatgccttccagcttccagccagcgtggcctgtgaggaggcatccagcccggggccagagcccacagagccggagcctccgacggaagggaagcaggctgccccagcggagaacgaggccccccagacccagggcaaacgcatcaaagtggagcccggcccgagggaaaccaaaggctccgaggacagtggcgacgaggatccctccagccacccggccacaccgaggcccgagttcacctctgtcatccgggcaggggtcctgaagcaggatccggtgcggccatggggcctggcgcctcccggggaccccccgcccaccctcctgcacgcgggcttcctgccgccggtggtgcggggcctgtgcacacccggcaccatccgctacggccccgcggagctgggcctggtgtacccgcacctgcagaggctgggtccgggccccgcgctcccggaggccttttacccgcccctgggcctgccctacccggggcccgcgggcaccaggctgccgcggaagggggactgaggactggcagagctgccggcgccggaccctgcgacaaccggggtcccccaggacagtaggcccggctctgcccgtagccctgagaattaaacgccggctctccctgcagtggtttgggctccgg

SEQ ID NO: 158978 - DNA, 763 bp, Homo sapiens
  Payload ID: 11107
  Gene Symbol: NPAS1
  Gene Name: neuronal PAS domain protein 1
  ENST ID: ENST00000594670
  CDS Start-End: 122-763
atggtggtcagcgcacctgcgtgcaggcaaatgaggcaaggctgagcccagagggcgagcgagttactgcgcgcgcacctcacccgccccctgcattcccctccttcgccggcaggtggagatgacgggcagcagcgtcttcgactacattcaccctggggaccactcagaggtgctggagcaactggggctgcggacgccgacgcccggccccccaaccccgccctccgtctcctcttcctcctcctcttcctcttcgcttgcagatacccccgagatcgaggccagcctcaccaaggtgcccccctcctccctggtccaggagcgctccttctttgtccgcatgaaatccacgctcaccaagagggggctgcacgtcaaggcctcagggtacaaggtcatccacgtgactgggcgccttcgggcccacgccctgggccttgtggccctcgggcacacgttgcccccggcccccctggctgagctgccactccatggacacatgatcgtcttccgtctcagcctgggtctcaccatccttgcttgtgagagcagagtcagcgaccacatggacctggggccctcagagctggtgggccgcagctgctaccagtttgtccacggacaggacgccacgaggatccgccagagccacgtggactcgtgccgggggcttcgtgtggctgcagtctgtggccacagtggctgggagcgggaagagccccggggagcaccatgtgctttgggtcagccacgtgctcag

SEQ ID NO: 158979 - DNA, 1643 bp, Homo sapiens
  Payload ID: 11107
  Gene Symbol: NPAS1
  Gene Name: neuronal PAS domain protein 1
  ENST ID: ENST00000602189
  CDS Start-End: 320-1567
gccgagagctgggcgccacagcccgcgcgtcccgctgcgccccgcgcgccccggggtctatggagctgcccctccgcgccgcccggccggccccacgccgcgcccggagcctgctctgcggccaagtaatcggactggcggtcctgcggccccaggccgccgcggccccgcagcgctggtctccgaagtcttcgagcagcacctgggaggtcacatcttgcagtccctggatggctttgtgttcgccttgaaccaggaaggaaaattcctctacatctcagagacagtctccatctatctgggtctctcacaggtggagatgacgggcagcagcgtcttcgactacattcaccctggggaccactcagaggtgctggagcaactggggctgcggacgccgacgcccggccccccaaccccgccctccgtctcctcttcctcctcctcttcctcttcgcttgcagatacccccgagatcgaggccagcctcaccaaggtgcccccctcctccctggtccaggagcgctccttctttgtccgcatgaaatccacgctcaccaagagggggctgcacgtcaaggcctcagggtacaagcaggtcatccacgtgactgggcgccttcgggcccacgccctgggccttgtggccctcgggcacacgttgcccccggcccccctggctgagctgccactccatggacacatgatcgtcttccgtctcagcctgggtctcaccatccttgcttgtgagagcagagtcagcgaccacatggacctggggccctcagagctggtgggccgcagctgctaccagtttgtccacggacaggacgccacgaggatccgccagagccacgtggacttgctggacaagggtcaggtgatgactggttactaccgttggctgcagcgtgccgggggcttcgtgtggctgcagtctgtggccacagtggctgggagcgggaagagccccggggagcaccatgtgctttgggtcagccacgtgctcagccaagccgagggtggccaaactcctttggatgccttccagcttccagccagcgtggcctgtgaggaggcatccagcccggggccagagcccacagagccggagcctccgacggaagggaagcaggctgccccagcggagaacgaggccccccagacccagggcaaacgcatcaaagtggagcccggcccgagggaaaccaaaggctccgaggacagtggcgacgaggatccctccagccacccggccacaccgaggcccgagttcacctctgtcatccgggcaggggtcctgaagcaggatccggtgcggccatggggcctggcgcctcccggggaccccccgcccaccctcctgcacgcgggcttcctgccgccggtggtgcggggcctgtgcacacccggcaccatccgctacggccccgcggagctgggcctggtgtacccgcacctgcagaggctgggtccgggccccgcgctcccggaggccttttacccgcccctgggcctgccctacccggggcccgcgggcaccaggctgccgcggaagggggactgaggactggcagagctgccggcgccggaccctgcgacaaccggggtcccccaggacagtaggcccggctctgcccgta

SEQ ID NO: 158980 - DNA, 4007 bp, Homo sapiens
  Payload ID: 11108
  Gene Symbol: NPAS2
  Gene Name: neuronal PAS domain protein 2
  Uniprot ID: Q99743
  ENST ID: ENST00000335681
  CDS Start-End: 286-2760
tttgccgcgcgagcagccggcctctcgcaggagccgagggacccgcgcggctgcggcccaggagcggcggccgcggagcccggagacccgcagccgcggcggcggcggcggcggcggcagcagctagagcagcgcctcccgccgccgcccgggaggagctcgccgcgcccgctcgccgcctcgtctcccagcggcggcgggaggcgcgtctccccggcccagtccgcgcccggccccgcggggccgctccggcccgctccgaggaaaaactgcatagaaaatctaatggatgaagatgagaaagacagagccaagagagcttctcgaaacaagtctgagaagaagcgtcgggaccagttcaatgttctcatcaaagagctcagttccatgctccctggcaacacgcggaaaatggacaaaaccaccgtgttggaaaaggtcatcggatttttgcagaaacacaatgaagtctcagcgcaaacggaaatctgtgacattcagcaagactggaagccttcattcctcagtaatgaagaattcacccagctgatgttggaggcattagatggcttcattatcgcagtgacaacagacggcagcatcatctatgtctctgacagtatcacgcctctccttgggcatttaccgtcggatgtcatggatcagaatttgttaaatttcctcccagaacaagaacattcagaagtttataaaatcctttcttcccatatgcttgtgacggattccccctccccagaatacttaaaatctgacagcgatttagagttttattgccatcttctcagaggcagcttgaacccaaaggaatttccaacttatgaatacataaaatttgtaggaaattttcgctcttacaacaatgtgcctagcccctcctgtaatggttttgacaacaccctttcaagaccttgccgggtgccactaggaaaggaggtttgcttcattgccaccgttcgtctggcaacaccacaattcttaaaggaaatgtgcatagttgacgaacctttagaggaattcacttcaaggcatagcttggaatggaaatttttatttctggatcacagagcacctccaatcataggatacctgccttttgaagtgctgggaacctcaggctatgactactaccacattgatgacctggagctcctggccaggtgtcaccagcacctgatgcagtttggcaaagggaagtcgtgttgctaccggtttctgaccaaaggtcagcagtggatctggctgcagactcactactacatcacctaccatcagtggaactccaagcccgagttcatcgtgtgcacacactcggtggtcagttacgcagatgtccgggtggaaaggaggcaggagctggctctggaagacccgccatccgaggccctccactcctcagcactaaaggacaagggctcaagcctggaacctcggcagcactttaacacactcgacgtgggtgcctcgggccttaataccagtcattcgccatcggcgtcctcaagaagttcccacaaatcctcgcacacagccatgtcagaacccacctccactcccaccaagctgatggcagaggccagcaccccggctttgccaagatcagccaccctgccccaagagttacctgtccccgggctcagccaggcagccaccatgccggcccctctgccttccccatcgtcctgcgacctcacacagcagctcctgcctcagaccgttctgcagagcacgcccgctcccatggcacagttttcggcacagttcagcatgttccagaccatcaaagaccagctagagcagcggacgcggatcctgcaggccaatatccggtggcaacaggaagagctccacaagatccaggagcagctctgcctggtccaggactccaacgtccagatgttcctgcagcagccagctgtatccctgagcttcagcagcacccagcgacctgaggctcagcagcagctacagcaaaggtcagctgcagtgactcagccccagctcggggcgggcccccaacttccagggcagatctcctctgcccaggtcacaagccagcacctgctcagagaatcaagtgtgatatcaacccagggtccaaagccaatgagaagctcacagctaatgcagagcagcggccgctctggaagcagcctagtgtccccgttcagcagcgccacagctgcgctcccgccaagtctgaatctgaccacacctgcttccacctcccaggatgccagccagtgccagcccagcccagacttcagccatgatcggcagctcaggctgttgctgagccagcccatccagcccatgatgcccgggtcctgtgacgcaaggcagccctcggaagtcagcaggacgggacggcaagtcaagtacgcccagagccagaccgtgtttcaaaatccagacgcacaccccgccaacagcagcagcgccccgatgcccgtcctgctgatggggcaggcggtgctccaccccagcttccctgcctcccaaccatcgcccctgcagcctgcacaggcccggcagcagccaccgcagcactacctgcaggtacaggcaccaacctctttgcacagtgagcagcaggactcgctacttctctccacctactcacaacagccagggaccctgggctacccccaaccacccccagcacagccccagcccctacgtcctccccgaagggtcagcagtctgtctgagtcgtcaggcctccagcagccgccccgataatgccccggcactgaagtcgggacacaatcagctttaaccaatggatgaggggggtggccacaggagatggggagaggagtctgaactaaacccctggcttttgtgcacactgcatacgtttcagaactcctggatggtaaccatctctggagtgcagcgcttgctgcagtggaaatgatcaggaatactgaccgtgtttctcttgcctccgaggttcttgggcacactctatagccatactggacaggaaccaggtgccccgtgtaggcatcgtcggtcggtttgccgtcagagatggcgcatctcgctgcatcccccgagagtacaccggttgctctagccacctgcggcccgcccatctgcgctagctggccttcacgctcttgatcgtctttcctttgtattggagaaggactgggtcagagatctgttggagagagagaataaagagattatttttcattatttttaaatggttgtttttgttttaatttgcacagctacacagaggaaataacttaggcactttctgttttttttaaaaaaataataaggtctcatggcttcatttagagaccacagtaacaacagcagcccaccaatcagagaagctggttgttattaaccaagctacagattcacactttctggcctaaaccctaatgggatgaggcttttcaccccaggccatgctggtggtgattttttagcccctaaataaaacactggactatttcctgtttacttcattgattgcaactacaaaggtggactcaaagcaaagcacaatcatgccagccaacattccagaattctgctgagaactccaagtctgtgaggggagaggttttacaagccagacaggcctgggggactgcagtccccaaggagaccctgccacatgctggccctttgagtgagaatgctgcatctttctacatatcttcatgagaatactgagaattggattttccttttcaaaatgcactttgctttttttgtatgttttgttatgttgagatgtttctaaagaaaagattttatgtaattataagatgaagcgtagtgaattgtacagctgttgtaataatgacctatttctatataaaataaaattgtatggcttatgtgtaaattattttgtatctgagataccagttccttttcccaaatataaaagtataaaagttttcttgtgtttttctgtgagtgaaaattttgtaataaattaacaaatttgtacaatt

SEQ ID NO: 158981 - DNA, 774 bp, Homo sapiens
  Payload ID: 11108
  Gene Symbol: NPAS2
  Gene Name: neuronal PAS domain protein 2
  ENST ID: ENST00000448812
  CDS Start-End: 1-774
agcttctcgaaacaagtctgagaagaagcgtcgggaccagttcaatgttctcatcaaagagctcagttccatgctccctggcaacacgcggaaaatggacaaaaccaccgtgttggaaaaggtcatcggatttttgcagaaacacaatgaagtctcagcgcaaacggaaatctgtgacattcagcaagactggaagccttcattcctcagtaatgaagaattcacccagctgatgttggaggcattagatggcttcattatcgcagtgacaacagacggcagcatcatctatgtctctgacagtatcacgcctctccttgggcatttaccgtcggatgtcatggatcagaatttgttaaatttcctcccagaacaagaacattcagaagtttataaaatcctttcttcccatatgcttgtgacggattccccctccccagaatacttaaaatctgacagcgatttagagttttattgccatcttctcagaggcagcttgaacccaaaggaatttccaacttatgaatacataaaatttgtaggaaattttcgctcttacaacaatgtgatgcagtttggcaaagggaagtcgtgttgctaccggtttctgaccaaaggtcagcagtggatctggctgcagactcactactacatcacctaccatcagtggaactccaagcccgagttcatcgtgtgcacacactcggtggtcagttacgcagatgtccgggtggaaaggaggcaggagctggctctggaagacccgccatccga

SEQ ID NO: 158982 - DNA, 607 bp, Homo sapiens
  Payload ID: 11108
  Gene Symbol: NPAS2
  Gene Name: neuronal PAS domain protein 2
  ENST ID: ENST00000450763
  CDS Start-End: 1-607
cttaataccagtcattcgccatcggcgtcctcaagaagttcccacaaatcctcgcacacagccatgtcagaacccacctccactcccaccaagctgatggcagaggccagcaccccggctttgccaagatcagccaccctgccccaagagttacctgtccccgggctcagccaggcagccaccatgccggcccctctgccttccccatcgtcctgcgacctcacacagcagctcctgcctcagaccgttctgcagagcacgcccgctcccatggcacagttttcggcacagttcagcatgttccagaccatcaaagaccagctagagcagcggacgcggatcctgcaggccaatatccggtggcaacaggaagagctccacaagatccaggagcagctctgcctggtccaggactccaacgtccaggtacgcccagagccagaccgtgtttcaaaatccagacgcacaccccgccaacagcagcagcgccccgatgcccgtcctgctgatggggcaggcggtgctccaccccagcttccctgcctcccaaccatcgcccctgcagcctgcacaggcccggcagcagccaccgcagcactacctgcag

SEQ ID NO: 158983 - DNA, 1047 bp, Homo sapiens
  Payload ID: 11108
  Gene Symbol: NPAS2
  Gene Name: neuronal PAS domain protein 2
  ENST ID: ENST00000433408
  CDS Start-End: 1-808
ccagaccatcaaagaccagctagagcagcggacgcggatcctgcaggccaatatccggtggcaacaggaagagctccacaagatccaggagcagctctgcctggtccaggactccaacgtccagatgttcctgcagcagccagctgtatccctgagcttcagcagcacccagcgacctgaggctcagcagcagctacagcaaaggtcagctgcagtgactcagccccagctcggggcgggcccccaacttccagggcagatctcctctgcccaggtcacaagccagcacctgctcagagaatcaagtgtgatatcaacccagggtccaaagccaatgagaagctcacagctaatgcagagcagcggccgctctggaagcagcctagtgtccccgttcagcagcgccacagctgcgctcccgccaagtctgaatctgaccacacctgcttccacctcccaggatgccagccagtgccagcccagcccagacttcagccatgatcggcagctcaggctgttgctgagccagcccatccagcccatgatgcccgggtcctgtgacgcaaggcagccctcggaagtcagcaggacgggacggcaagtcaagtacgcccagagccagaccgtgtttcaaaatccagacgcacaccccgccaacagcagcagcgccccgatgcccgtcctgctgatggggcaggcggtgctccaccccagcttccctgcctcccaaccatcgcccctgcagcctgcacaggcccggcagcagccaccgcagcactacctgcaggttcttgggcacactctatagccatactggacaggaaccaggtgccccgtgtaggcatcgtcggtcggtttgccgtcagagatggcgcatctcgctgcatcccccgagagtacaccggttgctctagccacctgcggcccgcccatctgcgctagctggccttcacgctcttgatcgtctttcctttgtattggagaaggactgggtcagagatctgttggagagagagaataaagagattatttttcattatttttaaa

SEQ ID NO: 158984 - DNA, 321 bp, Homo sapiens
  Payload ID: 11108
  Gene Symbol: NPAS2
  Gene Name: neuronal PAS domain protein 2
  ENST ID: ENST00000451740
  CDS Start-End: 1-321
tctgagaagaagcgtcgggaccagttcaatgttctcatcaaagagctcagttccatgctccctggcaacacgcggaaaatggacaaaaccaccgtgttggaaaaggtcatcggatttttgcagaaacacaatggtaaagaagtctcagcgcaaacggaaatctgtgacattcagcaagactggaagccttcattcctcagtaatgaagaattcacccagctgatgttggaggcattagatggcttcattatcgcagtgacaacagacggcagcatcatctatgtctctgacagtatcacgcctctccttgggcatttaccg

SEQ ID NO: 158985 - DNA, 625 bp, Homo sapiens
  Payload ID: 11108
  Gene Symbol: NPAS2
  Gene Name: neuronal PAS domain protein 2
  ENST ID: ENST00000427413
  CDS Start-End: 3-625
ggatgtatgcgtatggttttgttgggagatgtgcccctttcccagccgaggagggacgcacctttgacctttctgaagagctgggcaggtcggtaaccagggaagggacaggcaccacccggctaaattcagaaccagtcccgctcctctgcttgccactccttaattgctcaaggaaaaactgcatagaaaatctaatggatgaagatgagaaagacagagccaagagagcttctcgaaacaagtctgagaagaagcgtcgggaccagttcaatgttctcatcaaagagctcagttccatgctccctggcaacacgcggaaaatggacaaaaccaccgtgttggaaaaggtcatcggatttttgcagaaacacaatgaagtctcagcgcaaacggaaatctgtgacattcagcaagactggaagccttcattcctcagtaatgaagaattcacccagctgatgttggaggcattagatggcttcattatcgcagtgacaacagacggcagcatcatctatgtctctgacagtatcacgcctctccttgggcatttaccgtcggatgtcatggatcagaatttgttaaatttcctcccagaacaagaacattcagaagtttataa

SEQ ID NO: 158986 - DNA, 5847 bp, Homo sapiens
  Payload ID: 11109
  Gene Symbol: NPAS3
  Gene Name: neuronal PAS domain protein 3
  Uniprot ID: Q8IXF0
  ENST ID: ENST00000346562
  CDS Start-End: 75-2780
ccgcccgcccacgccccccacccgggaggggggagagaggcaaaaagtaagagaggaaaaaaaatagcaggaagatggcgcccaccaagcccagctttcagcaggatccttccaggcgagaacgtttacaagcattgagaaaggagaaatcccgagatgctgctcgctcccgccggggaaaagaaaactttgagttctatgaattggccaagttgttgcctcttcctgcagccattaccagccagctcgacaaggcatccatcattcgacttacaattagctatctgaaaatgagggactttgctaaccagggggaccctccgtggaacttgcgaatggaaggccctccacctaacacatcagtaaaaggtgcacagcgaaggagaagccccagtgcactagccattgaagtatttgaagcacatttgggaagccacattttgcagtccctggatggctttgtatttgcactaaatcaggaaggaaaatttttgtacatttccgaaacagtctccatctacctaggcctctcacaagtggagctgacaggcagcagtgtctttgactatgtccaccccggagatcacgtggagatggctgagcagctgggcatgaagctcccccctgggcggggtctcctgtcacagggcactgctgaggacggagccagctcagcatcttcctcctctcagtcggagacccccgagccagtggagtcaaccagccccagtctgctaaccactgacaacactcttgagcgttcctttttcatccgaatgaaatctactctgaccaaacgcggtgtgcacatcaaatcatcaggatataaggtgattcacataacaggccggctacgcctgagagtgtcgctgtcccacgggaggaccgtccccagccaaatcatgggtctcgtggttgttgcgcatgccttgcctccccctacgatcaatgaagtcagaattgactgccatatgttcgtcactcgagtaaatatggacctcaatatcatttactgtgaaaataggattagtgattatatggatctgacccctgtagatatcgtagggaagagatgctaccacttcatccatgctgaagacgtggagggcatcaggcacagtcacttggacttgctgaataagggtcagtgtgtgacaaagtactatcgctggatgcagaagaacggaggatatatttggatacagtccagtgccaccatagctattaatgccaagaatgcaaatgaaaagaatatcatctgggtgaattaccttcttagcaatcctgagtacaaggacacacccatggacatcgcacagctcccccatctgccggagaaaacttccgaatcctcggagacatccgactctgagtcagactctaaagacacctcaggtattacagaggacaacgagaactccaagtccgacgagaaggggaaccagtccgagaacagcgaagacccggagcccgaccggaagaagtcgggcaacgcgtgtgacaacgacatgaactgcaacgacgacggccacagctccagtaacccggacagccgcgacagcgacgacagcttcgagcactcggactttgagaaccccaaggcgggcgaggacggcttcggtgctctgggcgcgatgcagatcaaggtggagcgctacgtggagagcgagtcggacctgcggctgcagaactgcgagtcactcacgtccgacagcgccaaggactcggacagcgcaggcgaggcgggcgcgcaggcctccagcaagcaccagaagcgcaagaaaaggcggaaacggcaaaagggcggcagcgccagccgccggcgcctgtccagcgcgtcgagcccaggcggcctggacgcgggcctggtggagcccccgcggctgctgtcctcccccaacagtgcctcggtgctcaagatcaagacggagatctcagaacccatcaatttcgacaatgacagcagcatctggaactacccgcccaaccgggagatctccaggaacgagtccccctacagcatgaccaagccccccagctctgagcacttcccgtccccgcagggcggcggcggtgggggtggcggtggcggggggctgcacgtggccattcccgactcggtcctcaccccgcccggcgccgacggcgcggccgcccgcaagactcagttcggcgcctcggccaccgcggccctggcccccgtcgcctccgacccgctgtcacccccgctctcggcgtccccgcgggacaagcaccccgggaacggcggcgggggcgggggcgggggcggcggcgcggggggcggcggccccagcgcgtccaactccttgctgtacactggggacctggaggcgctgcagaggttgcaggcgggcaacgtcgtgctcccgctggtgcacagggtgaccgggaccctggccgccaccagcacggccgcgcagagggtctacaccacgggcaccatccgctacgcgcccgccgaggtgaccctggccatgcagagcaacctgctgcccaacgcgcacgctgttaacttcgtggacgttaacagccccggctttggcctcgaccccaagacgcccatggagatgctctaccaccacgtgcaccggctcaacatgtcaggaccgttcggcggcgcagtgagcgcagctagcctgacgcagatgcccgccggcaacgtgttcaccacggccgagggactcttctccacgctgcccttccccgtctacagcaacggcatccacgcggcacagactctggagcgcaaggaggactgaggcgccgcccgtcctgggcccggccaggccccgcttggaggaggcatcgtcggcattttcgtttagacctttaattctagcactttgaattcgagcaggtcagcgtcttctctcgccacgacggtccccattccaccccctctttctttcacctgacttattctttcgtgtaaagatatgtttattttttgccttcagagggtcagacgaccagttgcctgccgttttgtcttcttctaaggtgtgtgttgggttgttttgctttcctttgcatctttattaagatgtctttcatgtgtatatgcctctgccatagaatactcagtcttgtggtcaagagagttctcaagtgacaaccattggggtttcttcataaagatcttgatatgatcaagatggaaagagacaagcataaacaatgtgccctgtttgactaagtcaaatgaaatagggtggtttttgtttctgttcctaattcctttaaaaaatagggggaatagtattttagaattttatgcagaatttaattctctttttacggttaagattttaagattttcttacttgcacataaaaataatttgggttcttaaacttaatttctggcctgtgactagaatgtttaaaaaaaaaaaagtcggactaaatgttaattactgaaacattaacttaatttctaaaaccatggtgctatcatttattaatctgtaatgtcttcatacaaaatgcagctcctgggctgggttttgggggaaaaaaaaaaaatgtgttctgtcctggtctggagtccgttgctgcagtctccttggttagttaagacaaagccctcattaacgtttgctgcaggacttaaaattttttacctcccaactaacaaacatagcctcacattaaatttaatgggtcagtaaagccccttttaaaggggctgctggaaaactcaatcaaactgatttgaggagcagtttaggtacatactgccttttgtttagctttttgttttccttactcagtctaactgaggctaattttgcaacttcaataacacttcggagtaaaagaaggaaaatatttaacatgtttttggtttttttcatttcttgcttaaaacaaaaaggaaggttgtatttggggggactggtttgatttgatggaatttctttccctttggttcttatttctgggttgaaaccaataagttttaaaactaaagaatgggttaataagcttcagacagataactgcaactgaaaactgcacattaagtaaaaaaaaaaaaaaagaaaaaaaaaagaaaaagaaaaagaaaaaaaatcctattttgtctttgttgccagaaatcagtgtggtgtcaaacactccaaatgactgtcaagtataaattcttcttccacttcatttttggcagctgtttgttaaggcatctaataacagatgtgagaactgtaatgtgtacaatgtgtatgtgtccttggctgtcagtcccattgcagtttcaatgtgtgtttctatatgcagtatatactaagctaatgtagttgttttgtcctttgtcttatctgtgctctatctctagtccggagtggtacagtcccattcctgcagtcctagtgaatcagtgattcttgggggttagtgggttttgtgtggtggccttcctctgtaatgtcaccctatgctgcttctactgtctgtgaatcttccgttttaccttttaaaattcctgctgttgctttgctggtgtatattctccctacctctcctctctttccctccctttcccatctccccctctccctcctcttcattccttccccatccccaaaatctctttcattctcagagataaaaagactcttaactagctcaaggttaatggagccatttttcccacaacggaattctgggtatgactctgtcttctggagtgcaacacaaagcactgaagaataatgctcagatatattaaataaattgatgccatatagcctcagttgttaacattcccagagtcccttgtgctctacctataagcagtgggtgcttttctttggtttcctttcaggttggctgatggagcaatatataaagcaattaccagtgagacagaaaattctttcaaaggtcaaccaacatttttaagaaacaaaatgggaggggataatggaatctagaattgtcatatatatttgtttacttgtgcaatgctaatatagtaactcggctgtcctttgaatatcactgtgttgagtagattcctctaggacctttgatttcatgagttgggcccaaaccgtggtggaataataacaaaaagaagttaaatgccacaaattttaatagtgagcttacttgaaggatttaagtaggtttaggaggtgaagaaggccgatggagaaatttacagattaattttggaagctctactctagctatcgaacaatcaaaggaatgcacctatcagctacaaagaacagctagacagctgttttttttcttttataaatgtttctgtgttgtgtcaaaatgatttctggtgatttaaactaacagataatcacagctgctgtctaaattcatagtgttgaaaattacaaaatgaaaaaaaaaaaaaaaacacttcattacctgtgaagactgtgtctgtgtttttaactatttcttgtacaaatatatgaaaacttttatgaggagactggtgccaagtagctgaataatggggaaagggatattctgttcgtaaaaatcttagcagtgttaccaactctacgatatatatataaaaaaataattaaaacgttacaaagcgacagctatggtacatttgttttgtgtgaagctaaccggacctaacttcctgagtgcctggcttattttgaaacattttttttcattgaccattgataatgctgcaaatcagaaatgtacatacttcatttacaacagggttctttttatacttttgtagattctcatacatgtcacatacatggttgtctttatgtaacttaattttttcatccgcaggtgccattttcataataaacttctcttggatttgttacta

SEQ ID NO: 158987 - DNA, 2802 bp, Homo sapiens
  Payload ID: 11109
  Gene Symbol: NPAS3
  Gene Name: neuronal PAS domain protein 3
  Uniprot ID: Q8IXF0
  ENST ID: ENST00000356141
  CDS Start-End: 1-2802
atggcgcccaccaagcccagctttcagcaggatccttccaggcgagaacgaataactgcccagcatcctctgcccaaccaatcagaatgtaggaaaatctacagatatgacggaatctactgtgaatctacctaccagaatttacaagcattgagaaaggagaaatcccgagatgctgctcgctcccgccggggaaaagaaaactttgagttctatgaattggccaagttgttgcctcttcctgcagccattaccagccagctcgacaaggcatccatcattcgacttacaattagctatctgaaaatgagggactttgctaaccagggggaccctccgtggaacttgcgaatggaaggccctccacctaacacatcagtaaaagttataggtgcacagcgaaggagaagccccagtgcactagccattgaagtatttgaagcacatttgggaagccacattttgcagtccctggatggctttgtatttgcactaaatcaggaaggaaaatttttgtacatttccgaaacagtctccatctacctaggcctctcacaagtggagctgacaggcagcagtgtctttgactatgtccaccccggagatcacgtggagatggctgagcagctgggcatgaagctcccccctgggcggggtctcctgtcacagggcactgctgaggacggagccagctcagcatcttcctcctctcagtcggagacccccgagccagtggagtcaaccagccccagtctgctaaccactgacaacactcttgagcgttcctttttcatccgaatgaaatctactctgaccaaacgcggtgtgcacatcaaatcatcaggatataaggtgattcacataacaggccggctacgcctgagagtgtcgctgtcccacgggaggaccgtccccagccaaatcatgggtctcgtggttgttgcgcatgccttgcctccccctacgatcaatgaagtcagaattgactgccatatgttcgtcactcgagtaaatatggacctcaatatcatttactgtgaaaataggattagtgattatatggatctgacccctgtagatatcgtagggaagagatgctaccacttcatccatgctgaagacgtggagggcatcaggcacagtcacttggacttgctgaataagggtcagtgtgtgacaaagtactatcgctggatgcagaagaacggaggatatatttggatacagtccagtgccaccatagctattaatgccaagaatgcaaatgaaaagaatatcatctgggtgaattaccttcttagcaatcctgagtacaaggacacacccatggacatcgcacagctcccccatctgccggagaaaacttccgaatcctcggagacatccgactctgagtcagactctaaagacacctcaggtattacagaggacaacgagaactccaagtccgacgagaaggggaaccagtccgagaacagcgaagacccggagcccgaccggaagaagtcgggcaacgcgtgtgacaacgacatgaactgcaacgacgacggccacagctccagtaacccggacagccgcgacagcgacgacagcttcgagcactcggactttgagaaccccaaggcgggcgaggacggcttcggtgctctgggcgcgatgcagatcaaggtggagcgctacgtggagagcgagtcggacctgcggctgcagaactgcgagtcactcacgtccgacagcgccaaggactcggacagcgcaggcgaggcgggcgcgcaggcctccagcaagcaccagaagcgcaagaaaaggcggaaacggcaaaagggcggcagcgccagccgccggcgcctgtccagcgcgtcgagcccaggcggcctggacgcgggcctggtggagcccccgcggctgctgtcctcccccaacagtgcctcggtgctcaagatcaagacggagatctcagaacccatcaatttcgacaatgacagcagcatctggaactacccgcccaaccgggagatctccaggaacgagtccccctacagcatgaccaagccccccagctctgagcacttcccgtccccgcagggcggcggcggtgggggtggcggtggcggggggctgcacgtggccattcccgactcggtcctcaccccgcccggcgccgacggcgcggccgcccgcaagactcagttcggcgcctcggccaccgcggccctggcccccgtcgcctccgacccgctgtcacccccgctctcggcgtccccgcgggacaagcaccccgggaacggcggcgggggcgggggcgggggcggcggcgcggggggcggcggccccagcgcgtccaactccttgctgtacactggggacctggaggcgctgcagaggttgcaggcgggcaacgtcgtgctcccgctggtgcacagggtgaccgggaccctggccgccaccagcacggccgcgcagagggtctacaccacgggcaccatccgctacgcgcccgccgaggtgaccctggccatgcagagcaacctgctgcccaacgcgcacgctgttaacttcgtggacgttaacagccccggctttggcctcgaccccaagacgcccatggagatgctctaccaccacgtgcaccggctcaacatgtcaggaccgttcggcggcgcagtgagcgcagctagcctgacgcagatgcccgccggcaacgtgttcaccacggccgagggactcttctccacgctgcccttccccgtctacagcaacggcatccacgcggcacagactctggagcgcaaggaggactga

SEQ ID NO: 158988 - DNA, 2763 bp, Homo sapiens
  Payload ID: 11109
  Gene Symbol: NPAS3
  Gene Name: neuronal PAS domain protein 3
  Uniprot ID: Q8IXF0
  ENST ID: ENST00000357798
  CDS Start-End: 1-2763
atggcgcccaccaagcccagctttcagcaggatccttccaggcgagaacgtttacaagcattgagaaaggagaaatcccgagatgctgctcgctcccgccggggaaaagaaaactttgagttctatgaattggccaagttgttgcctcttcctgcagccattaccagccagctcgacaaggcatccatcattcgacttacaattagctatctgaaaatgagggactttgctaaccagggggaccctccgtggaacttgcgaatggaaggccctccacctaacacatcagtaaaagggatacaaatgtggaaatctgaactctgcatgagaaagacaccatgtgaagttataggtgcacagcgaaggagaagccccagtgcactagccattgaagtatttgaagcacatttgggaagccacattttgcagtccctggatggctttgtatttgcactaaatcaggaaggaaaatttttgtacatttccgaaacagtctccatctacctaggcctctcacaagtggagctgacaggcagcagtgtctttgactatgtccaccccggagatcacgtggagatggctgagcagctgggcatgaagctcccccctgggcggggtctcctgtcacagggcactgctgaggacggagccagctcagcatcttcctcctctcagtcggagacccccgagccagtggagtcaaccagccccagtctgctaaccactgacaacactcttgagcgttcctttttcatccgaatgaaatctactctgaccaaacgcggtgtgcacatcaaatcatcaggatataaggtgattcacataacaggccggctacgcctgagagtgtcgctgtcccacgggaggaccgtccccagccaaatcatgggtctcgtggttgttgcgcatgccttgcctccccctacgatcaatgaagtcagaattgactgccatatgttcgtcactcgagtaaatatggacctcaatatcatttactgtgaaaataggattagtgattatatggatctgacccctgtagatatcgtagggaagagatgctaccacttcatccatgctgaagacgtggagggcatcaggcacagtcacttggacttgctgaataagggtcagtgtgtgacaaagtactatcgctggatgcagaagaacggaggatatatttggatacagtccagtgccaccatagctattaatgccaagaatgcaaatgaaaagaatatcatctgggtgaattaccttcttagcaatcctgagtacaaggacacacccatggacatcgcacagctcccccatctgccggagaaaacttccgaatcctcggagacatccgactctgagtcagactctaaagacacctcaggtattacagaggacaacgagaactccaagtccgacgagaaggggaaccagtccgagaacagcgaagacccggagcccgaccggaagaagtcgggcaacgcgtgtgacaacgacatgaactgcaacgacgacggccacagctccagtaacccggacagccgcgacagcgacgacagcttcgagcactcggactttgagaaccccaaggcgggcgaggacggcttcggtgctctgggcgcgatgcagatcaaggtggagcgctacgtggagagcgagtcggacctgcggctgcagaactgcgagtcactcacgtccgacagcgccaaggactcggacagcgcaggcgaggcgggcgcgcaggcctccagcaagcaccagaagcgcaagaaaaggcggaaacggcaaaagggcggcagcgccagccgccggcgcctgtccagcgcgtcgagcccaggcggcctggacgcgggcctggtggagcccccgcggctgctgtcctcccccaacagtgcctcggtgctcaagatcaagacggagatctcagaacccatcaatttcgacaatgacagcagcatctggaactacccgcccaaccgggagatctccaggaacgagtccccctacagcatgaccaagccccccagctctgagcacttcccgtccccgcagggcggcggcggtgggggtggcggtggcggggggctgcacgtggccattcccgactcggtcctcaccccgcccggcgccgacggcgcggccgcccgcaagactcagttcggcgcctcggccaccgcggccctggcccccgtcgcctccgacccgctgtcacccccgctctcggcgtccccgcgggacaagcaccccgggaacggcggcgggggcgggggcgggggcggcggcgcggggggcggcggccccagcgcgtccaactccttgctgtacactggggacctggaggcgctgcagaggttgcaggcgggcaacgtcgtgctcccgctggtgcacagggtgaccgggaccctggccgccaccagcacggccgcgcagagggtctacaccacgggcaccatccgctacgcgcccgccgaggtgaccctggccatgcagagcaacctgctgcccaacgcgcacgctgttaacttcgtggacgttaacagccccggctttggcctcgaccccaagacgcccatggagatgctctaccaccacgtgcaccggctcaacatgtcaggaccgttcggcggcgcagtgagcgcagctagcctgacgcagatgcccgccggcaacgtgttcaccacggccgagggactcttctccacgctgcccttccccgtctacagcaacggcatccacgcggcacagactctggagcgcaaggaggactga

SEQ ID NO: 158989 - DNA, 464 bp, Homo sapiens
  Payload ID: 11109
  Gene Symbol: NPAS3
  Gene Name: neuronal PAS domain protein 3
  ENST ID: ENST00000546849
  CDS Start-End: 1-378
gcatccatcattcgacttacaattagctatctgaaaatgagggactttgctaaccagggggaccctccgtggaacttgcgaatggaaggccctccacctaacacatcagtaaaagttataggtgcacagcgaaggagaagccccagtgcactagccattgaagtatttgaagcacatttgggaagccacattttgcagtccctggatggctttgtatttgcactaaatcaggaaggaaaatttttgtacatttccgaaacagtctccatctacctaggcctctcacaagcacagacactgtgttcacctctccagtcacatcgacgtccaagcagatgttctgtggcaaagttacaaagcatttatgtcactttttaaaattaatcaaattctcccttggaaggagtttagttcctctggctttaaaagatattattgctgaaaaataaactctgtatacttgc

SEQ ID NO: 158990 - DNA, 1002 bp, Homo sapiens
  Payload ID: 11109
  Gene Symbol: NPAS3
  Gene Name: neuronal PAS domain protein 3
  ENST ID: ENST00000551008
  CDS Start-End: 136-603
gatgctgctcgctcccgccggggaaaagaaaactttgagttctatgaattggccaagttgttgcctcttcctgcagccattaccagccagctcgacaaggcatccatcattcgacttacaattagctatctgaaaatgagggactttgctaaccagggggaccctccgtggaacttgcgaatggaaggccctccacctaacacatcagtaaaagttataggtgcacagcgaaggagaagccccagtgcactagccattgaagtatttgaagcacatttgggaagccacattttgcagtccctggatggctttgtatttgcactaaatcaggaaggaaaatttttgtacatttccgaaacagtctccatctacctaggcctctcacaagtggagctgacaggcagcagtgtctttgactatgtccaccccggagatcacgtggagatggctgagcagctgggcatgaagctcccccctgggcggggtctcctgtcacagggcactgctgaggacggagccagctcagcatcttcctcctctcagtcggagacccccgagccagtggtttgcttcccaccagcgagtgatcagtttcttctgtaggacccctgtcaggaagaacatgcctggatcctacttcagagagaactcagccagggcaaggggctcttgtggctttttgggtgggtgtgagttcatagaggggaaaatcaatactgtaccaggatttagacaatttagcaaaatgcatgaggcagtactttggatgatgaataactacagctgcatggctaacccattggttgtgtaaagtatgggttatcatgttttgtctaaattttcaggcaaaatctagcctgttttgtggcattaggatcatcattatagtagtatgatttttatgctattatacttacgctatgtcccgaatgtttttaaggccagcaaaatggaaacagtagagtacttgcctgaatgcaaataaacttcagtttcaactta

SEQ ID NO: 158991 - DNA, 340 bp, Homo sapiens
  Payload ID: 11109
  Gene Symbol: NPAS3
  Gene Name: neuronal PAS domain protein 3
  ENST ID: ENST00000552696
  CDS Start-End: 1-41
tctccatctacctaggcctctcacaagctggagtgcaatgacgcgatctcagctcaccacaacctccacctcctgggttcaagtgattctcctgcctcagcctcctgagtagctggaattacaggataaatttccagaaatgaagtcaaaaggacaacatattttaagggattgtcatacatttggacaaattgttctccagaaagatgggttccagtcgcacctacagtgtatctggtactgtacaacagagaactgcaacctcagagtgagaagacagagaaatcacctaccatgcctcacagtgggaaaataaattgggggaaggatcacatcctga

SEQ ID NO: 158992 - DNA, 2718 bp, Homo sapiens
  Payload ID: 11109
  Gene Symbol: NPAS3
  Gene Name: neuronal PAS domain protein 3
  ENST ID: ENST00000551634
  CDS Start-End: 1-2718
atggggagggccggcgccgcggccaacggcaccccgcagaacgtccagggcatcacctcctaccagcagcgtttacaagcattgagaaaggagaaatcccgagatgctgctcgctcccgccggggaaaagaaaactttgagttctatgaattggccaagttgttgcctcttcctgcagccattaccagccagctcgacaaggcatccatcattcgacttacaattagctatctgaaaatgagggactttgctaaccagggggaccctccgtggaacttgcgaatggaaggccctccacctaacacatcagtaaaagttataggtgcacagcgaaggagaagccccagtgcactagccattgaagtatttgaagcacatttgggaagccacattttgcagtccctggatggctttgtatttgcactaaatcaggaaggaaaatttttgtacatttccgaaacagtctccatctacctaggcctctcacaagtggagctgacaggcagcagtgtctttgactatgtccaccccggagatcacgtggagatggctgagcagctgggcatgaagctcccccctgggcggggtctcctgtcacagggcactgctgaggacggagccagctcagcatcttcctcctctcagtcggagacccccgagccagtggagtcaaccagccccagtctgctaaccactgacaacactcttgagcgttcctttttcatccgaatgaaatctactctgaccaaacgcggtgtgcacatcaaatcatcaggatataaggtgattcacataacaggccggctacgcctgagagtgtcgctgtcccacgggaggaccgtccccagccaaatcatgggtctcgtggttgttgcgcatgccttgcctccccctacgatcaatgaagtcagaattgactgccatatgttcgtcactcgagtaaatatggacctcaatatcatttactgtgaaaataggattagtgattatatggatctgacccctgtagatatcgtagggaagagatgctaccacttcatccatgctgaagacgtggagggcatcaggcacagtcacttggacttgctgaataagggtcagtgtgtgacaaagtactatcgctggatgcagaagaacggaggatatatttggatacagtccagtgccaccatagctattaatgccaagaatgcaaatgaaaagaatatcatctgggtgaattaccttcttagcaatcctgagtacaaggacacacccatggacatcgcacagctcccccatctgccggagaaaacttccgaatcctcggagacatccgactctgagtcagactctaaagacacctcagaggacaacgagaactccaagtccgacgagaaggggaaccagtccgagaacagcgaagacccggagcccgaccggaagaagtcgggcaacgcgtgtgacaacgacatgaactgcaacgacgacggccacagctccagtaacccggacagccgcgacagcgacgacagcttcgagcactcggactttgagaaccccaaggcgggcgaggacggcttcggtgctctgggcgcgatgcagatcaaggtggagcgctacgtggagagcgagtcggacctgcggctgcagaactgcgagtcactcacgtccgacagcgccaaggactcggacagcgcaggcgaggcgggcgcgcaggcctccagcaagcaccagaagcgcaagaaaaggcggaaacggcaaaagggcggcagcgccagccgccggcgcctgtccagcgcgtcgagcccaggcggcctggacgcgggcctggtggagcccccgcggctgctgtcctcccccaacagtgcctcggtgctcaagatcaagacggagatctcagaacccatcaatttcgacaatgacagcagcatctggaactacccgcccaaccgggagatctccaggaacgagtccccctacagcatgaccaagccccccagctctgagcacttcccgtccccgcagggcggcggcggtgggggtggcggtggcggggggctgcacgtggccattcccgactcggtcctcaccccgcccggcgccgacggcgcggccgcccgcaagactcagttcggcgcctcggccaccgcggccctggcccccgtcgcctccgacccgctgtcacccccgctctcggcgtccccgcgggacaagcaccccgggaacggcggcgggggcgggggcgggggcggcggcgcggggggcggcggccccagcgcgtccaactccttgctgtacactggggacctggaggcgctgcagaggttgcaggcgggcaacgtcgtgctcccgctggtgcacagggtgaccgggaccctggccgccaccagcacggccgcgcagagggtctacaccacgggcaccatccgctacgcgcccgccgaggtgaccctggccatgcagagcaacctgctgcccaacgcgcacgctgttaacttcgtggacgttaacagccccggctttggcctcgaccccaagacgcccatggagatgctctaccaccacgtgcaccggctcaacatgtcaggaccgttcggcggcgcagtgagcgcagctagcctgacgcagatgcccgccggcaacgtgttcaccacggccgagggactcttctccacgctgcccttccccgtctacagcaacggcatccacgcggcacagactctggagcgcaaggag

SEQ ID NO: 158993 - DNA, 634 bp, Homo sapiens
  Payload ID: 11109
  Gene Symbol: NPAS3
  Gene Name: neuronal PAS domain protein 3
  ENST ID: ENST00000552874
  CDS Start-End: 1-398
ccactgacaacactcttgagcgttcctttttcatccgaatgaaatctactctgaccaaacgcggtgtgcacatcaaatcatcaggatataaggtgattcacataacaggccggctacgcctgagagtgtcgctgtcccacgggaggaccgtccccagccaaatcatgggtctcgtggttgttgcgcatgccttgcctccccctacgatcaatgaagtcagaattgactgccatatgttcgtcactcgagtaaatatggacctcaatatcatttactgtgaaaataggattagtgattatatggatctgacccctgtagatatcgtagggaagagatgctaccacttcatccatgctgaagacgtggagggcatcaggcacagtcacttggactcttgaagaaacacaattcctcaggaacagtgagcgagggcagttcatttctccccattaagcaaaggtctccaacaaatatgtttgatgcctttctttccgatttacttttatctcattttccgtacccagaataatttgagagtgctgaaaataaaccactccaccattcactattgtgctattctcctaatttttctggtatcttgccaactaataaacagagaaggtatgctttcaaa

SEQ ID NO: 158994 - DNA, 2926 bp, Homo sapiens
  Payload ID: 11109
  Gene Symbol: NPAS3
  Gene Name: neuronal PAS domain protein 3
  Uniprot ID: Q8IXF0
  ENST ID: ENST00000548645
  CDS Start-End: 46-2757
ggggagagaggcaaaaagtaagagaggaaaaaaaatagcaggaagatggcgcccaccaagcccagctttcagcaggatccttccaggcgagaacgtttacaagcattgagaaaggagaaatcccgagatgctgctcgctcccgccggggaaaagaaaactttgagttctatgaattggccaagttgttgcctcttcctgcagccattaccagccagctcgacaaggcatccatcattcgacttacaattagctatctgaaaatgagggactttgctaaccagggggaccctccgtggaacttgcgaatggaaggccctccacctaacacatcagtaaaagttataggtgcacagcgaaggagaagccccagtgcactagccattgaagtatttgaagcacatttgggaagccacattttgcagtccctggatggctttgtatttgcactaaatcaggaaggaaaatttttgtacatttccgaaacagtctccatctacctaggcctctcacaagtggagctgacaggcagcagtgtctttgactatgtccaccccggagatcacgtggagatggctgagcagctgggcatgaagctcccccctgggcggggtctcctgtcacagggcactgctgaggacggagccagctcagcatcttcctcctctcagtcggagacccccgagccagtggagtcaaccagccccagtctgctaaccactgacaacactcttgagcgttcctttttcatccgaatgaaatctactctgaccaaacgcggtgtgcacatcaaatcatcaggatataaggtgattcacataacaggccggctacgcctgagagtgtcgctgtcccacgggaggaccgtccccagccaaatcatgggtctcgtggttgttgcgcatgccttgcctccccctacgatcaatgaagtcagaattgactgccatatgttcgtcactcgagtaaatatggacctcaatatcatttactgtgaaaataggattagtgattatatggatctgacccctgtagatatcgtagggaagagatgctaccacttcatccatgctgaagacgtggagggcatcaggcacagtcacttggacttgctgaataagggtcagtgtgtgacaaagtactatcgctggatgcagaagaacggaggatatatttggatacagtccagtgccaccatagctattaatgccaagaatgcaaatgaaaagaatatcatctgggtgaattaccttcttagcaatcctgagtacaaggacacacccatggacatcgcacagctcccccatctgccggagaaaacttccgaatcctcggagacatccgactctgagtcagactctaaagacacctcaggtattacagaggacaacgagaactccaagtccgacgagaaggggaaccagtccgagaacagcgaagacccggagcccgaccggaagaagtcgggcaacgcgtgtgacaacgacatgaactgcaacgacgacggccacagctccagtaacccggacagccgcgacagcgacgacagcttcgagcactcggactttgagaaccccaaggcgggcgaggacggcttcggtgctctgggcgcgatgcagatcaaggtggagcgctacgtggagagcgagtcggacctgcggctgcagaactgcgagtcactcacgtccgacagcgccaaggactcggacagcgcaggcgaggcgggcgcgcaggcctccagcaagcaccagaagcgcaagaaaaggcggaaacggcaaaagggcggcagcgccagccgccggcgcctgtccagcgcgtcgagcccaggcggcctggacgcgggcctggtggagcccccgcggctgctgtcctcccccaacagtgcctcggtgctcaagatcaagacggagatctcagaacccatcaatttcgacaatgacagcagcatctggaactacccgcccaaccgggagatctccaggaacgagtccccctacagcatgaccaagccccccagctctgagcacttcccgtccccgcagggcggcggcggtgggggtggcggtggcggggggctgcacgtggccattcccgactcggtcctcaccccgcccggcgccgacggcgcggccgcccgcaagactcagttcggcgcctcggccaccgcggccctggcccccgtcgcctccgacccgctgtcacccccgctctcggcgtccccgcgggacaagcaccccgggaacggcggcgggggcgggggcgggggcggcggcgcggggggcggcggccccagcgcgtccaactccttgctgtacactggggacctggaggcgctgcagaggttgcaggcgggcaacgtcgtgctcccgctggtgcacagggtgaccgggaccctggccgccaccagcacggccgcgcagagggtctacaccacgggcaccatccgctacgcgcccgccgaggtgaccctggccatgcagagcaacctgctgcccaacgcgcacgctgttaacttcgtggacgttaacagccccggctttggcctcgaccccaagacgcccatggagatgctctaccaccacgtgcaccggctcaacatgtcaggaccgttcggcggcgcagtgagcgcagctagcctgacgcagatgcccgccggcaacgtgttcaccacggccgagggactcttctccacgctgcccttccccgtctacagcaacggcatccacgcggcacagactctggagcgcaaggaggactgaggcgccgcccgtcctgggcccggccaggccccgcttggaggaggcatcgtcggcattttcgtttagacctttaattctagcactttgaattcgagcaggtcagcgtcttctctcgccacgacggtccccattccaccccctctttctttcacctgacttattctttcgt

SEQ ID NO: 158995 - DNA, 2531 bp, Homo sapiens
  Payload ID: 11109
  Gene Symbol: NPAS3
  Gene Name: neuronal PAS domain protein 3
  Uniprot ID: Q8IXF0
  ENST ID: ENST00000547068
  CDS Start-End: 1671-2132
gattttgtcacctgagactgctgttactctgaaaatgatagcattaacttgtctaattctgagaaagacatttgttagctaatgtagactattaatagagcaaacataaaactggttgggtattagcctagcaagtatctgaccagagcattatggcattacttagattacatagatattcagtaagatatttcaggtgtgatttctgcagtgaatacagtgtttacaccagaaaacaatgtcaggaatcctataatgtaatagggaatattattcaccatagtatattaaaagagaacggagccttgctgctgaaccaattttgatctcttcctttggtcttccttccttccttgtttctctctttcttattatttcataatgaaaaaaaagaatgctagactcaaatatttacagtgctttcagaattcaataaaatgcatacataaaaatgattttaatagtaccttgatactgaaaatattatctagctacttatcattgtggtctgatttttaaatttatttctcatcagacacaatacagagcaattcagagcaggtagaattctcctgtcagatgctcacacacaacttcagttgtgccagattctgccctcagcaatgtgagcaaacttcaaacagaaatgcacatgaatagttgaaggaaaatgctggatcccacctgttgcctcttctgggaagtaatatgtctataatgtttataaattttaataacccatacagcgctttatctttcaatattaaatttatattttcctaaagtttgacttctttgggcaatatattttattctctagtatcttagaaaatcaatctactaatgtatgtccattaataaataagtatgctcttatcaagcagttatcagcacatttataaaattacattgaaatcttcattttaaatatgatgttttcttcatctaactgaacgtgctgtgatctttattgagggctggaaacatatttgttgattctgacaaggtgaattgtattcgtgtttaccttctgctccccaagattataattgaaatgaatttttcaaaatagttccttttgatgaagatcccatactgatgaaagttaaatgaacagaagtattagtttgaaatagatacacgaatgtaagcccaacttataaattgattctagttgataatatcaagctacgcctgtaaaccttctgttaggtcttagaaacaataaatacacctcaatgcatggacaattgaaggaaaaaaaccttaacaagtaaaacacaatttttactcattggacttgagtttacaaaatgtaaggccagagttagagtttatggctttagtggacattttctggaactcattttactgtcactctctagttttgaaatagtttttggtagaattttggtgggaaaaaaggaaatacaaagaaagcagtatttgaatgatgacagagtcacatattctaaaccacacattctcactcctttgatttcagtttacaagcattgagaaaggagaaatcccgagatgctgctcgctcccgccggggaaaagaaaactttgagttctatgaattggccaagttgttgcctcttcctgcagccattaccagccagctcgacaaggcatccatcattcgacttacaattagctatctgaaaatgagggactttgctaaccagggggaccctccgtggaacttgcgaatggaaggccctccacctaacacatcagtaaaaggtgcacagcgaaggagaagccccagtgcactagccattgaagtatttgaagcacatttgggaagccacattttgcagtccctggatggctttgtatttgcactaaatcaggaaggaaaatttttgtacatttccgaaacagtctccatctacctaggcctctcacaagtggagctgacaggcagcagtgtctttgactatgtccaccccggagatcacgtggagatggctgagcagctgggcatgaagctcccccctgggcggggtctcctgtcacagggcactgctgaggacggagccagctcagcatcttcctcctctcagtcggagacccccgagccagtggtttgcttcccaccagcgagtgatcagtttcttctgtaggacccctgtcaggaagaacatgcctggatcctacttcagagagaactcagccagggcaaggggctcttgtggctttttgggtgggtgtgagttcatagaggggaaaatcaatactgtaccaggatttagacaatttagcaaaatgcatgaggcagtactttggatgatgaataactacagctgcatggctaacccattggttgtgtaaagtatgggttatcatgttttgtctaaattttcaggcaaaatctagcctgttttgtggcattaggatcatcattatagtagtatgatttttatgctattatacttacgctatgtcccgaatgtttttaaggccagcaaaatggaaacagtagagtacttgcctgaatgcaaataaacttcagtttcaactta

SEQ ID NO: 158996 - DNA, 2817 bp, Homo sapiens
  Payload ID: 11109
  Gene Symbol: NPAS3
  Gene Name: neuronal PAS domain protein 3
  ENST ID: ENST00000551492
  CDS Start-End: 1-2817
atggggagggccggcgccgcggccaacggcaccccgcagaacgtccagggcatcacctcctaccagcagcgaataactgcccagcatcctctgcccaaccaatcagaatgtaggaaaatctacagatatgacggaatctactgtgaatctacctaccagaatttacaagcattgagaaaggagaaatcccgagatgctgctcgctcccgccggggaaaagaaaactttgagttctatgaattggccaagttgttgcctcttcctgcagccattaccagccagctcgacaaggcatccatcattcgacttacaattagctatctgaaaatgagggactttgctaaccagggggaccctccgtggaacttgcgaatggaaggccctccacctaacacatcagtaaaaggtgcacagcgaaggagaagccccagtgcactagccattgaagtatttgaagcacatttgggaagccacattttgcagtccctggatggctttgtatttgcactaaatcaggaaggaaaatttttgtacatttccgaaacagtctccatctacctaggcctctcacaagtggagctgacaggcagcagtgtctttgactatgtccaccccggagatcacgtggagatggctgagcagctgggcatgaagctcccccctgggcggggtctcctgtcacagggcactgctgaggacggagccagctcagcatcttcctcctctcagtcggagacccccgagccagtggagtcaaccagccccagtctgctaaccactgacaacactcttgagcgttcctttttcatccgaatgaaatctactctgaccaaacgcggtgtgcacatcaaatcatcaggatataaggtgattcacataacaggccggctacgcctgagagtgtcgctgtcccacgggaggaccgtccccagccaaatcatgggtctcgtggttgttgcgcatgccttgcctccccctacgatcaatgaagtcagaattgactgccatatgttcgtcactcgagtaaatatggacctcaatatcatttactgtgaaaataggattagtgattatatggatctgacccctgtagatatcgtagggaagagatgctaccacttcatccatgctgaagacgtggagggcatcaggcacagtcacttggacttgctgaataagggtcagtgtgtgacaaagtactatcgctggatgcagaagaacggaggatatatttggatacagtccagtgccaccatagctattaatgccaagaatgcaaatgaaaagaatatcatctgggtgaattaccttcttagcaatcctgagtacaaggacacacccatggacatcgcacagctcccccatctgccggagaaaacttccgaatcctcggagacatccgactctgagtcagactctaaagacacctcaggtattacagaggacaacgagaactccaagtccgacgagaaggggaaccagtccgagaacagcgaagacccggagcccgaccggaagaagtcgggcaacgcgtgtgacaacgacatgaactgcaacgacgacggccacagctccagtaacccggacagccgcgacagcgacgacagcttcgagcactcggactttgagaaccccaaggcgggcgaggacggcttcggtgctctgggcgcgatgcagatcaaggtggagcgctacgtggagagcgagtcggacctgcggctgcagaactgcgagtcactcacgtccgacagcgccaaggactcggacagcgcaggcgaggcgggcgcgcaggcctccagcaagcaccagaagcgcaagaaaaggcggaaacggcaaaagggcggcagcgccagccgccggcgcctgtccagcgcgtcgagcccaggcggcctggacgcgggcctggtggagcccccgcggctgctgtcctcccccaacagtgcctcggtgctcaagatcaagacggagatctcagaacccatcaatttcgacaatgacagcagcatctggaactacccgcccaaccgggagatctccaggaacgagtccccctacagcatgaccaagccccccagctctgagcacttcccgtccccgcagggcggcggcggtgggggtggcggtggcggggggctgcacgtggccattcccgactcggtcctcaccccgcccggcgccgacggcgcggccgcccgcaagactcagttcggcgcctcggccaccgcggccctggcccccgtcgcctccgacccgctgtcacccccgctctcggcgtccccgcgggacaagcaccccgggaacggcggcgggggcgggggcgggggcggcggcgcggggggcggcggccccagcgcgtccaactccttgctgtacactggggacctggaggcgctgcagaggttgcaggcgggcaacgtcgtgctcccgctggtgcacagggtgaccgggaccctggccgccaccagcacggccgcgcagagggtctacaccacgggcaccatccgctacgcgcccgccgaggtgaccctggccatgcagagcaacctgctgcccaacgcgcacgctgttaacttcgtggacgttaacagccccggctttggcctcgaccccaagacgcccatggagatgctctaccaccacgtgcaccggctcaacatgtcaggaccgttcggcggcgcagtgagcgcagctagcctgacgcagatgcccgccggcaacgtgttcaccacggccgagggactcttctccacgctgcccttccccgtctacagcaacggcatccacgcggcacagactctggagcgcaaggaggactga

SEQ ID NO: 158997 - DNA, 3303 bp, Homo sapiens
  Payload ID: 11110
  Gene Symbol: NPAS4
  Gene Name: neuronal PAS domain protein 4
  Uniprot ID: Q8IUM7
  ENST ID: ENST00000311034
  CDS Start-End: 177-2585
gctatataaggcggcgtgaggcaggcgaggggggcagcgcagccgagcggagcccaggagagcagagagcgagcctgagcgagagacggggaagcacggaggaggaagccgccggtgcgtcgggacgggagcgcaggtgctcgggcacccgagctggagctccgcagccgccggtcatgtaccgctccaccaagggcgcctccaaggcgcgccgggaccagatcaacgccgagatccggaacctcaaggagctgctgccgctggccgaagcggacaaggtccggctgtcctacctgcacatcatgagcctcgcctgcatctacactcgcaagggcgtcttcttcgctggtggcactcctctggcgggccccacggggcttctctcagctcaagagcttgaggacatcgtagcggcactacccggctttctgcttgtgttcacagccgaggggaaattgctctacctgtctgagagtgtgagcgagcatctgggccactccatggtggacctggttgcccagggtgacagcatctacgacatcattgacccagctgaccacctcactgtgcgccagcaactcaccctgccctctgccctggacactgatcgcctcttccgctgccgcttcaacacctccaagtccctcaggcgccagagtgcaggcaacaaactcgtgcttattcgaggccgattccatgctcacccacctggagcctactgggcaggaaatcccgtgttcacagctttctgtgcccctctggagccgagaccccgcccaggtcctggccctggccctggccctgcctcgctcttcctggccatgttccagagccgccatgctaaagacctggctctactggacatctccgagagtgtcctaatctacctgggctttgagcgcagtgaactgctttgtaaatcatggtatggactgctgcaccccgaggacctggcccacgcttctgctcaacactaccgcctgttggctgagagtggagatattcaggcagagatggtggtgaggctacaggccaagactggaggctgggcatggatttactgcctgttatactcagaaggtccagagggacccattactgccaataactacccaatcagtgacatggaagcctggagcctccgccagcagttgaactctgaagacacccaggcagcttatgtcctgggcactccgaccatgctgccctcattccctgaaaacattctttcccaggaagagtgctccagcactaacccactcttcaccgcagcactgggggctcccagaagcaccagcttccccagtgctcctgaactgagtgttgtctctgcatcagaagagcttccccgaccctccaaagaactggacttcagttacctgacattcccttctgggcctgagccttctctccaagcagaactaagcaaggatcttgtgtgcactccaccttacacgccccatcagccaggaggctgtgccttcctcttcagcctccatgagcccttccagacccatttgcccaccccatccagcactcttcaagaacagctgactccaagcactgcgaccttctctgatcagttgacgcccagcagtgcaaccttcccagatccactaactagcccactgcaaggccagttgactgaaacctcggtcagaagctatgaagaccagttgactccctgcacctccaccttcccagaccagctgcttcccagcacagccaccttcccagagcctctgggcagccctgcccatgaacagctgactcctcccagcacagcattccaagcacacctggacagccccagccaaaccttcccagagcaactgagccccaaccctaccaagacttactttgcccaggagggatgcagttttctctatgagaagttgcccccaagtcctagcagccctggtaatggggactgcacgctcttggccctagcccagctccggggccccctctctgtggatgtccccctggtgcccgaaggcctgctcacacctgaggcctctccagtcaagcagagtttcttccactactctgaaaaggagcagaatgagatagaccgtctcatccagcagattagccaattggctcagggcatggacagacccttctcagctgaggctggcactggcggactagagccacttggaggactggagcccctggactccaacctgtccctgtcaggggcaggcccccctgtgctcagcctggacctgaaaccctggaaatgccaggagctggacttcctggctgaccctgataacatgttcctggaagagacgcccgtggaagacatcttcatggatctctctaccccagatcccagtgaggaatggggctcaggggatcctgaggcagagggcccaggaggggccccatcgccttgcaacaacctgtccccagaagaccacagcttcctggaggacctggccacatatgaaaccgcctttgagacaggtgtctcagcattcccctatgatgggtttactgatgagttgcatcaactccagagccaagttcaagacagcttccatgaagatggaagtggaggggaaccaacgttttgaataagtctgtgacttaacgtcgtcaagtatggcatattgtcatcaagacgtggagccgctctccacccccccgggactgttggggggattctgagggccagagggggatatatatgattccccaggccctgcaggattttggggggggggaggtgggagggcaagggaggggagcttctttttaaaatcaagagacttcgagcgatcccagtttccatttcaatctgtattcactcgtagtgagtttccttgaatgggatttcaagcggagaatgggggagtctcacttccccgccgccttgccccattggcctgggccagttctccactcctaggggccaagccacccctagccttggtgggggaaaggcagggcccacccgggccagcccgtgccctgaggggctcttgacacccacgtagaattctctacacaccagtaacgggatttcaattccgatggactctgccgccctggcggcccttcctgtgacttttgcgccccgcgcctggggtggggggtgcgaagagacgctacgttcctttccgatggaggaaggcagacctgccgtcacacgtgtgcttgcacgagtgcgtgtacctggtgcgggactcacccggccgccagactgcctgggcctgcccagatggccacctcgtggtgctgcggtgactttgtagccaactttataataaagtccagtttgcctttttggta

SEQ ID NO: 158998 - DNA, 2454 bp, Homo sapiens
  Payload ID: 11110
  Gene Symbol: NPAS4
  Gene Name: neuronal PAS domain protein 4
  Uniprot ID: Q8IUM7
  ENST ID: ENST00000525148
  CDS Start-End: 90-794
ggggaagcacggaggaggaagccgccggtgcgtcgggacgggagcgcaggtgctcgggcacccgagctggagctccgcagccgccggtcatgtaccgctccaccaagggcgcctccaaggcgcgccgggaccagatcaacgccgagatccggaacctcaaggagctgctgccgctggccgaagcggacaaggtccggctgtcctacctgcacatcatgagcctcgcctgcatctacactcgcaagggcgtcttcttcgctggtggcactcctctggcgggccccacggggcttctctcagctcaagagcttgaggacatcgtagcggcactacccggctttctgcttgtgttcacagccgaggggaaattgctctacctgtctgagagtgtgagcgagcatctgggccactccatggtggacctggttgcccagggtgacagcatctacgacatcattgacccagctgaccacctcactgtgcgccagcaactcaccctgccctctgccctggacactgatcgcctcttccgctgccgcttcaacacctccaagtccctcaggcgccagagtgcaggcaacaaactcgtgcttattcgaggccgattccatgctcacccacctggagcctactgggcaggaaatcccgtgttcacagctttctgtgcccctctggagccgagaccccgcccaggtcctggccctggccctggccctgcctcgctcttcctggccatgttccagagccgccatgctaaagacctggctctactggacatctccgagagtggctgagagtggagatattcaggcagagatggtggtgaggctacaggccaagactggaggctgggcatggatttactgcctgttatactcagaaggtccagagggacccattactgccaataactacccaatcagtgacatggaagcctggagcctccgccagcagttgaactctgaagacacccaggcagcttatgtcctgggcactccgaccatgctgccctcattccctgaaaacattctttcccaggaagagtgctccagcactaacccactcttcaccgcagcactgggggctcccagaagcaccagcttccccagtgctcctgaactgagtgttgtctctgcatcagaagagcttccccgaccctccaaagaactggacttcagttacctgacattcccttctgggcctgagccttctctccaagcagaactaagcaaggatcttgtgtgcactccaccttacacgccccatcagccaggaggctgtgccttcctcttcagcctccatgagcccttccagacccatttgcccaccccatccagcactcttcaagaacagctgactccaagcactgcgaccttctctgatcagttgacgcccagcagtgcaaccttcccagatccactaactagcccactgcaaggccagttgactgaaacctcggtcagaagctatgaagaccagttgactccctgcacctccaccttcccagaccagctgcttcccagcacagccaccttcccagagcctctgggcagccctgcccatgaacagctgactcctcccagcacagcattccaagcacacctggacagccccagccaaaccttcccagagcaactgagccccaaccctaccaagacttactttgcccaggagggatgcagttttctctatgagaagttgcccccaagtcctagcagccctggtaatggggactgcacgctcttggccctagcccagctccggggccccctctctgtggatgtccccctggtgcccgaaggcctgctcacacctgaggcctctccagtcaagcagagtttcttccactactctgaaaaggagcagaatgagatagaccgtctcatccagcagattagccaattggctcagggcatggacagacccttctcagctgaggctggcactggcggactagagccacttggaggactggagcccctggactccaacctgtccctgtcaggggcaggcccccctgtgctcagcctggacctgaaaccctggaaatgccaggagctggacttcctggctgaccctgataacatgttcctggaagagacgcccgtggaagacatcttcatggatctctctaccccagatcccagtgaggaatggggctcaggggatcctgaggcagagggcccaggaggggccccatcgccttgcaacaacctgtccccagaagaccacagcttcctggaggacctggccacatatgaaaccgcctttgagacaggtgtctcagcattcccctatgatgggtttactgatgagttgcatcaactccagagccaagttcaagacagcttccatgaagatggaagtggaggggaaccaacgttttgaataagtctgtgacttaacgtcgtcaagtatggcatattgtcatcaagacgtggagccgctctccac

SEQ ID NO: 158999 - DNA, 5122 bp, Homo sapiens
  Payload ID: 11111
  Gene Symbol: NPTX1
  Gene Name: neuronal pentraxin I
  Uniprot ID: Q15818
  ENST ID: ENST00000306773
  CDS Start-End: 159-1457
agtgggggcctgatagcgcggcggtgtggaccgcgcggccgaagagcgcggcgcccagagcgcgggccgctcgcggagccacagcccgagccgggtcccagccggagccgagccccagccgagccgagccgggcccggagcgcccggtgcccgcagccatgccggccggccgcgccgcgcgcacctgtgcgctgctcgccctctgcctcctgggcgccggggcccaggatttcgggccgacgcgcttcatctgcacctcggtgcccgtggacgccgacatgtgcgccgcgtccgtggccgccggcggcgccgaggagctccggagcagcgtgctgcagctccgcgagacggtgctgcagcagaaggagaccatcctgagccagaaggagaccatccgcgagctgaccgccaagctgggccgctgcgagagccagagcacgctggaccccggagccggcgaggcccgggcgggcggcggccgcaagcagcccggctcgggcaagaacaccatgggcgacctgtcccggacaccggccgccgagacgctcagccaactcgggcaaactttgcaatcgctcaaaacccgcctggagaacctcgagcagtacagccgcctcaattcctccagccagaccaacagcctcaaggatctgctgcagagcaagatcgatgagctggagaggcaggtgctgtcccgggtgaacaccctggaggagggcaaggggggccccaggaacgacaccgaggagagggtcaagatcgagaccgccctgacctccctgcaccagcggatcagcgagctcgagaaaggtcagaaagacaaccgccctggagacaagttccagctcacattcccactgcggaccaactatatgtatgccaaggtgaagaagagcctgccagagatgtacgccttcactgtctgcatgtggctcaagtccagcgccacgccaggtgtgggcacgcccttctcctacgctgtgcccggccaggccaacgagctggtcctcattgagtggggcaacaaccccatggagatcctcatcaatgacaaggtggccaagttgccttttgtcatcaatgatggcaagtggcaccacatctgtgtcacctggaccacccgggacggggtctgggaggcctaccaggatggcacgcagggtggcagtggcgagaacttggcgccctatcaccccatcaagccccagggcgtgctggtgctgggccaggagcaggacactctgggtggtgggtttgatgccacccaggcatttgtgggtgagctggcccacttcaacatctgggaccgcaagctgacccccggggaggtgtacaacctggccacctgcagcaccaaggctctgtccggcaatgtcatcgcctgggctgaatcccacatcgagatctacggaggggccaccaagtggaccttcgaggcctgtcgccagatcaactgagcacggcaggccaggctgagcccgcccgccctcgccccctgcttgtgcggcgatgatctgttttgtgcgtctcttctctcccttttccccaggaatgaaccgaggccgtcgcccctgcacacgcacacgcacacagcctggttttgtcctcatgcacacgaagcagcccctgctcccatctgtccctgaggaagccccacttctctgtaggagcccggactctctcaggcatgccccattcacagctgaagtgggtgctgcaacgtcttgaacaaggcagaagttggtgagaggatctgtgtgtgcgtgtctacatgtgtgtgtctacgtgtgtgcgtgcgtggctgggggaggccttttctttgaggacgtacctcatttccttctttcttctggctttggaaaaatctcatgatgaaaattcatatttgccaactttgttagctgcgtgcgtgctttggggttggtgcaacctcagtacacgcatttgtctttgtttgcaaacctttctcagagcgacatatctttatattgatgtaataaatgtcttttagtggtttgtcaaaggccgggggcgggggctctctacagagaatttttattttgtaatagaagtgaactgtctctgaagggtgaaggcaggccgtcctgggatggtaccctgtgctctcccgtggaggagaggggatggctgaggacactggcccttaccccagggccagacagcatccatccctgctgtttgcatctgagagcagcatggggcctgggaggtcggcctgtgtgcccagctcagctagctctgccccaggacggccctgccctcgaccttcccacctcctcagatcctgcaaggctggggtctgcccctcccttctcacctctggagctgtgctgcactgcttcagcccagagggccctgagagaggagcgtgccacccacagcccgggaagccgggccccagcacccctctcctttggcctccggcagtgcagaccagaggggaccttttaaggaaagaagccgtgtttcgatgaagacctggccacatggggccactgggacttcaacccagcccatcggtgggaaggtcctttttgggggactttgacagccatatccctcccagcacaccaggcgccaggtgagctggttcagacccctccaggggtactccagagacctcacgtgtggagccaggcctggccagggcaggggcctgaaacccactcctccatctcatggggctcacggcctacagcagcccacaagctgccactggccggcgacactgacacctgagcagtgtccagaacctttttgcctttttttgttccccgtgaaaagcaacatggacatttccttctagtccttccaaggaggggagagaagtgtatgtgcatttgtgtgtgtgtgtgtgtgttgtgtgtgtgtgtgcgctaagtgagaaagagagcaggctcgggaggccctgcccagggtaggaggagcttcctgctttgcaccatctggtggtcgcacgccctgagggcaccccgactctgtctccaggagtctcatcagcaaaccgctgacaagtctttctagaaattctactgcactgcctggctcagctgcagctgcagacatttctgcaggaggagcaggtgtttctgtcttctgttccttctagggccacctgtccccttaaacacaggtccacgttgtgtcaagaacctagtgcatctgtgtgtgtctgtcagtgtctctgtgtcagtgttctcgtgggtgtctgcacggtacccggccgccgttctgcaatgcatcactcccgcagaggggggtgcagatcaggcgccgtgctgcgcgttgttgttcaacagtggctttttcttagataatcgtgcttcctcagcgcccgtcgggttgtggcatccttggatctgcagggatcttctccgtttgcatgttcctcggggtggcgtgttccttgctccctgggtccgacatgtgttcccgcacctgcatggactgccccggttctgtgttgtgtgccgagtgccgcccagtgttctgtgaccacccgtgtagctactgaaaatggctgggtaagcaagtcaagggtgttggaggaggtcaagagagagctcagtttccctctccccctccccaaacacaccaagaagcatttttaacgtgtaggttgagaacaagcctaaaggattcccacagctgggagccagcaagagagcttggagtcgcctctctagaccagatctagccccaccctcactccagccatctcggagcccttgtgtaggcaacgcccggtgcgggctgtgtggggtgctcccctgccagcacctccggccagccccgcccctgccgatctactggaccgcagaccaccttctgcccccgtgggccaggtgggagctgtccgttcaggaccatgagccatcctctgccctgactagcgaggggcagagcacaccccagtgcttacgcctccacccctgcagcctcctggcccgctcaccttcctcacccctcctctgacccacccatggtgccagggccgaagctgacctttagctccctcctgccccttgctagggtctgagccaagcccctcgactccctcactgtgttgacacttggcactttgctggccccgagaaaggtcgatgacacagccgcaaatctaatccacgtagttcccatttactccttaatctgattgatgttccctcttgcactgaataatacatgcctctctcaggtaagccattttataaaacaagaagataaaaagcactgttgaggcagtgtttgcttttgccgagctggtgtccgacagctccctgggtgtccggggtgggagagctgttgacagaagctctccgggccctcaggggcttagatcccacttgagtcgtaagccttcttgcttttgataacacagtattatttctcttactgtagaagaaaaagtttattaccaaacaagagtatttttatgaaagaaaaggacaaacctataaattaactcaacctatatctcccttgaaaatactttcaggctccaccaaaacgtagaactgaaagcatgtattttggaagaaagagatacattttgtatgctttcttttccttttgtagattcccagtttattttctaagactgcaaagatcactttgtcaccagccctgggacctgagaccaagggggtgtcttgtgggcagtgagggggtgaggagaggctggcatgaggttcagtcattccagtgagctccaaagaggggccacctgttctcaaaagcatgttggggaccaggaggtaaaactggccatttatggtgaacctgtgtcttggagctgacttactaagtggaatgagccgaggatttgaatatcagttctaaccttgatagaagaaccttgggttacatgtggttcacattaagaggatagaatcctttggaatcttatggcaaccaaatgtggcttgacgaagtcgtggtttcatctcttaaacacagtgtgtaaatttattcaactaacgatgggaaatgtattacttctgtacacagtggactgaagtgcaatttgttgaaagggaacaagtcattgaagagaaaaaaaaagcccaatacttagagtcccaattttgtctcatttgcc

SEQ ID NO: 159000 - DNA, 2700 bp, Homo sapiens
  Payload ID: 11112
  Gene Symbol: NPTX2
  Gene Name: neuronal pentraxin II
  Uniprot ID: P47972
  ENST ID: ENST00000265634
  CDS Start-End: 166-1461
agcgcggtgggtgcggctgtgagacggcaggagacttctgccccgcggtgcacgcgaccctcgagacgacagcgcggctactgccagcagcgaaggcgcctcccgcggagcgccccgacggcgcccgctcgcccatgccgagctgagcgcggcagcggcggcgggatgctggcgctgctggccgccagcgtggcgctcgccgtggccgctggggcccaggacagcccggcgcccggtagccgcttcgtgtgcacggcactgcccccagaggcggtgcacgccggctgcccgctgcccgcgatgcccatgcagggcggcgcgcagagtcccgaggaggagctgagggccgcggtgctgcagctgcgcgagaccgtcgtgcagcagaaggagacgctgggcgcgcagcgcgaggccatccgcgagctcacgggcaagctagcgcgctgcgaggggctggcgggcggcaaggcgcgcggcgcgggggccacgggcaaggacactatgggcgacctgccgcgggaccccggccacgtcgtggagcagctcagccgctcgctgcagaccctcaaggaccgcctggagagcctcgagcaccagctcagagcaaacgtgtccaatgctgggctgcccggcgacttccgcgaggtgctccagcagcggctgggggagctggagaggcagcttctgcgcaaggtggcagagctggaggacgagaagtccctgctgcacaatgagacctcggctcaccggcagaagaccgagagcaccctgaacgcgctgctgcagagggtcaccgagctggagcgaggcaatagcgcctttaagtcaccagatgcgttcaaggtgtccctcccactccgcacaaactacctatacggcaagatcaagaagacgctgcctgagctgtacgccttcaccatctgcctgtggctgcggtccagcgcctcaccaggcattggcacccccttctcctatgcggtgccagggcaggccaacgagatcgtgctgatcgagtggggcaacaaccccatcgagctgctcatcaacgacaaggttgcgcagctgcccctgtttgtcagtgacggcaagtggcaccacatctgtgtcacctggacgacacgggatggcatgtgggaggcattccaggacggagagaagctgggcactggggagaacctggccccctggcaccccatcaagcccgggggcgtgctgatccttggacaagagcaggacaccgtggggggtaggtttgatgccactcaggcatttgtcggggagctcagccagttcaacatatgggaccgcgtccttcgcgcacaagaaattgtcaacatcgccaactgctccacaaacatgccgggcaacatcatcccgtgggtggacaataacgtcgatgtgttcggaggggcctccaagtggcccgtggagacgtgtgaggagcgtctccttgacttgtagccgccttctcctctgtccaggaggccgggatcaggctgttgccatggaagttcagggccatagactgccccacttaaactcttgtcagtctgggctcagggttcccagagctcattccccaggaatctctaagaccagggctggggcagtgtctgtcactggcttgtttgttccctaccaatattctgttgctgtttgaagtagtgccagggtcccctgggaagatgcccccaagacacctgccccaagtgggtggatatctgccttcctgctgcaagtggaggcaggtccagcagcccctcttcagagcccctgtaaatgctatcgcagcctgagtcctgccgccttccagttccttggtgtcccgtgcaccccttctgtctgtcccctttcatggctgtgcagccgtcccgctggagtggccatgtcccttgtgcattgagtgcatccccgctggtgactaagctcgcagcaagcggctaccccccgatctgcaaaagggcctctccctttgtgttctatacattgtgaatcttcccgtctgaagaacgcccagcctgcccagacaaagccccgccttccccaaagcagaggggctgtctgtgtctccagaaaggggacatcgggggggaggggggctcagaaaggagaagggctgtgatctccggtcccttcccccatcatccttccttagactgatgctttgactgaatcatcactagctatggcattaaaaggcctctcttctcatctggtgccaaaggttccgttgcagctttttacaaccatccggtgtggtttggaggatttgttttttttttttcccaacagaaaagaacagccattagaagaaggctcccattttctgatgttccgccccactgtgaagagtgtgctcgttttaaattcatgttgattcttgtaagcactggactgtcttcatcaagtatttccctacagaactcctcaagaaaacagagatcatttggctagagattgtctgagtgactccaagctactcactgtattggacgggagtagtaatttattttaaagataaagtgactaagtggggaaatttataaagctaaatattatatattttatttttcatacatgtttgaagtgcaaatctgtggatattccatttgtaggaccaagtcgacatgcccatcctgacattgtatgctacgagaactcttctgatgatggaatttcgattaaagtgcactgaaagat

SEQ ID NO: 159001 - DNA, 5784 bp, Homo sapiens
  Payload ID: 11113
  Gene Symbol: NPTXR
  Gene Name: neuronal pentraxin receptor
  Uniprot ID: O95502
  ENST ID: ENST00000333039
  CDS Start-End: 125-1627
cggctccggctccggctccggctcccgcgcctgccccgctcggcccagcgcgcccgggctccgcgccccgaccccgccgccgcgcctgccgggggcctcgggcgcccccgccgcccgcctcacgctgaagttcctggccgtgctgctggccgcgggcatgctggcgttcctcggtgccgtcatctgcatcatcgccagcgtgcccctggcggccagcccggcgcgggcgctgcccggcggcgccgacaatgcttcggtcgcctcgggcgccgccgcgtccccgggcccgcagcggagcctgagcgcgctgcacggcgcgggcggttcagccgggccccccgcgctgcccggggcacccgcggccagcgcgcacccgctgccgcccgggcccctgttcagccgcttcctgtgcacgccgctggctgctgcctgcccgtcgggggcccagcagggggacgcggcgggcgctgcgccgggcgagcgcgaagagctgctgctgctgcagagcacggccgagcagctgcgccagacggcgctgcagcaggaggcgcgcatccgcgccgaccaggacaccatccgtgagctcaccggcaagctgggccgctgcgagagcggcctgccgcgcggcctccagggcgccgggccccgccgcgacaccatggccgacgggccctgggactcgcctgcgctcattctggagctggaggacgccgtgcgcgccctgcgggaccgcatcgaccgcctggagcaggagcttccagcccgtgtgaacctctcagctgccccagccccagtctctgctgtgcccaccggcctacactccaagatggaccagctggaggggcagctgctggcccaggtgctggcactggagaaggagcgtgtggccctcagccacagcagccgccggcagaggcaggaagtggaaaaggagttggacgtcctgcagggtcgtgtggctgagctggagcacgggtcctcagcctacagtcctccagatgccttcaagatcagcatccccatccgtaacaactacatgtacgcccgcgtgcggaaggctctgcccgagctctacgcattcaccgcctgcatgtggctgcggtccaggtccagcggcaccggccagggcacccccttctcctactcagtgcccgggcaggccaacgagattgtactgctagaggcgggccatgagcccatggagctgctgatcaacgacaaggtggcccagctgcccctgagcctgaaggacaatggctggcaccacatctgcatcgcctggaccacaagggatggcctatggtctgcctaccaggacggggagctgcagggctccggtgagaacctggctgcctggcaccccatcaagcctcatgggatccttatcttgggccaggagcaggataccctgggtggccggtttgatgccacccaggcctttgtcggtgacattgcccagtttaacctgtgggaccacgccctgacaccagcccaggtcctgggcattgccaactgcactgcgccactgctgggcaacgtccttccctgggaagacaagttggtggaggcctttgggggtgcaacaaaggctgccttcgatgtctgcaaggggagggccaaggcatgaggggccacctcatccagggcccctcccttgcctgccactttggggacttgaggggggtcatattccctcctcagcctgcccacgcactggccttccctcctgccccactcctggctgtgcctcccatttcccctcacctgtacccacacctccagaatgccctgccctgcgagtgtgtcccctgtccccacctgagtggggaggagcgtctcaagtgaacagtgggagcctgcccacctggcactgcactggagttgtctcttaccccaccctccctgcccatcaactgtatctgatttcactaattttgacagcacccccagtagggtaggattgtgtatgagggggaccccactatctcagtggtgggggtggccgcccgcccccttgtcccccatgcaacaggcccagtggcttccccttcagggccacaacaggctgtagaaggggatgacgaggacatcagaggttagacttaccctcctccctctttccaccagctgccagtcaagggcagtgggatctcgatggagcctccccccccccccacccatgcctccctcttcctcctctttcctcctctctttgtgtgtagcggtttgaatgttggttccatgcctggcccagccccacctcagtctccaggacattcctttcccagctccagcctggagggaaggggacaaagaccccaggaggccaaagggctgcagtcaccccttgtgctcacccatagtgatggccactggtatagtcatcgctctccctccatgccaaggacaggacttggaccgcttcagcctgggctgggagcagccctaaggtagaggcctcatggcccaggagaccccacctctggcagagccacattacctaccctgtgcatggtcctggggcagcaaggaagaagctcagagggtggggagaagcatgaagcagtgagcagagcactgggtgagagggagaagaccttggttcctagccagccctgctaatgtgctgtgtggccttctgtaagtccctgccctctctgggcctggccttcctcattcgtgagctgaggccctcgctttggtcatttgctctccagattgggtgtgagcttctctgtgattccaggtggatatgtggggaaagctctggtgaccctgggcttcgcaggggtagatcccaggactcggcagtggatgggatgcagccagtcatgggttagggtcagcagagactcagagtccagggcaaggttcaaggcagactaacctcatgcatggattgtaaaaaaccagctccctttggatcaacccagcctggcacccttgcctgtctgagagtgtctcaaagggctgatggcttcctggtccccttgagtcatcaccagcttccccaagagagtgtcagaatcttaagagctgagaggccgggcacggtggctcacgcctgtaatcccagcactttgggaggctgagacaggcagatcacttgaggtcaggagttcgaagtcagcctggccaacgtggtgaaaccccatcttcactaaaaatacaaaacttagctggttaggtggtgcatgcctgtagtcccagctactcgggaggccgaggcagaagaatctcttgaactgaggaggtggaggttgcagtgagccgagatcacgccattgcactccagcctgggcaacagagcaagactccatctcaaaaaaataataataatcttaaagatgagaaaagccaccccatctggcaccacagctgcatcttgcttgtgagaaatggggaagagttcagggaggacacgtgacctgcacaggatcacagagcatggggcagagccaggactagagctcagggcatctgactccctcttcagtgttcttccccctccatgttgcctgcccctgaagacctttgagttcagtctacacctaagcaggtagacatccgcgaggtcagatgctttccaacatgacacctgaacatcttcctttatgcaacacccaaacatcttggcatccccaccccaggaagtgcggggaggaggttatgatccctgggcgcttcggcagaatggagagctgaggtgtccctcccctgctagtcacctaccaggtgtctgagcagctgcatgctccctggctcaagtgggcactgtaccttttgcctgcctttttgttccctatctccactccctgaggccacttagcctgagacatgatgcaagagctgcaggccggggggctcagtgccatggaagctactccaagttgcattgcctcccgcgcccagatcctgctttccatttcgagaacataaatagattgcccagcccctccagtacaatcccactggaagaaaaggcaatggcgggcttcagccagacctgctgagacctaggttgccacggtaacagccaaagacatcaacccaagtgctgggtcaagtgtctcatcatactggcactgttgctggggtgacggcagaattcagaacttcaatttcagtgacgccaagcttgatgtgtttctgttattgttttgaagaaggtagctcttgtggaggacttgggagaaggatggggtcttaggaaggaggtgacagcacttgcatggtcacttgagcccacacacacgctcaaccccaagtcctttatgctttgtcacagtgaagatgagacctctgacgtccaagccttgttcctgtgctgcatcacccactcagccttccaaagggaacaggaacaaatttccccagcaccactgtttgggtcccgcttttcctatcttctgctgcccctgagcacatccaagcagacagggaaagaggagtcagacatggcccagtcacatcctgagctgctcctggctgataaccacgatggagcccgtgtttgtcctgccatctggcactgcactgagtgtggcacaggcaccgtcctgttgatctcacaacacagttctaagttaggacgttcttggctccgttagacaggtgaggaaactggggcacagagaggtgatgtcatctgcctggtgtcaatcagctagcaagtgatggagcccagatttcaaaccaaagggggttacgtccaggggctgagttcccactcacctgtgtagagtgccatctgggcaccattgctccagacgtgttccgacccctttcccagcccacagggcttgaagtgaaggaacagaggcagggggtgggccagccccagggccagggtccccttggtgaagccgtgccagggggctcagctgcttcagggaatgtgtccctcccaccatgggccagagcttcagcccttctttagctcagctagagttcacaggagagccaaaaaagaaaaggaagctgagcatctcccgagtcctgggcagggaaggggagggaaattgctgcttctccaactcttgcttggggccaagccctgcaccagttgcttcccagctgttatctgccagatcttcccatcttgtggcatgtggtgcccccaccaacatcccaaggggaccaatccccttgccaccactttgcatcacctgggaccacagatttggacaggaagggctctgagaagaggccaaagccctcattttacagatgaggaagctgaagcccggggaggggagcgaccctcaaggccacccagctggacacgggagacttgagcccagccttctgactgcattcagccctctctaggacgcagcagcctctccccagcactgagtcccccctcctttgtgtgtcccagcacccttggcctgagtaaacttggaaaggggctccctcccagagaagggactactctcttcacccctttattccagctgcctgccaccccagacccccacctcccaccctgacccccgacccctgggtggggaaggggctcacatgggcccaggctgagtgtgagtgagcatgtcaagttgtctgacactgtgacattagtgcaccctactgacaacccctccccagccttgcccctttctcctctccctgttttgtacataaattgacatgagctgcaacatgtgtgcgtgtgtgtgcgtgtgtgtgtgtgtgtatgtgtgtgtgatctgtgtcatggttttgttacctttttgtttttgtaaacttgaatgttcaaaataaacatgctgtttactctga

SEQ ID NO: 159002 - DNA, 2013 bp, Homo sapiens
  Payload ID: 11114
  Gene Symbol: NREP
  Gene Name: neuronal regeneration related protein
  Uniprot ID: Q16612
  ENST ID: ENST00000257435
  CDS Start-End: 182-388
ctccctcccccaatcccccctccccccccaatctgtctttctagcatgttgccctttttcaaccacatttgtgtttcaggtgtagagaggagagagagtgaacagggagcggggcttttgtctgttggtctccctggactgaagagagggagaatagaagcccaagactaagattctcaaaatggtttattacccagaactctttgtctgggtcagtcaagaaccatttccaaacaaggacatggagggaaggcttcctaagggaagacttcctgtcccaaaggaagtgaaccgcaagaagaacgatgagacaaacgctgcctccctgactccactgggcagcagtgaactccgctccccaagaatcagttacctccactttttttaatcgtaacacctccatttgtattacatatggtgtatgggtattgatgaggtcatggtatcatatatgggatttttttctgtgtaaatcatcaagtataagaagaaactatgggactctgagccttgctttagagaatttacagtggacaaataggtgtcatcaaaccagtttttaatcattctgactcaagtgaaaacgctcagaatttcacactgtgaatccacgtttacaacccttacaggtgggccttcaggcctggttcgctacaacaatgtcttccacaactcaaactcccaccgcgctcacacaaccggtccactcctgccttttcactcacacagctcccgactgcttcttgcagaggctgagagtcccccccccaccttttttttcatttagatgtaacaaacctagtagtttatgttcatcaattgtctgtatatctctatattttatccatgtactcttttgatgtatagaagtagtttgaaactcattgtttccttgtggtaagtgaccgagatgctgccacaggacctgagacactgatgaatggtgctattttggactttcaacatgctccttggcgaggtagctctgatggagttattttttatttccatgttctaagaaggtgttggtactctgtttccctgaatgttgttctctagactggattgacttgttttccttgtgtcttcagtgtggctttcttcctcagtgttgtaggttgagcgaatgctaccagagtgtgagagaccattgtctcgttggctggcgctcacggacatgcagtcacggtagcgggagcaatcacaaaactgtaatttacttaccaaatctcttcctttccgtagcctcgcctgcctgacttagagaaagaaaagcaataattttacaggcattttgaggtgtctctttgggttctttctgtttgaaaggatatttgtcgaaaaaaagagcaaaaccgttttaaataaactccccctggaaaaaaacccaaaacactggcatctgagtgggaatatgaaaatgacaccttttccaaatattaaattggaaaacaaggtctacaaaatcatgatacttttttaaaaggcagagcattcttttttcggcaattttgataagcaaggtgtagatttacatttttgtccttgctcccaacgaaatggataaacaaaaataaattaccatctactcatggaatgttgttgtgttagccagtctgaaagcccaccttaatttttatataactgtctttagctcttcttttgacagggcaggccttgttctgaactgtttcgcttctgactgttaaacaccgatgacgcatgcactgcacttcttcgttttcttcttgctcccccattggcctgagtttcttgtgcattactcctctccctccttcgttagaataggtatatcagctgtgtaaatagagcaagaaaacagtattctgcatctgtggcatttatgtagagttgcagttgtgtactgctgaaaatgcaggcttttgtaacagtgtgatctttactgatgcactcatgacaagtacccaatgtattttagctattttagtagtatttgttcaataaatacgcaagctgtaaggtaactgtctg

SEQ ID NO: 159003 - DNA, 2581 bp, Homo sapiens
  Payload ID: 11114
  Gene Symbol: NREP
  Gene Name: neuronal regeneration related protein
  Uniprot ID: Q16612
  ENST ID: ENST00000379671
  CDS Start-End: 266-472
cggggcgcagagctgcgggtccgctttgtctccccggggcgccgcgcggtgcagtggggacggcgcggcgagcggggcgcccggggcgcgggtgcggggtgtcggggcgcgcgcgcctgttggccgctcgccgacggggcccagagccgccgattcctgccgagtgtagagaggagagagagtgaacagggagcggggcttttgtctgttggtctccctggactgaagagagggagaatagaagcccaagactaagattctcaaaatggtttattacccagaactctttgtctgggtcagtcaagaaccatttccaaacaaggacatggagggaaggcttcctaagggaagacttcctgtcccaaaggaagtgaaccgcaagaagaacgatgagacaaacgctgcctccctgactccactgggcagcagtgaactccgctccccaagaatcagttacctccactttttttaatcgtaacacctccatttgtattacatatggtgtatgggtattgatgaggtcatggtatcatatatgggatttttttctgtgtaaatcatcaagtataagaagaaactatgggactctgagccttgctttagagaatttacagtggacaaataggtgtcatcaaaccagtttttaatcattctgactcaagtgaaaacgctcagaatttcacactgtgaatccacgtttacaacccttacaggtgggccttcaggcctggttcgctacaacaatgtcttccacaactcaaactcccaccgcgctcacacaaccggtccactcctgccttttcactcacacagctcccgactgcttcttgcagaggctgagagtcccccccccaccttttttttcatttagatgtaacaaacctagtagtttatgttcatcaattgtctgtatatctctatattttatccatgtactcttttgatgtatagaagtagtttgaaactcattgtttccttgtggtaagtgaccgagatgctgccacaggacctgagacactgatgaatggtgctattttggactttcaacatgctccttggcgaggtagctctgatggagttattttttatttccatgttctaagaaggtgttggtactctgtttccctgaatgttgttctctagactggattgacttgttttccttgtgtcttcagtgtggctttcttcctcagtgttgtaggttgagcgaatgctaccagagtgtgagagaccattgtctcgttggctggcgctcacggacatgcagtcacggtagcgggagcaatcacaaaactgtaatttacttaccaaatctcttcctttccgtagcctcgcctgcctgacttagagaaagaaaagcaataattttacaggcattttgaggtgtctctttgggttctttctgtttgaaaggatatttgtcgaaaaaaagagcaaaaccgttttaaataaactccccctggaaaaaaacccaaaacactggcatctgagtgggaatatgaaaatgacaccttttccaaatattaaattggaaaacaaggtctacaaaatcatgatacttttttaaaaggcagagcattcttttttcggcaattttgataagcaaggtgtagatttacatttttgtccttgctcccaacgaaatggataaacaaaaataaattaccatctactcatggaatgttgttgtgttagccagtctgaaagcccaccttaatttttatataactgtctttagctcttcttttgacagggcaggccttgttctgaactgtttcgcttctgactgttaaacaccgatgacgcatgcactgcacttcttcgttttcttcttgctcccccattggcctgagtttcttgtgcattactcctctccctccttcgttagaataggtatatcagctgtgtaaatagagcaagaaaacagtattctgcatctgtggcatttatgtagagttgcagttgtgtactgctgaaaatgcaggcttttgtaacagtgtgatctttactgatgcactcatgacaagtacccaatgtattttagctattttagtagtatttgttcaataaatacgcaagctgtaaggtaactgtctgatttggctcatcattgaagaggcctagttttgaatgtcttctctggttcttgctaattcatgtgtttccagagccccagaagtcaggccagcaaacccaagggcaaatatcaaaagagagagaatcagctctgcctttcatgcgttttcccttttgaggattttatgagattaggggctaggcagtggctcattaagatggtatttgcagagctgcctctggacacaaagcagaattagaccaagatccttttatttctacactttttctcccttccaaggcattcccatacgcttcaaaacttactctttctcactccttgccattaagacccactctgtggtattctttaagacccactctgtggtattctttctttttccctgccaaaagagatctgacctcccttcttcatggaatatgtgcacttttcctcagacaaaaagcttaaacttttgtaagaggataaaaatttgagacagaa

SEQ ID NO: 159004 - DNA, 1468 bp, Homo sapiens
  Payload ID: 11114
  Gene Symbol: NREP
  Gene Name: neuronal regeneration related protein
  Uniprot ID: Q16612
  ENST ID: ENST00000395634
  CDS Start-End: 193-531
agaatgactgttgccagcatctagaaggaattacttttccaggcagtgcaatcatgctatttatcaaaagaaacattggacaatcagaatgggctgcagagctgtgtcctgagctgtctggccaactcccggcaagaagcttctttgtcctttaaagactgaactttatcctcaagcagtaacaggactggaatgaaaggagtttggaattattctgctttgagccgaagagaagatgaaacacgaacccagaggagcaggatgacagacagagtcccttgttccaaatgtttccaggttcactgccagatttctgttctgaattgtgtttattacccagaactctttgtctgggtcagtcaagaaccatttccaaacaaggacatggagggaaggcttcctaagggaagacttcctgtcccaaaggaagtgaaccgcaagaagaacgatgagacaaacgctgcctccctgactccactgggcagcagtgaactccgctccccaagaatcagttacctccactttttttaatcgtaacacctccatttgtattacatatggtgtatgggtattgatgaggtcatggtatcatatatgggatttttttctgtgtaaatcatcaagtataagaagaaactatgggactctgagccttgctttagagaatttacagtggacaaataggtgtcatcaaaccagtttttaatcattctgactcaagtgaaaacgctcagaatttcacactgtgaatccacgtttacaacccttacaggtgggccttcaggcctggttcgctacaacaatgtcttccacaactcaaactcccaccgcgctcacacaaccggtccactcctgccttttcactcacacagctcccgactgcttcttgcagaggctgagagtcccccccccaccttttttttcatttagatgtaacaaacctagtagtttatgttcatcaattgtctgtatatctctatattttatccatgtactcttttgatgtatagaagtagtttgaaactcattgtttccttgtggtaagtgaccgagatgctgccacaggacctgagacactgatgaatggtgctattttggactttcaacatgctccttggcgaggtagctctgatggagttattttttatttccatgttctaagaaggtgttggtactctgtttccctgaatgttgttctctagactggattgacttgttttccttgtgtcttcagtgtggctttcttcctcagtgttgtaggttgagcgaatgctaccagagtgtgagagaccattgtctcgttggctggcgctcacggacatgcagtcacggtagcgggagcaatcacaaaactgtaatttacttaccaaatctcttcctttccgtagcctcgcctgcctgacttagagaaagaaaagcaataattttacaggcattttgaggtgtctctttgggttctttctgtttg

SEQ ID NO: 159005 - DNA, 698 bp, Homo sapiens
  Payload ID: 11114
  Gene Symbol: NREP
  Gene Name: neuronal regeneration related protein
  Uniprot ID: Q16612
  ENST ID: ENST00000455559
  CDS Start-End: 377-583
acgcgcagccacaggacctctgggcccggccttcaggggcgctccccgccccgggcttccccgcggaagggagtggggcgcgcgtacccagctgaggggcagggtccgacccgaggccgtgtgcaaatgcatccttcgcggactctttgtgtgtctgagcgcggctccgcgccgccgcaggcaccattttctgcttcgctcaggacaggcacataaaaggaaggcggctgccgcccgtcgccgtcctcttttcctcagatgccctctgctgcaggtgtagagaggagagagagtgaacagggagcggggcttttgtctgttggtctccctggactgaagagagggagaatagaagcccaagactaagattctcaaaatggtttattacccagaactctttgtctgggtcagtcaagaaccatttccaaacaaggacatggagggaaggcttcctaagggaagacttcctgtcccaaaggaagtgaaccgcaagaagaacgatgagacaaacgctgcctccctgactccactgggcagcagtgaactccgctccccaagaatcagttacctccactttttttaatcgtaacacctccatttgtattacatatggtgtatgggtattgatgaggtcatggtatcatatatgggatttttttctgtgtaaatcatcaagtataagaagaaactatgggact

SEQ ID NO: 159006 - DNA, 704 bp, Homo sapiens
  Payload ID: 11114
  Gene Symbol: NREP
  Gene Name: neuronal regeneration related protein
  Uniprot ID: Q16612
  ENST ID: ENST00000419114
  CDS Start-End: 281-487
agtctggctcctaggcggctgcacagtggcagcaaggctggggcgctggctccgcgccagctccatcagaattagctcattgttcactagcaccctagcgggagagagagggaaagggagagagagagactcttagagaaagagagagacacacacactcttggagagagagcgcgaggtgtagagaggagagagagtgaacagggagcggggcttttgtctgttggtctccctggactgaagagagggagaatagaagcccaagactaagattctcaaaatggtttattacccagaactctttgtctgggtcagtcaagaaccatttccaaacaaggacatggagggaaggcttcctaagggaagacttcctgtcccaaaggaagtgaaccgcaagaagaacgatgagacaaacgctgcctccctgactccactgggcagcagtgaactccgctccccaagaatcagttacctccactttttttaatcgtaacacctccatttgtattacatatggtgtatgggtattgatgaggtcatggtatcatatatgggatttttttctgtgtaaatcatcaagtataagaagaaactatgggactctgagccttgctttagagaatttacagtggacaaataggtgtcatcaaaccagtttttaatcattctgactcaagtgaaaacgctcagaatttcacactgtg

SEQ ID NO: 159007 - DNA, 2065 bp, Homo sapiens
  Payload ID: 11114
  Gene Symbol: NREP
  Gene Name: neuronal regeneration related protein
  Uniprot ID: Q16612
  ENST ID: ENST00000446294
  CDS Start-End: 254-460
actagcaccctagcgggagagagagggaaagggagagagagagactcttagagaaagagagagacacacacactcttggagagagagcgcgaggcagggagatgatctcctcctcctttttccaaggctgcacttcttggaagtgaagccggtgtagagaggagagagagtgaacagggagcggggcttttgtctgttggtctccctggactgaagagagggagaatagaagcccaagactaagattctcaaaatggtttattacccagaactctttgtctgggtcagtcaagaaccatttccaaacaaggacatggagggaaggcttcctaagggaagacttcctgtcccaaaggaagtgaaccgcaagaagaacgatgagacaaacgctgcctccctgactccactgggcagcagtgaactccgctccccaagaatcagttacctccactttttttaatcgtaacacctccatttgtattacatatggtgtatgggtattgatgaggtcatggtatcatatatgggatttttttctgtgtaaatcatcaagtataagaagaaactatgggactctgagccttgctttagagaatttacagtggacaaataggtgtcatcaaaccagtttttaatcattctgactcaagtgaaaacgctcagaatttcacactgtgaatccacgtttacaacccttacaggtgggccttcaggcctggttcgctacaacaatgtcttccacaactcaaactcccaccgcgctcacacaaccggtccactcctgccttttcactcacacagctcccgactgcttcttgcagaggctgagagtcccccccccaccttttttttcatttagatgtaacaaacctagtagtttatgttcatcaattgtctgtatatctctatattttatccatgtactcttttgatgtatagaagtagtttgaaactcattgtttccttgtggtaagtgaccgagatgctgccacaggacctgagacactgatgaatggtgctattttggactttcaacatgctccttggcgaggtagctctgatggagttattttttatttccatgttctaagaaggtgttggtactctgtttccctgaatgttgttctctagactggattgacttgttttccttgtgtcttcagtgtggctttcttcctcagtgttgtaggttgagcgaatgctaccagagtgtgagagaccattgtctcgttggctggcgctcacggacatgcagtcacggtagcgggagcaatcacaaaactgtaatttacttaccaaatctcttcctttccgtagcctcgcctgcctgacttagagaaagaaaagcaataattttacaggcattttgaggtgtctctttgggttctttctgtttgaaaggatatttgtcgaaaaaaagagcaaaaccgttttaaataaactccccctggaaaaaaacccaaaacactggcatctgagtgggaatatgaaaatgacaccttttccaaatattaaattggaaaacaaggtctacaaaatcatgatacttttttaaaaggcagagcattcttttttcggcaattttgataagcaaggtgtagatttacatttttgtccttgctcccaacgaaatggataaacaaaaataaattaccatctactcatggaatgttgttgtgttagccagtctgaaagcccaccttaatttttatataactgtctttagctcttcttttgacagggcaggccttgttctgaactgtttcgcttctgactgttaaacaccgatgacgcatgcactgcacttcttcgttttcttcttgctcccccattggcctgagtttcttgtgcattactcctctccctccttcgttagaataggtatatcagctgtgtaaatagagcaagaaaacagtattctgcatctgtggcatttatgtagagttgcagttgtgtactgctgaaaatgcaggcttttgtaacagtgtgatctttactgatgcactcatgacaagtacccaatgtattttagctattttagtagtatttgttcaataaatacgca

SEQ ID NO: 159008 - DNA, 559 bp, Homo sapiens
  Payload ID: 11114
  Gene Symbol: NREP
  Gene Name: neuronal regeneration related protein
  Uniprot ID: Q16612
  ENST ID: ENST00000453526
  CDS Start-End: 179-385
acactcttggagagagagcgcgaggcagggagatgatctcctcctcctttttccaaggctgcacttcttggaagtgaagccgagaggagagagagtgaacagggagcggggcttttgtctgttggtctccctggactgaagagagggagaatagaagcccaagactaagattctcaaaatggtttattacccagaactctttgtctgggtcagtcaagaaccatttccaaacaaggacatggagggaaggcttcctaagggaagacttcctgtcccaaaggaagtgaaccgcaagaagaacgatgagacaaacgctgcctccctgactccactgggcagcagtgaactccgctccccaagaatcagttacctccactttttttaatcgtaacacctccatttgtattacatatggtgtatgggtattgatgaggtcatggtatcatatatgggatttttttctgtgtaaatcatcaagtataagaagaaactatgggactctgagccttgctttagagaatttacagtggacaaataggtgtcatcaaaccagttttta

SEQ ID NO: 159009 - DNA, 2304 bp, Homo sapiens
  Payload ID: 11114
  Gene Symbol: NREP
  Gene Name: neuronal regeneration related protein
  Uniprot ID: Q16612
  ENST ID: ENST00000447165
  CDS Start-End: 480-686
actctgaggcattacactacacggtggaaggctgattcctattctgtcgtcttgattgcaaatatactgccagtagtatgtctgggaacaaagagcagccagaaaacaatctatttttatcacttggttctacttttaagttgctaaaccttttgaactcatgcaatttaaagatgaaccaaacactaagaatagcccaggactctgcaaagccaagtaccagggattcctttgtcccttagttaagcctataggccacttggaaagctctttcagaaatcccagtagttaacaataatttgcatgtaacttatcttaaccacagaaaatggttattcgtctgtaacctctaaagaggcatttttcgtttgctgacctgtggtgaggcgatgtgtctactgtatttaaacatattttgcaggttggtctccctggactgaagagagggagaatagaagcccaagactaagattctcaaaatggtttattacccagaactctttgtctgggtcagtcaagaaccatttccaaacaaggacatggagggaaggcttcctaagggaagacttcctgtcccaaaggaagtgaaccgcaagaagaacgatgagacaaacgctgcctccctgactccactgggcagcagtgaactccgctccccaagaatcagttacctccactttttttaatcgtaacacctccatttgtattacatatggtgtatgggtattgatgaggtcatggtatcatatatgggatttttttctgtgtaaatcatcaagtataagaagaaactatgggactctgagccttgctttagagaatttacagtggacaaataggtgtcatcaaaccagtttttaatcattctgactcaagtgaaaacgctcagaatttcacactgtgaatccacgtttacaacccttacaggtgggccttcaggcctggttcgctacaacaatgtcttccacaactcaaactcccaccgcgctcacacaaccggtccactcctgccttttcactcacacagctcccgactgcttcttgcagaggctgagagtcccccccccaccttttttttcatttagatgtaacaaacctagtagtttatgttcatcaattgtctgtatatctctatattttatccatgtactcttttgatgtatagaagtagtttgaaactcattgtttccttgtggtaagtgaccgagatgctgccacaggacctgagacactgatgaatggtgctattttggactttcaacatgctccttggcgaggtagctctgatggagttattttttatttccatgttctaagaaggtgttggtactctgtttccctgaatgttgttctctagactggattgacttgttttccttgtgtcttcagtgtggctttcttcctcagtgttgtaggttgagcgaatgctaccagagtgtgagagaccattgtctcgttggctggcgctcacggacatgcagtcacggtagcgggagcaatcacaaaactgtaatttacttaccaaatctcttcctttccgtagcctcgcctgcctgacttagagaaagaaaagcaataattttacaggcattttgaggtgtctctttgggttctttctgtttgaaaggatatttgtcgaaaaaaagagcaaaaccgttttaaataaactccccctggaaaaaaacccaaaacactggcatctgagtgggaatatgaaaatgacaccttttccaaatattaaattggaaaacaaggtctacaaaatcatgatacttttttaaaaggcagagcattcttttttcggcaattttgataagcaaggtgtagatttacatttttgtccttgctcccaacgaaatggataaacaaaaataaattaccatctactcatggaatgttgttgtgttagccagtctgaaagcccaccttaatttttatataactgtctttagctcttcttttgacagggcaggccttgttctgaactgtttcgcttctgactgttaaacaccgatgacgcatgcactgcacttcttcgttttcttcttgctcccccattggcctgagtttcttgtgcattactcctctccctccttcgttagaataggtatatcagctgtgtaaatagagcaagaaaacagtattctgcatctgtggcatttatgtagagttgcagttgtgtactgctgaaaatgcaggcttttgtaacagtgtgatctttactgatgcactcatgacaagtacccaatgtattttagctattttagtagtatttgttcaataaatacgcaagctgtaaggtaa

SEQ ID NO: 159010 - DNA, 636 bp, Homo sapiens
  Payload ID: 11114
  Gene Symbol: NREP
  Gene Name: neuronal regeneration related protein
  Uniprot ID: Q16612
  ENST ID: ENST00000450761
  CDS Start-End: 200-406
aggaagtcaactatccaccatcttgtcggatccatgcagtcttagcagactttcttcacaccatggatgattgaatccactactctttgcatgtttaaagacagagaaggcagattctctgcagagagacgtgaagagaaggttggtctccctggactgaagagagggagaatagaagcccaagactaagattctcaaaatggtttattacccagaactctttgtctgggtcagtcaagaaccatttccaaacaaggacatggagggaaggcttcctaagggaagacttcctgtcccaaaggaagtgaaccgcaagaagaacgatgagacaaacgctgcctccctgactccactgggcagcagtgaactccgctccccaagaatcagttacctccactttttttaatcgtaacacctccatttgtattacatatggtgtatgggtattgatgaggtcatggtatcatatatgggatttttttctgtgtaaatcatcaagtataagaagaaactatgggactctgagccttgctttagagaatttacagtggacaaataggtgtcatcaaaccagtttttaatcattctgactcaagtgaaaacgctcagaatttcacactgtgaatccacgtttac

SEQ ID NO: 159011 - DNA, 475 bp, Homo sapiens
  Payload ID: 11114
  Gene Symbol: NREP
  Gene Name: neuronal regeneration related protein
  ENST ID: ENST00000508161
  CDS Start-End: 375-475
acctctgggcccggccttcaggggcgctccccgccccgggcttccccgcggaagggagtggggcgcgcgtacccagctgaggggcagggtccgacccgaggccgtgtgcaaatgcatccttcgcggactctttgtgtgtctgagcgcggctccgcgccgccgcaggcaccattttctgcttcgctcaggacaggcacataaaaggaaggcggctgccgcccgtcgccgtcctcttttcctcagatgccctctgctgcaggtttattattacagtgtagagaggagagagagtgaacagggagcggggcttttgtctgttggtctccctggactgaagagagggagaatagaagcccaagactaagattctcaaaatggtttattacccagaactctttgtctgggtcagtcaagaaccatttccaaacaaggacatggagggaaggcttcctaagggaagacttcctgtcccaaa

SEQ ID NO: 159012 - DNA, 801 bp, Homo sapiens
  Payload ID: 11114
  Gene Symbol: NREP
  Gene Name: neuronal regeneration related protein
  ENST ID: ENST00000515855
  CDS Start-End: 118-225
acatttgtgtttcaggtgtagagaggagagagagtgaacagggagcggggcttttgtctgttggtctccctggactgaagagagggagaatagaagcccaagactaagattctcaaaatggtttattacccagaactctttgtctgggtcagtcaagaaccatttccaaacaaggacatggagggaaggcttcctaagttaagaaagaaaaacagaatccactgaaaataaaatttctatttgaaagtttcataagtgtaattgactaacgggaagacttcctgtcccaaaggaagtgaaccgcaagaagaacgatgagacaaacgctgcctccctgactccactgggcagcagtgaactccgctccccaagaatcagttacctccactttttttaatcgtaacacctccatttgtattacatatggtgtatgggtattgatgaggtcatggtatcatatatgggatttttttctgtgtaaatcatcaagtataagaagaaactatgggactctgagccttgctttagagaatttacagtggacaaataggtgtcatcaaaccagtttttaatcattctgactcaagtgaaaacgctcagaatttcacactgtgaatccacgtttacaacccttacaggtgggccttcaggcctggttcgctacaacaatgtcttccacaactcaaactcccaccgcgctcacacaaccggtccactcctgccttttcactcacacagctcccgactgcttcttgcagaggctgagagtcccccccccaccttttttttcatttagatgta

SEQ ID NO: 159013 - DNA, 311 bp, Homo sapiens
  Payload ID: 11114
  Gene Symbol: NREP
  Gene Name: neuronal regeneration related protein
  ENST ID: ENST00000507032
  CDS Start-End: 297-311
gcaggcaccattttctgcttcgctcaggacaggcacataaaaggaaggcggctgccgcccgtcgccgtcctcttttcctcagatgccctctgctgcaggtgtagagaggagagagagtgaacagggagcggggcttttgtctaaaatggttattcgtctgtaacctctaaagaggcatttttcgtttgctgacctgtggtgaggcgatgtgtctactgtatttaaacatattttgcaggttggtctccctggactgaagagagggagaatagaagcccaagactaagattctcaaaatggtttattaccca

SEQ ID NO: 159014 - DNA, 587 bp, Homo sapiens
  Payload ID: 11114
  Gene Symbol: NREP
  Gene Name: neuronal regeneration related protein
  Uniprot ID: Q16612
  ENST ID: ENST00000509427
  CDS Start-End: 184-390
agacacacacactcttggagagagagcgcgaggcagggagatgatctcctcctcctttttccaaggctgcacttcttggaagtgtagagaggagagagagtgaacagggagcggggcttttgtctgttggtctccctggactgaagagagggagaatagaagcccaagactaagattctcaaaatggtttattacccagaactctttgtctgggtcagtcaagaaccatttccaaacaaggacatggagggaaggcttcctaagggaagacttcctgtcccaaaggaagtgaaccgcaagaagaacgatgagacaaacgctgcctccctgactccactgggcagcagtgaactccgctccccaagaatcagttacctccactttttttaatcgtaacacctccatttgtattacatatggtgtatgggtattgatgaggtcatggtatcatatatgggatttttttctgtgtaaatcatcaagtataagaagaaactatgggactctgagccttgctttagagaatttacagtggacaaataggtgtcatcaaaccagtttttaatcattctgactcaagtgaaaac

SEQ ID NO: 159015 - DNA, 771 bp, Homo sapiens
  Payload ID: 11114
  Gene Symbol: NREP
  Gene Name: neuronal regeneration related protein
  ENST ID: ENST00000509979
  CDS Start-End: 229-336
gtgtgtctgagcgcggctccgcgccgccgcaggcaccattttctgcttcgctcaggacaggcacataaaaggaaggcggctgccgcccgtcgccgtcctcttttcctcagatgccctctgctgcaggtgtagagaggagagagagtgaacagggagcggggcttttgtctgttggtctccctggactgaagagagggagaatagaagcccaagactaagattctcaaaatggtttattacccagaactctttgtctgggtcagtcaagaaccatttccaaacaaggacatggagggaaggcttcctaagttaagaaagaaaaacagaatccactgaaaataaaatttctatttgaaagtttcataagtgtaattgactaacgggaagacttcctgtcccaaaggaagtgaaccgcaagaagaacgatgagacaaacgctgcctccctgactccactgggcagcagtgaactccgctccccaagaatcagttacctccactttttttaatcgtaacacctccatttgtattacatatggtgtatgggtattgatgaggtcatggtatcatatatgggatttttttctgtgtaaatcatcaagtataagaagaaactatgggactctgagccttgctttagagaatttacagtggacaaataggtgtcatcaaaccagtttttaatcattctgactcaagtgaaaacgctcagaatttcacactgtgaatccacgtttacaacccttacaggtgggccttcaggcctggttcg

SEQ ID NO: 159016 - DNA, 987 bp, Homo sapiens
  Payload ID: 11114
  Gene Symbol: NREP
  Gene Name: neuronal regeneration related protein
  ENST ID: ENST00000509025
  CDS Start-End: 118-231
acatttgtgtttcaggtgtagagaggagagagagtgaacagggagcggggcttttgtctgttggtctccctggactgaagagagggagaatagaagcccaagactaagattctcaaaatggtttattacccagaactctttgtctgggtcagtcaagaaccatttccaaacaaggacatggagggaaggcttcctaaggaaacttctctgtcccctttcatggagtcataacaatggaagaggttcaggagaaaggaatcagctccttgcaaggtttctgatactgtccttcctgaaatgaagagctcctctaccttaacccagcctgctaagactgctacagcaagattgacagctggtcagattgctgtcctcataaaagcatggtcatcaccttcagctgggctctcaaatggaacagccgggcaatctttgtttccctggtcagtttgtcttcccatttccatgtcaaaattcctgtcaaacttctgaatctctcacctatctcagcaaatgggaagtctccacatctctacacctacctgttctcatgctcctgtcctgcttcgctcctcacatttgacaaggagctcctcctcctatgaaaggccacttgtcccatagctttcttccatcccatcgtgtctcagcatctcagggatcttgcactgatcattgtcccattttcagagccggtccaagaggcagattacctgagcagcagcctggcatgccaatttgtaagaagtgaagagcatccttgaaataattagagaagaacagtaacagttaatttaggttttcctatataaacaaagcataaattggcctgtttcttactgaatagaaatttaaaccaaacaaaatgaaacaaagaagcatattcctctgactctggtccatcacaaatgagtttttgtgatctttcccgttgcaggatgcaaggatgtataagtagaatcgcagtgttgccaacaatgaagttgg

SEQ ID NO: 159017 - DNA, 540 bp, Homo sapiens
  Payload ID: 11114
  Gene Symbol: NREP
  Gene Name: neuronal regeneration related protein
  Uniprot ID: Q16612
  ENST ID: ENST00000508870
  CDS Start-End: 281-487
cggggcgcgggtgcggggtgtcggggcgcgcgcgcctgttggccgctcgccgacggggcccagagccgccgattcctgccgagtgtagagaggagagagagtgaacagggagcggggcttttgtctaaaatggttattcgtctgtaacctctaaagaggcatttttcgtttgctgacctgtggtgaggcgatgtgtctactgtatttaaacatattttgcaggttggtctccctggactgaagagagggagaatagaagcccaagactaagattctcaaaatggtttattacccagaactctttgtctgggtcagtcaagaaccatttccaaacaaggacatggagggaaggcttcctaagggaagacttcctgtcccaaaggaagtgaaccgcaagaagaacgatgagacaaacgctgcctccctgactccactgggcagcagtgaactccgctccccaagaatcagttacctccactttttttaatcgtaacacctccatttgtattacatatggtgtatgggtattgatgaggtcat

SEQ ID NO: 159018 - DNA, 557 bp, Homo sapiens
  Payload ID: 11114
  Gene Symbol: NREP
  Gene Name: neuronal regeneration related protein
  ENST ID: ENST00000513100
  CDS Start-End: 362-557
aaatgcatccttcgcggactctttgtgtgtctgagcgcggctccgcgccgccgcaggcaccattttctgcttcgctcaggacaggcacataaaaggaaggcggctgccgcccgtcgccgtcctcttttcctcagatgccctctgctgcaggtttattattacagtgtagagaggagagagagtgaacagggagcggggcttttgtctaaaatggttattcgtctgtaacctctaaagaggcatttttcgtttgctgacctgtggtgaggcgatgtgtctactgtatttaaacatattttgcaggttggtctccctggactgaagagagggagaatagaagcccaagactaagattctcaaaatggtttattacccagaactctttgtctgggtcagtcaagaaccatttccaaacaaggacatggagggaaggcttcctaagggaagacttcctgtcccaaaggaagtgaaccgcaagaagaacgatgagacaaacgctgcctccctgactccactgggcagcagtgaactccgctccccaagaatcagttacctcc

SEQ ID NO: 159019 - DNA, 3564 bp, Homo sapiens
  Payload ID: 11114
  Gene Symbol: NREP
  Gene Name: neuronal regeneration related protein
  ENST ID: ENST00000514515
  CDS Start-End: 118-231
acatttgtgtttcaggtgtagagaggagagagagtgaacagggagcggggcttttgtctgttggtctccctggactgaagagagggagaatagaagcccaagactaagattctcaaaatggtttattacccagaactctttgtctgggtcagtcaagaaccatttccaaacaaggacatggagggaaggcttcctaaggaaacttctctgtcccctttcatggagtcataacaatggaagaggttcaggagaaaggaatcagctccttgcaaggtttctgatactgtccttcctgaaatgaagagctcctctaccttaacccagcctgctaagactgctacagcaagattgacagctggtcagattgctgtcctcataaaagcatggtcatcaccttcagctgggctctcaaatggaacagccgggcaatctttgtttccctgattgtaacattggaataaaggaaaatgtacaagactcatgaagagctgaaatgttcacgaatatcgagcaaaaccagagttaactaaatggactgaactcagaaagctgaagaaacctttttacttttgcttggaatattggtgatccttttttagtttttcagagccaaggaaacttattttgagctatttatggcctttaataattaagtaaggtatacactcctgtgatcaagatttggagcatgtttgtttctctctgcctggtttctctagaatttggaaactgtgagtattcttatggcaatatagttgtttgcatcagtgcagtaagactccatttttcttttgcaacaggacacagttggaaaaactggtaattttaccaaggctttgactggaagggtatgcttccctttcaggagtcaatctagatttgcagagtcaataaaagcctagtggggaaactagcctcatactatcacctacacagtccctgtacagggttactgacctgtggtcagtaaagaatgtcactaacagctctaggagcttcaagtttatcttgggaccttaagaggagaggatcacccaactcacaggtatttgaggatacaaacccatggttgggcttggctttaaaaggtcttatctgagattccttgtggaacagaattccatcaaagccaatccaaaaggcctatgtagaaataattattcttgctgcactttatgcaaataatcaggccaagtataaagctaaagtctgttttgcaaaccactcagttcctatgatgatttgttttttaataaatatgaggactggagagagagaaatcatatttgaaaacttatcatacatttgtcattaaattctaaactcactagttgtttttaagtctttgcctacattttaggtttgctcctgtgaatcaactagcaatccctggctgcagctcagaaagaacaaaaggggtgggtaatatagaaattcggatcaatattctagttctgagcaattatcctgcaaatactgccaggtgatgcacatcatgcgaaggtttcctttttgggaaaggaagaccaagggaactaaccaaagctaagcaccatgcacccaaatcctagcaagcataactatagccaccagttatctggatgtgtcacaagacatcctttcctcccccttgttggaggactcagttccacagtttcaccttagcatttggtttatgataaggagtccatacaaacacctccccactattccccaactcctccagacacatttttgtcccagactcaattccaagcttcaggtcaaagccctaggaaagaaaactggatctaagggatccagaggcaaatgacaacagaggttaaaaagcacagtgcaggtgagcatggctgattcctgtcaattaagccaaccccaagcttcctatttcatggataaaggccatgttagtatccatggcataaatgaggcctagggaatccaagaccactgacagcaggggagatagggcatatgtgggtaagagcagatgattcctaccccctaggcccccctgcttcatgggtacaagctgctttggcactcatggtgggacctgacaaggtcaccaggactcggggatgcaaggatggaagagggaaagaggatgctcttccttctttccctcatgtaccctgggtatctgctaggaagagaagggaaccaaggatgcctgctcccttctttctagatgggtagccattcatcttcagtctgttcccctttagaatgcatcctgaacccctgggacttctttgaaaaatacaccttctttttattcctttctcttcttttgttgtctcttcgccaataggtaatcatgtctccatattacaagacactcccctcagatgcaccctccaaattggaaagagttaattccccaaaccttaaactggttggcttagggctggggcccacaggaagtgaacccagacacctgatatgcagcaaaagggtaaagttttttttgccagttgggcttttggccttcctctccctgagcaaactggtaaaaggcctcagaatttttgagctgtctttacccctccccttgttttgttttgatacatgttttctaataacctggtttgtcggttcttgccttcaggccaccaaactccaaacagtcatgcaactggaacctctgacaatggccccttttgctggggacccttatatcagcctctgagagagctctgactgctgtttccccaaaacaacaccccctgtcagcaggaaggatttaagatcggtctttgtccttgtccttaatccaatggcagttagatgtacttctttagaggggagaatgagacagccaggtgggagggagtccctggagaaactccaaacagcctgcccactgaggtggagcctcaggaagttcataatgtttgcagcagggaggaacctggtccctcgccttcctgtgtggaacctgggattcaaactgccaggagggaagcactctaacagagggactctggccttgcaagagtccctgttcctcaggtttttcccttttcacccaataaaaccctactttactcaccctttaagccatctgacagcccaaattttcatggccgtgggacagagaagaaccctgtctttagctgaactaaagaaaagtcctgcaacagtttcctatccccctgtattattcaccacacttgcaatacctggtttagtgcctgtacaaagatcccatgaaggtatctgtcttctttacccttttacacttcagaacctagtatggtccttggcagacagaatgcctccaataaatatttgtgaaataaataagaatctaagcgttcctttctggagtcttacaatcattttaatttctttatcactgctttgctctggaattacttcagttatccttatttttttctagaagaaaaatgttttataatctgagaatatggaatgcttaacaaaattggattgtaccctgagtagataatgtacttcaaaagtgtattcaatggtcagtagataatgtacttcaaaagtgtattaaaaagaaatcaatgttacttctaatttgaaaaa

SEQ ID NO: 159020 - DNA, 3581 bp, Homo sapiens
  Payload ID: 11115
  Gene Symbol: NYAP1
  Gene Name: neuronal tyrosine-phosphorylated phosphoinositide-3-kinase adaptor 1
  Uniprot ID: Q6ZVC0
  ENST ID: ENST00000300179
  CDS Start-End: 160-2685
gtctctgtctctcctcctccctcctcctgctccgggcggagcccggcatgggggggccggcgcccggcaggccagtggatccgggacccagggagggccgccccccgggcctggtggcactgagcagggccccccagcccccacctcctgccccacgagatgaacctcctctaccgaaaaaccaagctggagtggaggcagcacaaggaagaggaggccaagaggagctccagtaaggaggtggcccccgctggctcggctgggcccgcggccggccaggggcctggggtccgcgtgcgggacatcgcctcgctgcggcgctccctcaggatgggtttcatgacgatgcccgcctcccaggagcacaccccgcacccctgccgcagcgccatggccccacgctccctctcctgccactcggtgggcagcatggacagtgtcgggggtggccctggcggggccagtgggggcctcacagaggacagcagcacccgaagaccccctgccaagccccggagacaccccagcaccaagctcagcatggtggggcctgggtctggggcagagacgccccccagcaagaaagcaggctcacagaagccaaccccagagggccgagagtccagccggaaggttcctccgcagaagcccaggcgaagccctaacacccagctctctgtctccttcgatgagtcctgccccccaggcccctctcctcgaggggggaacctgcctcttcagcgcctcactagggggtcccgagtagctggggaccctgatgtgggtgcccaggaagagcctgtgtacattgagatggtgggggacgtctttaggggaggaggacgaagtggaggaggcctggctgggccccctcttgggggtgggggcccgacccctccagcgggcgccgactcggactctgaagagagtgaggccatctatgaagagatgaagtacccgctgccggaagaggctggggaaggccgggccaatggccctccaccattgacggcaacatccccgccacaacagcctcacgcccttccgccccatgcccaccgccgcccagcttcagccctcccgagccggagggacgggacgcccaccaagaccactccttgtgaaatccccccgcccttccccaacctccttcagcaccggcctccactcctggccttcccccaagccaagtctgcttcccgaacccctggcgatggggtctcaaggctacctgtcctctgccactccaaggagccagccggctccaccccagctccccaagtgcctgcacgggagcgggagacgcctcccccaccgcctccacctcctgctgccaacctgctgctgctgggaccatcgggccgggcccggagccactcgacaccgttgccaccccagggctctggccagccccggggggagcgggagctccccaactcccacagcatgatctgccctaaggcggcgggggcgccggcagccccccctgccccggccgccttgctccccggcccccccaaggacaaggccgtgtcttacaccatggtgtactcggcggtcaaggtgaccacgcactctgtcctgccagctggtccacccctgggtgctggggagccaaagacggagaaggagatctcggtcctccatgggatgctgtgtaccagctcaaggccccctgtgccagggaagaccagcccccacggtggggccatgggcgcagcagctggggtcctccaccaccgcggctgcctggcctccccccacagccttccggacccaactgtaggccccctgaccccgctgtggacctacccagccacagcagctgggctcaagagaccccctgcctatgagagcctcaaggctgggggggtgctgaataagggctgtggtgtgggggccccatcccccatggtcaagatccagctgcaggagcaagggaccgatgggggtgcttttgccagcatctcctgtgcccacgtcatcgccagcgcagggacaccagaggaggaagaagaggaggtgggcgccgcgacatttggggcaggctgggccctgcagaggaaggtcctctatggagggagaaaagcaaaggagttggacaaggtcgaggacggtgcccgggcctggaatggcagtgccgagggtccaggcaaggtggagcgtgaggacaggggccctgggacatcggggatcccagtgagaagccagggggcagagggactgctggccaggatccaccatggagaccgaggagggagccgcaccgcgctgcccattccctgccagaccttccccgcctgccaccgcaatggagacttcacgggaggctaccgcctggggcgctccgcctccacctccggagtccggcaggtcgtgctccacacaccccggccctgcagccagcccagggatgccctgagccagccccaccccgcgctgccgctgcctctgcccctgccgccccagccggcccgcgagcgtgacgggaagctgctggaggtgatcgagcgcaagcgctgcgtgtgcaaggagatcaaggcgcgccaccgcccggaccgaggcctctgcaagcaggagagcatgcccatcctccccagctggcggcggggacccgagccccgcaagtccggcaccccgccctgccgccggcagcacacggtcctctgggacaccgccatctgaggcgggcgggggggtaccggggcgcctggactggggagggggcgggcacgcctggctctcccgggagcctcgccttgagagacattgaaagactacgtgggagagtgccagggagaacccctgccctccaacctaccccccgggatggggagagtctgccaggcccattgggcttaggatgccaacagcgctgctgagaaacggaggaggaggagggtttgcttgaggttggggcgagagtcgctctggctgttcttcccgctgggcgttgtacacccctcctcctgaaccaagccagaggtcagcatggggaagggaggaaggaagggatgggaggaagaggggggtgggtgagctgaaagagagggactagagtgccagatggaggagctcttttctagagagccgggagttggggagggggtatttattttgttatttatttcagtctggagggcgattctgggcctttctgacctactcctgagctaggagtggagaatcagggccaagtttgcactctccccaatgccaatgcctaaaggccccgccgtccatgccaccccacagccaaggaggggtctgcatggggagtggaccgagagaagaaggggcccagggaagcagagggcccaagaccattcacagtatttacaatttgccagaatttggtagtcagtgtggcctgctctgaatcaggcatcttatttagttctggggtgagggtctagtgccagggatgggcaggatgatgggggaggaggagggaaattttagcgggtggagggggtgggcagggtatttatttaaattaaaaaacaaaacagaagagatgtcaggaacttttttttaattcctttcttttcagaataatatattaaaagactcatgatcct

SEQ ID NO: 159021 - DNA, 2777 bp, Homo sapiens
  Payload ID: 11115
  Gene Symbol: NYAP1
  Gene Name: neuronal tyrosine-phosphorylated phosphoinositide-3-kinase adaptor 1
  ENST ID: ENST00000454988
  CDS Start-End: 1-2358
atgggtttcatgacgatgcccgcctcccaggagcacaccccgcacccctgccgcagcgccatggccccacgctccctctcctgccactcggtgggcagcatggacagtgtcgggggtggccctggcggggccagtgggggcctcacagaggacagcagcacccgaagaccccctgccaagccccggagacaccccagcaccaagctcagcatggtggggcctgggtctggggcagagacgccccccagcaagaaagcaggctcacagaagccaaccccagagggccgagagtccagccggaaggttcctccgcagaagcccaggcgaagccctaacacccagctctctgtctccttcgatgagtcctgccccccaggcccctctcctcgaggggggaacctgcctcttcagcgcctcactagggggtcccgagtagctggggaccctgatgtgggtgcccaggaagagcctgtgtacattgagatggtgggggacgtctttaggggaggaggacgaagtggaggaggcctggctgggccccctcttgggggtgggggcccgacccctccagcgggcgccgactcggactctgaagagagtgaggccatctatgaagagatgaagtacccgctgccggaagaggctggggaaggccgggccaatggccctccaccattgacggcaacatccccgccacaacagcctcacgcccttccgccccatgcccaccgccgcccagcttcagccctcccgagccggagggacgggacgcccaccaagaccactccttgtgaaatccccccgcccttccccaacctccttcagcaccggcctccactcctggccttcccccaagccaagtctgcttcccgaacccctggcgatggggtctcaaggctacctgtcctctgccactccaaggagccagccggctccaccccagctccccaagtgcctgcacgggagcgggagacgcctcccccaccgcctccacctcctgctgccaacctgctgctgctgggaccatcgggccgggcccggagccactcgacaccgttgccaccccagggctctggccagccccggggggagcgggagctccccaactcccacagcatgatctgccctaaggcggcgggggcgccggcagccccccctgccccggccgccttgctccccggcccccccaaggacaaggccgtgtcttacaccatggtgtactcggcggtcaaggtgaccacgcactctgtcctgccagctggtccacccctgggtgctggggagccaaagacggagaaggagatctcggtcctccatgggatgctgtgtaccagctcaaggccccctgtgccagggaagaccagcccccacggtggggccatgggcgcagcagctggggtcctccaccaccgcggctgcctggcctccccccacagccttccggacccaactgtaggccccctgaccccgctgtggacctacccagccacagcagctgggctcaagagaccccctgcctatgagagcctcaaggctgggggggtgctgaataagggctgtggtgtgggggccccatcccccatggtcaagatccagctgcaggagcaagggaccgatgggggtgcttttgccagcatctcctgtgcccacgtcatcgccagcgcagggacaccagaggaggaagaagaggaggtgggcgccgcgacatttggggcaggctgggccctgcagaggaaggtcctctatggagggagaaaagcaaaggagttggacacagaggtcgaggacggtgcccgggcctggaatggcagtgccgagggtccaggcaaggtggagcgtgaggacaggggccctgggacatcggggatcccagtgagaagccagggggcagagggactgctggccaggatccaccatggagaccgaggagggagccgcaccgcgctgcccattccctgccagaccttccccgcctgccaccgcaatggagacttcacgggaggctaccgcctggggcgctccgcctccacctccggagtccggcaggtcgtgctccacacaccccggccctgcagccagcccagggatgccctgagccagccccaccccgcgctgccgctgcctctgcccctgccgccccagccggcccgcgagcgtgacgggaagctgctggaggtgatcgagcgcaagcgctgcgtgtgcaaggagatcaaggcgcgccaccgcccggaccgaggcctctgcaagcaggagagcatgcccatcctccccagctggcggcggggacccgagccccgcaagtccggcaccccgccctgccgccggcagcacacggtcctctgggacaccgccatctgaggcgggcgggggggtaccggggcgcctggactggggagggggcgggcacgcctggctctcccgggagcctcgccttgagagacattgaaagactacgtgggagagtgccagggagaacccctgccctccaacctaccccccgggatggggagagtctgccaggcccattgggcttaggatgccaacagcgctgctgagaaacggaggaggaggagggtttgcttgaggttggggcgagagtcgctctggctgttcttcccgctgggcgttgtacacccctcctcctgaaccaagccagaggtcagcatggggaagggaggaaggaagggatgggaggaagaggggggtgggtgagctgaaagagagggactagagtgccagatggaggagctcttttctagagagccgggagttgggga

SEQ ID NO: 159022 - DNA, 4828 bp, Homo sapiens
  Payload ID: 11116
  Gene Symbol: NYAP2
  Gene Name: neuronal tyrosine-phosphorylated phosphoinositide-3-kinase adaptor 2
  Uniprot ID: Q9P242
  ENST ID: ENST00000272907
  CDS Start-End: 414-2375
aatttcttccctgctggacctggaaggagaggggctgtgtgttcatccccacccattagctatgccctcttttctccgaatgtcgatttaaggaagcaagcacctgtcttccgccactgcatcttcctagcaaactttaaaggccattttatctgataggaaggacatcgagaatgctctgatctagtgatgaagaatctgggagtcgacacttttcccatccagacacaatgcactttaattgaagaaacactgagctgaactacaagtctatttcttatggtgctggattactcctacagaactgccctgagatcaaccgtgagagagggctctgacagacacaagtcaccttctggttattgcacttagctctccctggggacttaaattttggcagtgttcctctttacatgatatcctccaagatgatgagttctaatcctgaggaagaccctttggacacatttctccagtacattgaggatatggggatgaaggcctatgatggcttggttattcagaatgcgtcagatattgctcgagagaatgatcgcttgagaaatgaaactaacctagcctatttgaaagagaagaatgaaaaacgccgaagacaagaagaagcaataaagcgcataggtggagaagtagggcgaggccacgaaggaagttacgtgggcaaacatttccgcatgggattcatgacaatgcctgctcctcaggacagacttccccatccttgctccagtggcttttctgtgagatcacagtccctgcactcggttgggggcacagacgatgacagcagctgtggctcacggagacaaccaccacccaaacccaagagggaccccagcaccaagctgagcacctcatcagagacagtcagcagcactgcagccagtaagagcgggaaaacccctgagaggactgaagcgtcagctaaaccaagaccccacagcgatgaatattccaagaagattcctcctcccaaaccgaagcgaaatccgaacactcagctgagcacatctttcgatgaaacgtacatcaaaaagcatgggccccggaggacgtcgctgccgcgggactcctccttgtcccagatgggcagccccgcgggagaccccgaggaagaggagcccgtgtacatcgagatggtggggaacattctcagagacttcaggaaggaggacgatgaccagagcgaggccgtctacgaggaaatgaagtaccctatctttgacgacttgggccaagacgccaaatgtgacttcgaccatcacagctgttcttcgcagtgtgctactcccacggtgcctgacttggacttcgccaaggcctcagtgccatgcccccccaaggggctgctttgcgacatccctccgcccttccccaacctgctttctcacagacccccgctgctggtatttccccccgcccccgtgcattgctcccccaactccgacgagtccccgcttacccctctggaggtcacgaagcttcccgtgctggaaaacgtgtcttacatgaaacagccagccggggcgtcgccctccacgctgccgtcccacgtccccggccatgcgaaactggagaaagagcaggccgcggccctgggacctgcctctgccacccctgcgctctcctcgtcgcccccacccccgtctacgctgtaccgaacccagtctccccatggctaccctaaaagtcactccacctctccctcccccgtcagcatggggaggtccctgactcccctgagcctcaaaaggcctcccccttacgacgctgtgcattcgggcagcctctcaaggagctctccttcagtgcctcactcgacccccagacccgtgtcgcaagatggggccaagatggtcaacgccgcggtgaacacctacggggcagccccgggtggctcccggtcccggacacccacgagcccgctggaggagctgaccagcctcttctcctccggccgcagcctgctgcgcaagtcgtccagtggccggcgctccaaagagcctgcagagaaatcaacagaggaactgaaagtccgaagccacagcacggagccattaccaaagttggacaacaaggaaagaggccaccatggggcgtcttcctccagagagcctgtcaaagctcaggaatgggatggaacaccagggacacctgtggtcaccagtcgactaggaagatgctctgtgagccccaccttgttagcgggaaaccacagttcagagcctaaagtaagctgcaaattaggccggtctgcgtcgacgtcaggtgtgcctcctccatcagtcactcccctcaggcaaagcagtgacctgcaacagagccaggtaccatcatcgttagccaatcgtgattgacttcctgtgatacaacttgccaaatgcttcccacctctgtctgtcctgttgctgtagacaactttcgcatttgcttttatttttctatgtgtgtatgggttaggggatgcgggggatgagttctggcagtctgtgttttcatttgaaaaagaatatctttcttccttgtgattggtggtgaaactttctttgctgtttgttaccaaatcgtttttgtctctggtttccatcattctgtaatataaatgtagtaaacttgtactatatgtattggcttagtggttcttttttaaattctttctctctttcatgttttgtgtacttttatactgtctctgaaaatttatcaatatttgataaatttatctactttgttttatgtagatttctttttaaatgttttgtccagaacactcgcacagatgttgtcaatgaatttgtacatatttcttagctcttatcctattatactgtaatatttctggtggttttatttttatttagcttggagcatgactgtaagacactgttgaatattgatgtccttataaatattcatatcccgattcatttggattgagtatggcagctagtctttcttctttcttaggctattgactggcctaagacaatttgactggccagacaaattgactggccagataatctagatatttaacaaaaactgcagattaataaggcaacctttaaatgaatgacttttctctcttataccaacaatatcagaaatgttctcagaaagggaatgtaagtgttcatgcatggtaaatgagatctcaattatcacttggagaaaagagacaagaaataaaggcataaactgaaatatcatttaatcctttacagcataatatgttgctctgatgttcgtttgggtacgtggttgtggatggggaattagtatggggaaaaatcactacacataaatgtcctatctttagctcacccaataggaattcaatacattgacttaatttgtgaggcttaattgtcgttactgttaagtattataggtgttaagtagggtggtgtcattctggaatgttttctctctgcttcctagcttcaatctttgcattcatgaaactcttctgaaatagcaacttataaaacactgatgatacctccaagggaactgcccattactgatgagaaaattacatattcatctattattttaaatgtcaggctattttaaaaacataactaagtagaataattgcgttttcttctaatgagagacattgtgcctcttagtgtttttgtctgacttaaatatgcaaaatagttgatttataaatatatgaggtatctgcaaatacaagaaatgagaggcttctctcaagggtatctcaagtaccatttagaatttcttgtgtcttaatttaaaatttaaatgcctttatataaatgttaaatgcctttataactaaatgtaccaactcaaacactttttggatataaaagaagtagaaacagtaagacactgaataaaataaataagataaactgccaacttagctaattaaagctattccaaaaatattgtacttaccaacatttaaagcttaaaaacattgggtactgaaagaagagaagtttagctaattggcagaggattgcactaatacaatcaagttttcaagtttatgacccttgctagtatattaccttcaatatctcagagatgttttgtattatttgttttgttttgcttttttcctagttgtctttatagctgtttcaccctaagccccttcaaactctcaatgaaagcaggttcttgggataaacttccagaatagagacaaggtataccctttgtgcctttgcattatcaactctttgttcacctgatgggaagttcttcgtttttcaaaatgtagcaagggagaaagcccaggacgcctttatatgctgttagtttccttacctgctgatagagattctgacacacagtcaaatcatacatgggctgtcagagctataaattagaaggctggcctctaggcttctcctctgtggcttatagccagttgtaatatacatgcattcctatactctagagatgaagtggtaagcatagctcatatgaacactgctctgaactcctctgacttagcattcaacttaagtcaagaaatacttattggctgggcgtggtggctcacgcctgtaatcccagcactctgggaggcagaggtgggtggatcacaaggtcaggagattgagaccatcctggctaacacggtgagaccccatctctactaaaaatacaaaaaattagccaggtgtggtggcgggcgcctgtagtcccagctacttgggaggctgaggcaggagaatgtggtgaacctgggaggtggagcttgcagtgagctgagatcgcaccactgcactccagcctgggtgacagagcgagactccatctc

SEQ ID NO: 159023 - DNA, 1297 bp, Homo sapiens
  Payload ID: 11117
  Gene Symbol: NNAT
  Gene Name: neuronatin
  Uniprot ID: Q16517
  ENST ID: ENST00000062104
  CDS Start-End: 118-363
gcgggtacttaaggcgcggccaccgcggctgcggcagtgcgcccaacagcggactccgagaccagcggatctcggcaaaccctctttctcgaccacccacctaccattcttggaaccatggcggcagtggcggcggcctcggctgaactgctcatcatcggctggtacatcttccgcgtgctgctgcaggtgttcctggaatgctgcatttactgggtaggattcgcttttcgaaatcctccagggacacagcccattgcgagaagtgaggtgttcaggtactccctgcagaagctggcatacacggtgtcgcggaccgggcggcaggtgttgggggagcgcaggcagcgagcccccaactgaggccccagctcccagccctgggcggccgtatcatcaggtgctcctgtgcatctcggccagcacgggagccagtgccgcgcaggaatgtggggtcccctgtgttccctcgccagaggagcacttggcaaggtcagtgaggggccagtagacccccggagaagcagtaccgacaatgacgaagataccagatcccttcccaacccctttgcaccggtcccactaaggggcagggtcgagagaggaggggggatagggggagcagacccctgagatctgggcataggcaccgcattctgatctggacaaagtcgggacagcaccatcccagccccgaagccagggccatgccagcaggccccaccatggaaatcaaaacaccgcaccagccagcagaatggacattctgacatcgccagccgacgccctgaatcttggtgcagcaccaaccgcgtgcctgtgtggcgggactggagggcacagttgaggaaggagggtggttaagaaatacagtggggccctctcgctgtcccttgcccagggcacttgcattccagcctcgctgcatttgctctctcgattcccctttcctcctcactgcctcccaagcccaccctactccaaaataatgtgtcacttgatttggaactattcaagcagtaaaagtaaatgaatcccacctttactaaaacactttctctgaaccccccttgcccctcactgatcttgcttttccctggtctcatgcagttgtggtcaatattgtggtaatcgctaattgtactgattgtttaagtgtgcattagttgtgtctccccagctagattgtaagctcctggaggacagggaccacctctacaaaaaataaaaaaagtacctcccctgtctcgcacagtgtcccaggaccctgcggtgcagtagaggcgcaccaaaactt

SEQ ID NO: 159024 - DNA, 1209 bp, Homo sapiens
  Payload ID: 11117
  Gene Symbol: NNAT
  Gene Name: neuronatin
  Uniprot ID: Q16517
  ENST ID: ENST00000346199
  CDS Start-End: 114-278
gtacttaaggcgcggccaccgcggctgcggcagtgcgcccaacagcggactccgagaccagcggatctcggcaaaccctctttctcgaccacccacctaccattcttggaaccatggcggcagtggcggcggcctcggctgaactgctcatcatcggctggtacatcttccgcgtgctgctgcaggtgttcaggtactccctgcagaagctggcatacacggtgtcgcggaccgggcggcaggtgttgggggagcgcaggcagcgagcccccaactgaggccccagctcccagccctgggcggccgtatcatcaggtgctcctgtgcatctcggccagcacgggagccagtgccgcgcaggaatgtggggtcccctgtgttccctcgccagaggagcacttggcaaggtcagtgaggggccagtagacccccggagaagcagtaccgacaatgacgaagataccagatcccttcccaacccctttgcaccggtcccactaaggggcagggtcgagagaggaggggggatagggggagcagacccctgagatctgggcataggcaccgcattctgatctggacaaagtcgggacagcaccatcccagccccgaagccagggccatgccagcaggccccaccatggaaatcaaaacaccgcaccagccagcagaatggacattctgacatcgccagccgacgccctgaatcttggtgcagcaccaaccgcgtgcctgtgtggcgggactggagggcacagttgaggaaggagggtggttaagaaatacagtggggccctctcgctgtcccttgcccagggcacttgcattccagcctcgctgcatttgctctctcgattcccctttcctcctcactgcctcccaagcccaccctactccaaaataatgtgtcacttgatttggaactattcaagcagtaaaagtaaatgaatcccacctttactaaaacactttctctgaaccccccttgcccctcactgatcttgcttttccctggtctcatgcagttgtggtcaatattgtggtaatcgctaattgtactgattgtttaagtgtgcattagttgtgtctccccagctagattgtaagctcctggaggacagggaccacctctacaaaaaataaaaaaagtacctcccctgtctcgcacagtgtcccaggaccctgcggtgcagtagaggcgcaccaaaa

SEQ ID NO: 159025 - DNA, 2885 bp, Homo sapiens
  Payload ID: 11118
  Gene Symbol: NDNF
  Gene Name: neuron-derived neurotrophic factor
  Uniprot ID: Q8TB73
  ENST ID: ENST00000379692
  CDS Start-End: 528-2234
ccgcgagagagtggagctaactgagcagcgcacccgccacggccgctgccgccccgtgcgcccggctctcccagcaccccgcgcggcgctccagccaggcgcctgtgcgactagcggcggccggcgaagcccgcgccagccccgcgggtcgctgcggcatcctcccgccgcccagcccccgcacgctccctgcagtttaaaaggacctcccgccgcttctcggcgctgccccgggattccccagccccgcgcggctccctactccacttcgcagcaacttcggcgaccgcgcgccgcccgccctcgcccgcctttgaagtttgctgtgccgaccgcaaagttgggacacttcagcggattgaatttttctcttttatctgcctccgtccccgccctccaggcttctcgttcctggatattggtgcttagcatcttggcagggtccggggacgtggactatttcgcacaccacaccacggggagggatttttttctattttccctacgaaaaacagatctttttaaggatggtgctgctccactggtgcctgctgtggctcctgtttccactcagctcaaggacccagaagttacccacccgggatgaggaactttttcagatgcagatccgggacaaggcattttttcatgattcgtcagtaattccagatggagctgaaattagcagttatctctttagagatacacctaagaggtatttctttgtggttgaagaagacaatactccattatcagtcacagtgacgccctgtgatgcgcctttggagtggaagctgagcctccaggagctgccagaggacaggagcggggaaggctcaggtgatctggaacctcttgagcagcagaagcagcagatcattaatgaggaaggcactgagttattctcctacaaaggcaatgatgttgagtattttatatcgtctagttccccatccggtttatatcagttggatcttctttcaacagagaaagacacacatttcaaagtatatgccaccacaactccagaatctgatcagccataccctgagttaccctatgacccaagagtagatgtgacctcactggggcgcaccacggtcactttggcctggaaaccaagccccactgcctctttgctgaaacaacccattcagtactgtgtggtcatcaacaaagagcacaatttcaaaagtctctgtgcagtggaagcaaaactgagtgcagatgatgcttttatgatggcaccgaaacctggtctggacttcagcccctttgactttgcccactttggatttccttctgataattcaggtaaagaacgcagtttccaggcaaagccttctccaaaactggggcgtcatgtctactccaggcccaaggttgatattcagaaaatctgcataggaaacaagaacatcttcaccgtctctgatctgaaacccgacacgcagtactactttgatgtatttgtggtcaacatcaacagcaacatgagcaccgcttatgtaggtacctttgccaggaccaaggaagaagccaaacagaagacagtcgagctaaaagatgggaagataacagatgtatttgttaaaaggaagggagcaaagtttctacggtttgctccagtctcttctcaccaaaaagtcaccttctttattcactcttgtctggatgctgtccaaatccaagtgagaagagatgggaaacttcttctgtctcagaatgtggaaggcattcagcagtttcagcttagaggaaaacctaaagctaaatacctcgttcgactgaaaggaaacaagaaaggagcatctatgttgaaaattctagctaccacaaggcctactaagcagtcatttccctctcttcctgaagacacaagaatcaaagcctttgacaagctccgtacctgttcctcagccaccgtggcttggctaggcactcaggaaaggaacaagttttgcatctacaaaaaagaagtggatgataactacaatgaagaccagaagaaaagagagcaaaaccaatgtctaggaccagatataaggaagaagtcagaaaaggtcctctgtaaatatttccacagtcaaaacctgcagaaagcagtgaccacagaaacaattaaaggtcttcagcctggcaaatcttacctgctggatgtttatgtcataggacatggggggcactctgtaaagtatcagagtaaggttgtgaaaactagaaagttctgttagttaccttcttatagagatatattatgtagaactccaggagggacattaaatcactttaagtataaactgactactcccacagttgagagaagttgtgacctgtacttgtactatggaaggaaggatatcaacgtgtgtatattgatgtttatataagtaactcttgaaggagacttgttctagcgtgccccatggtacctagtgtgtgtctgatgccggttggtgtcaaagatagagggcttcttgaaggaacttgccattccttgctttgaccactgcatgaactgcttctaaattattttattacctaaaaatttaaaatatgccattcattgcacacacccacaaatgcaaatcattcctctctgtagatgctaggatatatataaattattttataaattcttgttttaaatgtcagtgtttctatgattgtaaactattaaattcttttcctattaaagtacagatctaatctaagtattattaagttgatagccctctagtcagttatattgctattgtaaattcttgtttgttgagtaaaatgtttaaatactatatgtatctcatgtacaaagttgacatacattatattcatgtacataaaattaaagagattagattatatactgttcattttcccaagca

SEQ ID NO: 159026 - DNA, 564 bp, Homo sapiens
  Payload ID: 11118
  Gene Symbol: NDNF
  Gene Name: neuron-derived neurotrophic factor
  ENST ID: ENST00000515757
  CDS Start-End: 130-564
agagtttccctctattgtgcaccccggtctgcttgacagtgtgatggtcccgcgtgcgcgtctcctgggttttgcagctttgtcgggggctcggtgggcctccttcattctccccgagtggcgctaaggatggtgctgctccactggtgcctgctgtggctcctgtttccactcagctcaaggacccagaagttacccacccgggatgaggaactttttcagatgcagatccgggacaaggcattttttcatgattcgtcagtaattccagatggagctgaaattagcagttatctctttagagatacacctaagaggtatttctttgtggttgaagaagacaatactccattatcagtcacagtgacgccctgtgatgcgcctttggagtggaagctgagcctccaggagctgccagaggacaggagcggggaaggctcaggtgatctggaacctcttgagcagcagaagcagcagatcattaatgaggaaggcactgagttattctcctacaaaggcaatgatgttgagtattttatatcgtctagttccccatccggttta

SEQ ID NO: 159027 - DNA, 560 bp, Homo sapiens
  Payload ID: 11118
  Gene Symbol: NDNF
  Gene Name: neuron-derived neurotrophic factor
  ENST ID: ENST00000511408
  CDS Start-End: 211-560
ctttttaaggtaagtggggagaggaaagcaatgccccagagacccgacgccttagcccgccaccctgagacctagcacaaggagcgttcacgcccgaagggtcatccgagatgggggctcgaggcacgcgcccccaaatcttcaaggcccaagaagcttctcaagggcgccctatccgtaggagctgagggcatgaggggcaggagcaggatggtgctgctccactggtgcctgctgtggctcctgtttccactcagctcaaggacccagaagttacccacccgggatgaggaactttttcagatgcagatccgggacaaggcattttttcatgattcgtcagtaattccagatggagctgaaattagcagttatctctttagagatacacctaagaggtatttctttgtggttgaagaagacaatactccattatcagtcacagtgacgccctgtgatgcgcctttggagtggaagctgagcctccaggagctgccagaggacaggagcggggaaggctcaggtgatctggaacctcttgagcagcagaagcagcagat

SEQ ID NO: 159028 - DNA, 549 bp, Homo sapiens
  Payload ID: 11119
  Gene Symbol: NOVA1
  Gene Name: neuro-oncological ventral antigen 1
  ENST ID: ENST00000347476
  CDS Start-End: 223-549
taattgggaagggaggacagacaattgttcagttgcaaaaagaaactggagccaccatcaagctgtctaagtccaaagatttttacccagctaccctggaaatatatacgtctattataaccatttcagaaataaggtactactgagcgagtgtgcttgatccagggaacggttgaagcactgaatgcagttcatggattcattgcagaaaaaattcgagaaatgccccaaaatgtggccaagacagaaccagtcagcattctacaaccccagaccaccgttaatccagatcgcatcaaacaagtaaagattatagttcccaacagcacagcaggtctgataatagggaagggaggtgctactgtgaaggctgtaatggagcagtcaggggcttgggtgcagctttcccagaaacctgatgggatcaacttgcaagagagggttgtcactgtgagtggagaacctgaacaaaaccgaaaagctgttgaacttatcatccagaagatacaagaggatccacaaagtggcagctgtctcaatatcagttat

SEQ ID NO: 159029 - DNA, 896 bp, Homo sapiens
  Payload ID: 11119
  Gene Symbol: NOVA1
  Gene Name: neuro-oncological ventral antigen 1
  Uniprot ID: P51513
  ENST ID: ENST00000344429
  CDS Start-End: 5-550
aaacatgatggcggcagctcccatccagcagaacgggacccacactggggttcccatagacctggacccgccggactcgcggaaaaggccgctggaagccccccctgaagccggcagcaccaagaggaccaatacgggcgaagacggccagtattttctaaaggttctcatacctagttatgctgctggatctataattgggaagggaggacagacaattgttcagttgcaaaaagaaactggagccaccatcaagctgtctaagtccaaagatttttacccaggtactactgagcgagtgtgcttgatccagggaacggttgaagcactgaatgcagttcatggattcattgcagaaaaaattcgagaaatgccccaaaatgtggccaagacagaaccagtcagcattctacaaccccagaccaccgttaatccagatcgcatcaaacaaacattgccatcttccccaactaccaccaagtcctctccatctgatcccatgaccacctccagagctaatcagaagcataatatctcctggatatcatgaagcaagatataagagaagaacaaaacaaaatccgtaattcattgaaagaattgtaatcatcaatctttcatattattaatactttgtaattattttctccccaacagtattttccagtagattctaatcatgtggtagggcagaaggaaatgtgttttttgttgttcatttgtttcttgtcaatagtcctgattaatttagctttgctatactgacttatatctggaagtatataaccaagataagaaaataggttttaatatgatcatcttaagctaattgtaatgaaaagaactaatggactgtcaatattcagaaaaccaaaaataaaaaatacagaaaacta

SEQ ID NO: 159030 - DNA, 959 bp, Homo sapiens
  Payload ID: 11119
  Gene Symbol: NOVA1
  Gene Name: neuro-oncological ventral antigen 1
  ENST ID: ENST00000449198
  CDS Start-End: 128-959
aatggttgttttgcggactttaagtaggatataggcaatggctaattgtagtccttatgtgtctgctaatgacaaataaatatagctcatcactatttacagtcctgggcttttcttcttttttaatatgttaagtgaagaagacggccagtattttctaaaggttctcatacctagttatgctgctggatctataattgggaagggaggacagacaattgttcagttgcaaaaagaaactggagccaccatcaagctgtctaagtccaaagatttttacccaggtactactgagcgagtgtgcttgatccagggaacggttgaagcactgaatgcagttcatggattcattgcagaaaaaattcgagaaatgccccaaaatgtggccaagacagaaccagtcagcattctacaaccccagaccaccgttaatccagatcgcatcaaacaaacattgccatcttccccaactaccaccaagtcctctccatctgatcccatgaccacctccagagctaatcaggtaaagattatagttcccaacagcacagcaggtctgataatagggaagggaggtgctactgtgaaggctgtaatggagcagtcaggggcttgggtgcagctttcccagaaacctgatgggatcaacttgcaagagagggttgtcactgtgagtggagaacctgaacaaaaccgaaaagctgttgaacttatcatccagaagatacaagaggatccacaaagtggcagctgtctcaatatcagttatgccaatgtgacaggtccagtggcaaattccaatccaaccggatctccttatgcaaacactgctgaagtgttaccaactgctgcagcagctgcagggctattaggacatgctaaccttgctggcgttgcagcctttccagcagttttatctggcttcacaggcaatgacctggtggccatcacctctgcac

SEQ ID NO: 159031 - DNA, 3912 bp, Homo sapiens
  Payload ID: 11119
  Gene Symbol: NOVA1
  Gene Name: neuro-oncological ventral antigen 1
  Uniprot ID: P51513
  ENST ID: ENST00000539517
  CDS Start-End: 319-1842
ctctcccttctccactctctccccctgtctcctttcttcttcttctttcaccctccgtctctcacaccccctccattcccctgtctcctttctgacactgcactgcagctgctcctcagccctgccccctccccagtgagaacaaaccagcaacattgctttttttcctaaagagatttatattgatccgattaaaaaaaaaaaaccttaagaaaccccaaacgcaaaaaaaaaaaaaaaaaaaaaagaaaaaagaaaagaaaaagccaaaacaaaagggagaaccttctcccggtagcagcggcaggaactgcaaacatgatggcggcagctcccatccagcagaacgggacccacactggggttcccatagacctggacccgccggactcgcggaaaaggccgctggaagccccccctgaagccggcagcaccaagaggaccaatacgggcgaagacggccagtattttctaaaggttctcatacctagttatgctgctggatctataattgggaagggaggacagacaattgttcagttgcaaaaagaaactggagccaccatcaagctgtctaagtccaaagatttttacccaggtactactgagcgagtgtgcttgatccagggaacggttgaagcactgaatgcagttcatggattcattgcagaaaaaattcgagaaatgccccaaaatgtggccaagacagaaccagtcagcattctacaaccccagaccaccgttaatccagatcgcatcaaacaaacattgccatcttccccaactaccaccaagtcctctccatctgatcccatgaccacctccagagctaatcaggtaaagattatagttcccaacagcacagcaggtctgataatagggaagggaggtgctactgtgaaggctgtaatggagcagtcaggggcttgggtgcagctttcccagaaacctgatgggatcaacttgcaagagagggttgtcactgtgagtggagaacctgaacaaaaccgaaaagctgttgaacttatcatccagaagatacaagaggatccacaaagtggcagctgtctcaatatcagttatgccaatgtgacaggtccagtggcaaattccaatccaaccggatctccttatgcaaacactgctgaagtgttaccaactgctgcagcagctgcagggctattaggacatgctaaccttgctggcgttgcagcctttccagcagttttatctggcttcacaggcaatgacctggtggccatcacctctgcacttaatacattagccagctatggatataatctcaacactttaggtttaggtctcagtcaagcagcagcaacaggggctttggctgcagcagctgccagtgccaacccagcagcagcagcagccaatttattggccacctatgccagtgaagcctcagccagtggcagcacagctggtggtacggcggggacatttgcattaggtagcctggctgctgctactgctgcaaccaatggatattttggagctgcttctcccctagctgccagtgccattctaggaacagaaaagtccacagatggatccaaggatgtagttgaaatagcagtgccagaaaacttagttggtgcaatacttggcaaaggagggaaaacattagtggaataccaggagttgactggtgcaaggatacagatctccaaaaaaggagaattcgtacctggcacaaggaatcggaaggtaaccattactggaacaccagctgcaacacaggctgctcaatatttaattacacaaaggatcacatatgagcaaggagttcgggctgccaatcctcagaaagtgggttgagtgccccagttacacatcagattgttttaacccctcctttaccccattttcaagaaggatgtactgtactttgcagaagtgaagtttttctgttattaatatataattatgcaaatgaatgcgactatgttgacaatgtgtatatgtaaataatatgtgttttaccagatgtttcatagaaagaattttttcttgatctgttttgttctctatactttgcttgtgtatatttgtcagaggtgtttctagtgtaagatttaagcctgccattttaccagcattattgtagtttaatgattgaatgtagacagggatatgcgtatagttttcagtattagttctagataacactaaattaactactgttaggttgagtatggtggggtcagtgacctaaaatggagtgaggccaaagcactgtcctgtaagtcttacttcctgcttagggcacagtgaagtaggaaacaatattttgaaaataagttttaaatttaaaatgatcaaaaagcaatatagttgcataaaagcactgtaaaatatttaaaaggttaaaactgtggaaaattatattggtaagtttacagatcaataaaagcacctgttctccatctgaactagacaatggaaataatgctgcatgctggccatggcccattcttcatcatttgtaagttcaacaaaagttctcacatggagtcccacctcttcagaggtttgtacatttgtttttaagcactgaattcactactgatcccatcgcctggccagtagaacagtcattactccattaacatcctcactgtttagacacataactgtggtacagtgtattggaaattttataaacaaaagtgaaagtgccaacaaattattgatagctgataatgtttcattatctgcaactgcttgataagtatgttgcattttaagagcttataattgtgtataatttgttaacactagaaacctattagtattgtgaatgtagattttactgtgaagctatctgtgatttagctgtttgctcccatgatggagtctttgcagcatggcgctagcagccaatgcagtttctaatactcggtaatttgcatgttttgtggagcatttttatgtcaccaaccagacagtatttcctgcatgcttatttagaagaggcagcttatcttgagaggtagtgttatctacctttgtcaggctttttgacaggtcatttcagagtaagcctttgttcccaagacccaacaactgtcaccctcttctgtacctctcctgagtgccaactgtccaggccatttgacacaccatctgttaacctctgagtttgcccactcaaggccactcataggggcatccatccccaagcacctcctcatgctgtgcatgcagtcttaaattcaatggacaaaaataaaatgctggctacctctggatcatctggctgagcaactgaattacaaaagagaattacttccatctcaacttcaacccattgattacgtccatcctagcaagctaaatggcatcccagctgctcctttctgtgcaaccaattaaagaacaatgagtgtgatgctccatgtctgaatttcgtccagcctctctctgaactgtgatctttgtcctcatgaactttcccttttgttcattgaactatatggactcttcatttcatattgatttactgtgcaatttacttttggacattgagaacttgaaattatttcctgatcccttccccttccactattaataattcatttctgtcaaactgtaagagtagactcatttttttttttttagtttttaacattggactgttatttcatttagagttctctatctctaaatatttatttagagaatgattttaaaagggaatgatatgcttgtttaaatgaaagagaaaagctgtagtaaactgtgttaattggtaatgactatttatcgtcgatactctgtagctgtgtaagttttgacaaatagtgtatctcgtggaatcagtggttagcattgccgctattatatttactcattttatcattataaatgtgcttagttcatcatgta

SEQ ID NO: 159032 - DNA, 3573 bp, Homo sapiens
  Payload ID: 11119
  Gene Symbol: NOVA1
  Gene Name: neuro-oncological ventral antigen 1
  Uniprot ID: P51513
  ENST ID: ENST00000465357
  CDS Start-End: 51-1502
aaaacaaaagggagaaccttctcccggtagcagcggcaggaactgcaaacatgatggcggcagctcccatccagcagaacgggacccacactggggttcccatagacctggacccgccggactcgcggaaaaggccgctggaagccccccctgaagccggcagcaccaagaggaccaatacgggcgaagacggccagtattttctaaaggttctcatacctagttatgctgctggatctataattgggaagggaggacagacaattgttcagttgcaaaaagaaactggagccaccatcaagctgtctaagtccaaagatttttacccaggtactactgagcgagtgtgcttgatccagggaacggttgaagcactgaatgcagttcatggattcattgcagaaaaaattcgagaaatgccccaaaatgtggccaagacagaaccagtcagcattctacaaccccagaccaccgttaatccagatcgcatcaaacaagtaaagattatagttcccaacagcacagcaggtctgataatagggaagggaggtgctactgtgaaggctgtaatggagcagtcaggggcttgggtgcagctttcccagaaacctgatgggatcaacttgcaagagagggttgtcactgtgagtggagaacctgaacaaaaccgaaaagctgttgaacttatcatccagaagatacaagaggatccacaaagtggcagctgtctcaatatcagttatgccaatgtgacaggtccagtggcaaattccaatccaaccggatctccttatgcaaacactgctgaagtgttaccaactgctgcagcagctgcagggctattaggacatgctaaccttgctggcgttgcagcctttccagcagttttatctggcttcacaggcaatgacctggtggccatcacctctgcacttaatacattagccagctatggatataatctcaacactttaggtttaggtctcagtcaagcagcagcaacaggggctttggctgcagcagctgccagtgccaacccagcagcagcagcagccaatttattggccacctatgccagtgaagcctcagccagtggcagcacagctggtggtacggcggggacatttgcattaggtagcctggctgctgctactgctgcaaccaatggatattttggagctgcttctcccctagctgccagtgccattctaggaacagaaaagtccacagatggatccaaggatgtagttgaaatagcagtgccagaaaacttagttggtgcaatacttggcaaaggagggaaaacattagtggaataccaggagttgactggtgcaaggatacagatctccaaaaaaggagaattcgtacctggcacaaggaatcggaaggtaaccattactggaacaccagctgcaacacaggctgctcaatatttaattacacaaaggatcacatatgagcaaggagttcgggctgccaatcctcagaaagtgggttgagtgccccagttacacatcagattgttttaacccctcctttaccccattttcaagaaggatgtactgtactttgcagaagtgaagtttttctgttattaatatataattatgcaaatgaatgcgactatgttgacaatgtgtatatgtaaataatatgtgttttaccagatgtttcatagaaagaattttttcttgatctgttttgttctctatactttgcttgtgtatatttgtcagaggtgtttctagtgtaagatttaagcctgccattttaccagcattattgtagtttaatgattgaatgtagacagggatatgcgtatagttttcagtattagttctagataacactaaattaactactgttaggttgagtatggtggggtcagtgacctaaaatggagtgaggccaaagcactgtcctgtaagtcttacttcctgcttagggcacagtgaagtaggaaacaatattttgaaaataagttttaaatttaaaatgatcaaaaagcaatatagttgcataaaagcactgtaaaatatttaaaaggttaaaactgtggaaaattatattggtaagtttacagatcaataaaagcacctgttctccatctgaactagacaatggaaataatgctgcatgctggccatggcccattcttcatcatttgtaagttcaacaaaagttctcacatggagtcccacctcttcagaggtttgtacatttgtttttaagcactgaattcactactgatcccatcgcctggccagtagaacagtcattactccattaacatcctcactgtttagacacataactgtggtacagtgtattggaaattttataaacaaaagtgaaagtgccaacaaattattgatagctgataatgtttcattatctgcaactgcttgataagtatgttgcattttaagagcttataattgtgtataatttgttaacactagaaacctattagtattgtgaatgtagattttactgtgaagctatctgtgatttagctgtttgctcccatgatggagtctttgcagcatggcgctagcagccaatgcagtttctaatactcggtaatttgcatgttttgtggagcatttttatgtcaccaaccagacagtatttcctgcatgcttatttagaagaggcagcttatcttgagaggtagtgttatctacctttgtcaggctttttgacaggtcatttcagagtaagcctttgttcccaagacccaacaactgtcaccctcttctgtacctctcctgagtgccaactgtccaggccatttgacacaccatctgttaacctctgagtttgcccactcaaggccactcataggggcatccatccccaagcacctcctcatgctgtgcatgcagtcttaaattcaatggacaaaaataaaatgctggctacctctggatcatctggctgagcaactgaattacaaaagagaattacttccatctcaacttcaacccattgattacgtccatcctagcaagctaaatggcatcccagctgctcctttctgtgcaaccaattaaagaacaatgagtgtgatgctccatgtctgaatttcgtccagcctctctctgaactgtgatctttgtcctcatgaactttcccttttgttcattgaactatatggactcttcatttcatattgatttactgtgcaatttacttttggacattgagaacttgaaattatttcctgatcccttccccttccactattaataattcatttctgtcaaactgtaagagtagactcatttttttttttttagtttttaacattggactgttatttcatttagagttctctatctctaaatatttatttagagaatgattttaaaagggaatgatatgcttgtttaaatgaaagagaaaagctgtagtaaactgtgttaattggtaatgactatttatcgtcgatactctgtagctgtgtaagttttgacaaatagtgtatctcgtggaatcagtggttagcattgccgctattatatttactcattttatcattataaatgtgcttagttcatcatgtag

SEQ ID NO: 159033 - DNA, 563 bp, Homo sapiens
  Payload ID: 11119
  Gene Symbol: NOVA1
  Gene Name: neuro-oncological ventral antigen 1
  ENST ID: ENST00000546546
  CDS Start-End: 1-150
gttcagttgcaaaaagaaactggagccaccatcaagctgtctaagtccaaagatttttacccaggtgctgacagctgcagaagaaattgtacatggtgctgtacagaaggtatttctccactgtgccatctgcagagtgaaactgactaggagtactacatagactgtactactgagcgagtgtgcttgatccagggaacggttgaagcactgaatgcagttcatggattcattgcagaaaaaattcgagaaatgccccaaaatgtggccaagacagaaccagtcagcattctacaaccccagaccaccgttaatccagatcgcatcaaacaagtaaagattatagttcccaacagcacagcaggtctgataatagggaagggaggtgctactgtgaaggctgtaatggagcagtcaggggcttgggtgcagctttcccagaaacctgatgggatcaacttgcaagagagggttgtcactgtgagtggagaacctgaacaaaaccgaaaagctgttgaacttatcatccagaagatacaagaggatccacaaagtggcagctg

SEQ ID NO: 159034 - DNA, 947 bp, Homo sapiens
  Payload ID: 11119
  Gene Symbol: NOVA1
  Gene Name: neuro-oncological ventral antigen 1
  ENST ID: ENST00000547619
  CDS Start-End: 60-695
gaaaaagccaaaacaaaagggagaaccttctcccggtagcagcggcaggaactgcaaacatgatggcggcagctcccatccagcagaacgggacccacactggggttcccatagacctggacccgccggactcgcggaaaaggccgctggaagccccccctgaagccggcagcaccaagaggaccaatacgggcgaagacggccagtattttctaaaggttctcatacctagttatgctgctggatctataattgggaagggaggacagacaattgttcagttgcaaaaagaaactggagccaccatcaagctgtctaagtccaaagatttttacccaggtactactgagcgagtgtgcttgatccagggaacggttgaagcactgaatgcagttcatggattcattgcagaaaaaattcgagaaatgccccaaaatgtggccaagacagaaccagtcagcattctacaaccccagaccaccgttaatccagatcgcatcaaacaaacattgccatcttccccaactaccaccaagtcctctccatctgatcccatgaccacctccagagctaatcaggtacagtatcatcctgtcatctacaccatacttttcacgggtgattgcctgcaaactggagaaaaagataatggtgggttaaggatttattcgttcattcacatatatgcaccatagtcagattccaaataacctaagaaagaaatatcaattatttctaaaattttatatgcatttttaattttagataacaaatactatattcagatattaaactactctaattttttattatttttccttaaaatttgactacctaatggagcactgaagcctatttattgaattggtatttttaatctcccttattgtatcttcctagaatttttcatatgtaagttaaggatatcatatatgtaaaaaaaaaaa

SEQ ID NO: 159035 - DNA, 6575 bp, Homo sapiens
  Payload ID: 11119
  Gene Symbol: NOVA1
  Gene Name: neuro-oncological ventral antigen 1
  ENST ID: ENST00000483536
  CDS Start-End: 84-449
aaaaaaaaaaaagaaaaaagaaaagaaaaagccaaaacaaaagggagaaccttctcccggtagcagcggcaggaactgcaaacatgatggcggcagctcccatccagcagaacgggacccacactggggttcccatagacctggacccgccggactcgcggaaaaggccgctggaagccccccctgaagccggcagcaccaagaggaccaatacgggcgaagacggccagtattttctaaaggttctcatacctagttatgctgctggatctataattgggaagggaggacagacaattgttcagttgcaaaaagaaactggagccaccatcaagctgtctaagtccaaagatttttacccaggtgctgacagctgcagaagaaattgtacatggtgctgtacagaaggtatttctccactgtgccatctgcagagtgaaactgactaggagtactacatagactgtactactgagcgagtgtgcttgatccagggaacggttgaagcactgaatgcagttcatggattcattgcagaaaaaattcgagaaatgccccaaaatgtggccaagacagaaccagtcagcattctacaaccccagaccaccgttaatccagatcgcatcaaacaaacattgccatcttccccaactaccaccaagtcctctccatctgatcccatgaccacctccagagctaatcaggtaaagattatagttcccaacagcacagcaggtctgataatagggaagggaggtgctactgtgaaggctgtaatggagcagtcaggggcttgggtgcagctttcccagaaacctgatgggatcaacttgcaagagagggttgtcactgtgagtggagaacctgaacaaaaccgaaaagctgttgaacttatcatccagaagatacaagaggatccacaaagtggcagctgtctcaatatcagttatgccaatgtgacaggtccagtggcaaattccaatccaaccggatctccttatgcaaacactgctgaagtgttaccaactgctgcagcagctgcagggctattaggacatgctaaccttgctggcgttgcagcctttccagcagttttatctggcttcacaggcaatgacctggtggccatcacctctgcacttaatacattagccagctatggatataatctcaacactttaggtttaggtctcagtcaagcagcagcaacaggggctttggctgcagcagctgccagtgccaacccagcagcagcagcagccaatttattggccacctatgccagtgaagcctcagccagtggcagcacagctggtggtacggcggggacatttgcattaggtagcctggctgctgctactgctgcaaccaatggatattttggagctgcttctcccctagctgccagtgccattctaggaacagaaaagtccacagatggatccaaggatgtagttgaaatagcagtgccagaaaacttagttggtgcaatacttggcaaaggagggaaaacattagtggaataccaggagttgactggtgcaaggatacagatctccaaaaaaggagaattcgtacctggcacaaggaatcggaaggtaaccattactggaacaccagctgcaacacaggctgctcaatatttaattacacaaaggatcacatatgagcaaggagttcgggctgccaatcctcagaaagtgggttgagtgccccagttacacatcagattgttttaacccctcctttaccccattttcaagaaggatgtactgtactttgcagaagtgaagtttttctgttattaatatataattatgcaaatgaatgcgactatgttgacaatgtgtatatgtaaataatatgtgttttaccagatgtttcatagaaagaattttttcttgatctgttttgttctctatactttgcttgtgtatatttgtcagaggtgtttctagtgtaagatttaagcctgccattttaccagcattattgtagtttaatgattgaatgtagacagggatatgcgtatagttttcagtattagttctagataacactaaattaactactgttaggttgagtatggtggggtcagtgacctaaaatggagtgaggccaaagcactgtcctgtaagtcttacttcctgcttagggcacagtgaagtaggaaacaatattttgaaaataagttttaaatttaaaatgatcaaaaagcaatatagttgcataaaagcactgtaaaatatttaaaaggttaaaactgtggaaaattatattggtaagtttacagatcaataaaagcacctgttctccatctgaactagacaatggaaataatgctgcatgctggccatggcccattcttcatcatttgtaagttcaacaaaagttctcacatggagtcccacctcttcagaggtttgtacatttgtttttaagcactgaattcactactgatcccatcgcctggccagtagaacagtcattactccattaacatcctcactgtttagacacataactgtggtacagtgtattggaaattttataaacaaaagtgaaagtgccaacaaattattgatagctgataatgtttcattatctgcaactgcttgataagtatgttgcattttaagagcttataattgtgtataatttgttaacactagaaacctattagtattgtgaatgtagattttactgtgaagctatctgtgatttagctgtttgctcccatgatggagtctttgcagcatggcgctagcagccaatgcagtttctaatactcggtaatttgcatgttttgtggagcatttttatgtcaccaaccagacagtatttcctgcatgcttatttagaagaggcagcttatcttgagaggtagtgttatctacctttgtcaggctttttgacaggtcatttcagagtaagcctttgttcccaagacccaacaactgtcaccctcttctgtacctctcctgagtgccaactgtccaggccatttgacacaccatctgttaacctctgagtttgcccactcaaggccactcataggggcatccatccccaagcacctcctcatgctgtgcatgcagtcttaaattcaatggacaaaaataaaatgctggctacctctggatcatctggctgagcaactgaattacaaaagagaattacttccatctcaacttcaacccattgattacgtccatcctagcaagctaaatggcatcccagctgctcctttctgtgcaaccaattaaagaacaatgagtgtgatgctccatgtctgaatttcgtccagcctctctctgaactgtgatctttgtcctcatgaactttcccttttgttcattgaactatatggactcttcatttcatattgatttactgtgcaatttacttttggacattgagaacttgaaattatttcctgatcccttccccttccactattaataattcatttctgtcaaactgtaagagtagactcatttttttttttttagtttttaacattggactgttatttcatttagagttctctatctctaaatatttatttagagaatgattttaaaagggaatgatatgcttgtttaaatgaaagagaaaagctgtagtaaactgtgttaattggtaatgactatttatcgtcgatactctgtagctgtgtaagttttgacaaatagtgtatctcgtggaatcagtggttagcattgccgctattatatttactcattttatcattataaatgtgcttagttcatcatgtagcatcacttgtctcccgtctcattttttccttgcatgtcacaagtctcagatcatttataatacattaacagtaaataatatctatgtaaatttctttcaccatgctgtctcagagtcagcagtgaacaaaggcaaagattggggccccacttagtttgaaaaagggaaaggaagtgatctaggatgtgtactagaagcatttcaaatgttgggtctttaaaatgttttgttcagtcttagcaaatcttcgatcttttatttcaaaattccagtagtccactgtggagcccatgcatttcatctggaatttaatgttactttgaagccaaaccatttaaacaattatgtgtgttttattagctagtgttgctgaaaatgcacttagttcaattttaattgtaaatgggaattttaaacttttcctagttagcatggttatatgttagttaaaactgaaagctaaattgaagatattacattttaatttatggtgacagataagggtttgtatgcattatgtgtaaatcagcttcatgctgtttaaaaatttattctctgaaatttatagaccatgtagaattgatttgtgatgtgatgctttaatttattgcaagaaaattagtatggcttcaaactgccacaggtaggcatgtaacaatggctgttcagctgtactgatccaaaatggagaaaactgatgatacaagggccaaacatcttatgaaatgcaactatttatagacttgttttgctatagggaggctggtgaacacgctgaatacgaattacctcagttctgcagctttctatgtctttttaatgcattctgtttcagggtcactttcaatcaatatttcatttacttactgagattgaatgggcgctctgagacacagtgtgctgtttatcatacagattggacacctcattctagatccaagatcttttcctcaacactgggagctgtcctttcagcaccacaaaattactgcttgaagttgcattgcagtttttttgttttttttttgtttgtttgtttgtttgtttttttgtttttttctttatcactgggagcttttctttcagcaccacaacattgcacctagactttttaaacggctgccttcctctttgcactgaagaccaatttcgtctgcacttccagttattgctattacctgtaggactttcaatcctacttcacttcacccaccccactcctgaaacagttaaatgtatctatttctgtggaagtcattttctcattgaatgattagaaacaaagataaattctaacctgtaacggctcatttcgactcattgcttacaatagatctaagctcttttttctgcttattcgactccttccagcttcccatcacatctgtaacaaacttttaaaatgatattgccacaccaccatgcacaagcctacctgcacagtagagatagattattccatcgcattcagatggttaacagaggttagcaagtcctgtattatatatttatatcgctttctaagaaagtgcatattaatgtttactttaagaatgtgtaaatggtgctatcaagaatctgataaattttatccccgttttttgtgtaccacttctaatgtatgagatttatttttttattggaaaaaaataaacagtatgaaagcattaaattggtagattttagtaatttaacaatgaatggaatccctacgttacaggccctatgtttccttggaaattttaatggtggtaatagatttcaacaaaggtactgataatcatattccttttaatccattcttatatttcagtcttgatttatatgctgattcctcactgagtccttaagtaaagtttatttacttaataattttatttactgtaagtcttctccaagaagggaattcttgctttcgaaggcagcaattgagagatgaaaatataatttaataccccttacatcacaggcactatttgagactagttactctgttagtaggagaaatattcatcactcattaaatacagggcaagcatggctatacacaataattttgagtgcaatacagtcataaatttaatgtacacacgttacttaactgaggcaaacagccatacaaaattgcacatgattagaaaacaggatgaactcattttgccttctgcttggtttctcataaacatgaatacataatattgttatgcactgttgttcatagatgtctttttacataaagggtaagtatcatattactttaacagattatatttggaaatctgcatgttattttttgtttcatcagatatgtgccccaaataaataacttttctttcaaaaaatgaaagtattagagaacttgtcatgttaattttgaaaaatattgaggtatagtactagacaggatgtcattccactggtctatataaacaaaaaaaactgttcttgaaaattgaagcattaccttgtataataaagtacatcaaatcagatttgtaaataaaatattgtttaattctaaagtattcaatattttgattagattatttttttaaggaaaaatatttaacgtgtatgtgccgaattttttttaaatagttttttataattgcaatggaaaggcaattgtctcattacaaagtggtacagaagccaatacttgggttaccatagatatataaacaagcaaaaactgtggaacacgttttaagctcattttggaaaattaaaacagttctgtagaaatgcatatttgtatttgtttctctaataaatctgcaaatagctttaaacac

SEQ ID NO: 159036 - DNA, 592 bp, Homo sapiens
  Payload ID: 11119
  Gene Symbol: NOVA1
  Gene Name: neuro-oncological ventral antigen 1
  ENST ID: ENST00000549146
  CDS Start-End: 304-592
ctcttgagggtggagaggggatacaaagtttgaaatactgtgttaaccgagtatatttctttgcatttttcagaagacggccagtattttctaaaggttctcatacctagttatgctgctggatctataattgggaagggaggacagacaattgttcagttgcaaaaagaaactggagccaccatcaagctgtctaagtccaaagatttttacccaggtactactgagcgagtgtgcttgatccagggaacggttgaagcactgaatgcagttcatggattcattgcagaaaaaattcgagaaatgccccaaaatgtggccaagacagaaccagtcagcattctacaaccccagaccaccgttaatccagatcgcatcaaacaaacattgccatcttccccaactaccaccaagtcctctccatctgatcccatgaccacctccagagctaatcaggtaaagattatagttcccaacagcacagcaggtctgataatagggaagggaggtgctactgtgaaggctgtaatggagcagtcaggggcttgggtgcagctttcccagaaacctgatgggatcaacttgcaagaga

SEQ ID NO: 159037 - DNA, 1005 bp, Homo sapiens
  Payload ID: 11119
  Gene Symbol: NOVA1
  Gene Name: neuro-oncological ventral antigen 1
  ENST ID: ENST00000549571
  CDS Start-End: 486-1005
attcatcaaaatggcgaccagtttttcggaatagacctatctttccatttaatcggtccagaggttgaccatgtaaatatcctagacctgggcaagaaggtccattcaggaggaggaggaggatgaccccggagtgaggtgatggccgcccgaagatgcgcgctgcgtttaacagtctgataaaataaataaataaatggcacttgggtagcggattgcgaatgactggggcgccggagagtttttcctctctccatcctcttgctttgggccacaagtagtatgcaaaatcttgatgagtgcatgcccttaccgcacttagattgtcggtgcaaatatttcattgatttgtcttcaggggggtgcatacgagggtgggggtgtctggaacggtgacttgttagttaacatcctgcgcttccttggaagatgagttttaacgggaccgatatcgcttcttcatttgcactggaatcatcttaacaatgcacccaatgcatcgaagcagagaagacggccagtattttctaaaggttctcatacctagttatgctgctggatctataattgggaagggaggacagacaattgttcagttgcaaaaagaaactggagccaccatcaagctgtctaagtccaaagatttttacccaggtactactgagcgagtgtgcttgatccagggaacggttgaagcactgaatgcagttcatggattcattgcagaaaaaattcgagaaatgccccaaaatgtggccaagacagaaccagtcagcattctacaaccccagaccaccgttaatccagatcgcatcaaacaaacattgccatcttccccaactaccaccaagtcctctccatctgatcccatgaccacctccagagctaatcaggtaaagattatagttcccaacagcacagcaggtctgataatagggaagggaggtgctactgtgaaggctgtaatggagcagtcaggggcttgggtgcagctttcccagaaac

SEQ ID NO: 159038 - DNA, 1431 bp, Homo sapiens
  Payload ID: 11119
  Gene Symbol: NOVA1
  Gene Name: neuro-oncological ventral antigen 1
  ENST ID: ENST00000574031
  CDS Start-End: 25-483
gtagcagcggcaggaactgcaaacatgatggcggcagctcccatccagcagaacgggacccacactggggttcccatagacctggacccgccggactcgcggaaaaggccgctggaagccccccctgaagccggcagcaccaagaggaccaatacgggcgaagacggccagtattttctaaaggttctcatacctagttatgctgctggatctataattgggaagggaggacagacaattgttcagttgcaaaaagaaactggagccaccatcaagctgtctaagtccaaagatttttacccaggtactactgagcgagtgtgcttgatccagggaacggttgaagcactgaatgcagttcatggattcattgcagaaaaaattcgagaaatgccccaaaatgtggccaagacagaaccagtcagcattctacaaccccagaccaccgttaatccagatcgcatcaaacaagtgagtgtttagttgagaaatcaaagagaaatatccacagcatagtataagttccttacaaaagaagccttaaagtgttagcataaaacttttattttaagcacacataaaacataccagagttgtcatttagttatttaaagactatcaaggtctcatccttagattgatcagttaatttattgatcaattgaattattcatttattagtgttacattgaggagcacttatgtgactcttagtgattgccctttttaaatttatagacacaaatttaatttataggaattgaatctgtttaaaattatatcactttttaaataaagtataagtatttcaatgatacattcaaaatttccaataccctatttttagtgatatttgtagttttcaggatagttattatgcatagaggctcctgttttgttaattttgttgtcatgttctcattttttatcaaaaaaatgtatagtaaatttatgtacctaccatacagtcctttgttacaaatcagttactgtgttttgtgtaacttatgtagtatttaaacatatgtcataaagggccaatgttcatttttaatgtacgagattttttgtaaaaaattttacttgggaaaaactgatgtgagtttttaagattgaataatgggtgacatgatgtagggggaaaatgacattatttcatgttaaataaggtggattcttccaccgtaaactcttttacgtctataaatttattatgttcataattattgtttctgcctttgcctttttataattagcgtcttaatttgtgacgtaattttactatcacagactatggcttcaaaagaaatgtattattcttcagtaattcacagaatatttaatttacagaatactcatgttcattgtaataaatttgaaatgtagctcaaagtcttattaatttcatgtttctgaatttaaaaagtatta

SEQ ID NO: 159039 - DNA, 7803 bp, Homo sapiens
  Payload ID: 11120
  Gene Symbol: NOVA2
  Gene Name: neuro-oncological ventral antigen 2
  Uniprot ID: Q9UNW9
  ENST ID: ENST00000263257
  CDS Start-End: 196-1674
accatgaggatgatggccgccggcgcggtgcacggcctcttcacggcctccgcggccccgcagccgccgccgcccccgccgccgccgccgccgcaaccccagcctccccagcagccgtcgccgccgccacagcagccgccgccgccgccgccgcagccgccgcagcagcagcagccgccgccccaggccccccccatggagcccgaggccccggattcccgcaagaggcccctcgaaacgccccccgaggtggtctgcaccaagcgcagcaacacgggagaggaaggcgaatacttcctgaaggtgctgatccccagctacgcggcgggctccatcattggcaagggcgggcagaccatcgtgcagctgcagaaggagaccggagccaccatcaagctctccaagtccaaagacttctaccccggaaccacagagcgggtatgcctagtacagggcacggcagaggccttgaatgctgtgcacagctttattgccgagaaggtccgagaaatcccacaagcgatgaccaagcctgaggtggtcaacatccttcaaccccaaaccacgatgaaccccgacagagccaagcaggccaagctgatcgtccccaacagcacggcgggcctgatcatcggcaagggaggcgccacggtgaaagccgtgatggaacagtcaggagcatgggtgcagctgtcccagaagccggagggcatcaacctgcaggagcgcgtggtgacggtcagcggcgagcccgagcaggtgcacaaggccgtgagcgccatcgtgcagaaggtacaagaagacccccagagcagcagctgcctcaacatcagctacgccaacgtggcaggccccgtggccaactccaaccccaccggctctccgtacgccagccccgcggatgtgctgccagccgcggccgcagcgtcggccgccgccgcctccggcctgctgggccccgccgggctggctggcgtgggggcctttcccgccgcgctgcccgccttctcaggcaccgacctgctggccatcagcacggcgcttaacacgctggcaagttacggctacaacaccaactccctgggcctgggcctcaactcggccgcagcttccggcgtcctggccgccgtggccgccggggccaacccagcagccgccgccgccgccaacctcctggcatcctacgcgggcgaggccggggccgggccagccggaggggccgccccgccgccgcccccgcctcccggagccctggggtcctttgcgttggccgcagccgccaacggctacctcggggccggggcgggcggcggggcgggcggagggggcggcccgctggtggccgctgcagccgcggccggggcggccgggggcttcctgacggcggagaagctggcggctgagagtgccaaggagctggtggagattgcggtgcctgagaacctggtgggagccatcctggggaaggggggcaagacgttggtggagtaccaggagctgacgggcgctcgcatccagatctccaagaagggcgagttcctgccaggcacgcggaaccggcgggtcaccatcacgggcagccccgcggccacgcaagccgctcaatacctcatcagtcagcgggtcacctacgagcagggagtgagggcctcaaacccccagaaagtgggatgaggcctgtggtgtgtgctcccacccttttctctcctcccatctcctcctcttccctctcctcctcccccccaactcctgacctcagcttggtgtagtcctgctcctcttgggatggggctggggtaggcccgactgcaccctccccttctggtagtcataggcaggattgagtgacggttgggaagggggctcagaagccccctccccagcccggaactgacccctccttcctccctccctgtgcttggctgggcctgacccttcctgtcccagggcccaggtctgtgtgatatctgtatatattgcattttgttgattttaatagaaaacaaagcgttattttctctttctttccctcctttttttttttttttttttttttggtaaggattttttccccctttataagtttttgtttccatatgggaggaggggagggagcctctgggtcacccagaatgaggggccttcccaaaacacaacaccccacctctctgctttcagttctagatctgagggaagccatgggagtagaggtagcagaggcgtctgagctgaaatggggcatttggagcaaggaccccagagttcccagatcttctcagctactctcctcccactggagctgtccctcctaggtgggaatgttcactcttttgttgtcaggttgtatgggggggcagggacagtgctgctgggaaggatgccagctctgggattgggccagtcctgtgggcaagacttgcaagaggctggatcaacttggtgtggtatctctgatggcttagagtaatggcaatgagggtctctgttgtgatgtcactgagtactttctggggtgcttctgggcaccccttatgatgtcacaggaagcagttcctcagaggttacttcctgtgaacataagggagcaggtacttcctgtgatgtctcaatgagttcttccttgaaggtcactttggtgatatcatgggaaggtgtacttccggtgatgcctagaggtcacgtcctgtgatgtcattaggctgaagcatgtacttcctgtattggacagtgaccagtctctgacctgccttctccctccacacccttctttggtgggtgttggcctgggggtcttcctaggaagagaataaggcacgggacttggatccaatctggaggactctaacggaaaaaaaccaatattgtcagggtcatctccattcaaacacgtcaagtctgcgaactcgccctggagggaggggtgggagatggacctagtgcaaactactgttaaagacctcccttcccacccctgccttttgtgtgcatgcctgtgtctgcgtggctttgtttcattgaatcgggtgagccaagtgtgtggtggctctgtcaggccagtatggccaggtgtagagttcagtgagccatagtagggtcccttgggccagaatgcttcgtgtggtctgataggttagattggtttggtggcttccagcaagctggcatacttcggtgatgtctgatggatcagaatgttttggtgtgctcaccaggggctctggagaactagaatgttctgatggagtctgacaagccaggcggccttgagagttggtttaggagtggctccctgagtgctgtggctgtggtcagctctaaggacctgttggcagactgagatttcagggcctgacaaccatgtagactaggatagctgagacctccctctacccccacccatctccctctcttccttggagaccacctccactttctccaacccaaagcagggcgcccagtgccctggttccatcatcagcatctctgggggaggggcgccccatgcccaccctctcccccatttgtccgcctcctaggtcttccaaacccttttcttctctatgactttgggggaaatccagcctccttgtctctctcctaaaaaaggagggaagaaaagccacagagacaattcctgcccctaaagcctaggagatccctctcccttgctagagagccacccccaaatcaaaatgtgaaaatccctagaaagcaatagccttcgaggtaccttgcactgaatttcccaccccagcccttccacccgatgggaggctgtaacttgggcactggggtgactttttccatgcccttgtcatctccagggtgggaggcaggccccacttcccctcccctatcccccacttcccattgttgttgccccacccctaatctccagactgaacccagatggagatctgagtgccaaaacaattcttgatgtaactttgtacatatcttctactaccgttgggggctcttggggttagaggtgggggcggctctgtgggccattgctcccctccacctctcaaaagaccttacagtatttcacagtatctctacccgcacgcgagtattacagtatctagctggaatatccccctacagccccccaggaccctatgaggaagggaaggagccagggagagtgaagtaaggtctgggactggggaggtgggatctgaatgaactcatttgcatatcatttgcatcctccgcttggcagccgctttctacaaactcattcactggagtctgggtcccaatcagccgggtccaggactcctctcacacagacacatctccggaggctgggcctcctgaaaagtgtttgcttggggtgtctgtgtaacaacccctccctattcatatttcttggggaccccctacccagccagccagggtgatctgaaaggtatactttgctagctcagtgagctagttcactcaccatgttggtgagcagagagccacacctttccccattttaccttgggaaactcactccaccatctttgccatctcttgaaagtcccttctgcaatctgacctcaatcttttgtgctgcagtttgtccagaggggacacagatgtggggtcagggatgaggattattgaaaaacccatcatctctttttttttccccgtctccctattagccaatccgatctcagagtctctgagtggcctccttgcacccttctcttcagcacccagtaggtgcttaataagtgtttgctgcattggattatctccctattccttctcatttgccctctagcttcccataccttctccaagtgtcttcctccctttctttgtctggctccctatgactttctatttttttttcctccgtgtggttcccattgttttctgtcctgtctctatcttagtctttgtctgtcttcctcctttcctcaaatgtctcaactctctctccccaatttccccatttaaaaaaaaaaaaaagtgccaaacttccttggaactgagccgctctggggggagaggaccttggatagaggggaggaaatgggaccatttctctttgaggaggtccctaagaggcattgcaaaagtgtggacatggagctaaattgggtcccccttccacagccctcccaccctgagtttttcttagaatctttgtaagaaaaaaaaaaaaagacagaaaaaagctctccttttcaacttacccctatccttttgggtccccccaaattccaccagccaaggagaatcccacttgccaacttcctggcaaatctatggaaactggggaggaggagacaagctcaactcctcctctgctagcccaaggggcggtaccaactggattcaagagaaggacctcaaagctcctatgagaagagggggttcgatgtgccaaattaacctccttcatcccccatctcagggggctctgagccaacctgcccagccaccttcttctgccctgtcccagccacctctacatgggcaaggaggcttcactgcaataattagtaggggtggtgatcagaagacaatgattttgccgtttctatctgccctaacgcctaccctggacttgtagttgggaattatgggtatcccaagtggatgttgataaaagccgacctatagatggttggggacctctacttggaacaccagggtgtcgcttatctccgaggtgtatttcctctcccctctggaccaccaaatccttcaatatcccctcattctgtttctcctccctgttcctccatcccacatcctccttcttactttgttttgattggtggccaattgtttggaaaatgagaggagtccccctgaatggatgattgctgtttcaggaccgggattagaggctgtgatagactgtgcagtggcaaaagtattaacaagagtggcgatgaggatggcagttggggcgtccaggctgctgactgagtgcccgcctgtcggtacagccagccaggccttcgacaagcacctgcctggaaaccgggctcgctgtcctgaaagcctggactggatgtcacgatggggagaacgggatcgcgatacccaagctggggcacaggcgagccagggacactggtttactggggtgataacacccagccctgctatcgcgatccgtttgcactgtggtcagctgtctccacgccgtggttggagagggcttgtctccgggcgccactgctggtgtgtatggtctgtcttagtgtcccctgcaagttgcattggagattgctgggtggcagggagggaaatgggaagagaatctgtggggtcatggtggtgaaggctgctggtttttaatcccttctcaaccagtccaggacacttgtctcccagagataactggggggggactgcctaaccccccctcccccacccctttccctaccccacctctccccccaaaaccaccaacctctcatcttctaagtgactccatcaccaccggccaccgggacctgcggcctcattgctccagcccgccccactcgaccgtcagactcgctcatcgaactctttttgattaaccctttctgtgttcatcccacggaaaactgtgtgtccggcaggggggaggggggaggctaggggcagttgctacctttcctccatctcctcccaccacccatgcctccccacccgcaccccatcccatgccccacccccatccctcacccctagggtctgccccaccctggggattgacatcctctataaatatctatgctatttggctttgtccctttaaaaggcgggtccaggggcgtggcctccctcaaatggagcgctcactctgaccccctccttcgtgtgccccccacacactccccacgccttcattgtaaatagtcacttttgtactgggtttgagccaggggacgtggggagtcatttttcttttctttatgttggcatctcaggccactggaggcatggcccacatcccgggtcgatttgggagaattttaaggtatgtcccctcacctgtccccatcgctaaggatttcaagctatcagtattactctagagggatggggtgcatagattccccggcagggtggtgggagaggtgtggaaaggtgtagtctgggaggatgcctccgttttccccttctgtgaaatggattcatcctccaatttccctgaggagcctcagtgagataatggtggagtcagaggagctagaacctctcttccccctttctctgttggagacagggtagcagaagaatgggggacaggggaggctgcagggccatctttggagaaccgattgctaaatccttcttaggaccttaaggtagcctcctctccaggcttgttctccctcttggaatatggggaggactggaggacctctaaggtcccttggttctccccagtccttagattaaaaggcccaggccccaggctggccccctgcctgctgtcccactccttcattccatttcttggaatgtggccatgcctccagtgcctccattcaaccccctctaactgattccttccatcctctgcgaccagagacgccgcccgcctcctgcccaccacctccagaagctcctggctggggtgcactgccgtctcctcccactccccacattgccatgcctgggccacgcccaccccacccactcacccacccccagtgtccgttgtgtgacctagtgcaccatgtattagcttccatggcccccaccccagcccccaccacaccccctttccccacccctttcccctcggcgacttcacctttttttgccgcgataaacgccatctcagca

SEQ ID NO: 159040 - DNA, 698 bp, Homo sapiens
  Payload ID: 11120
  Gene Symbol: NOVA2
  Gene Name: neuro-oncological ventral antigen 2
  ENST ID: ENST00000596784
  CDS Start-End: 578-698
caaagaatggccaaaactccacaagctgccgctggcactgcatctaggtcttcgaggctgtccttcatcgtgttggtccccccaggagtggagggtgttaagcaatgatgggaggagactgaatcagaattggatttgaatctgagcccagtagctgtgttcgtgtccttgggctggtgatgaccgtgggctggtaccttcacttctctgtgcccctctgtgcctcagtttcctcttgtgtaaaaatggagctcattccacccgcctcaccgggaggttgtgaggaacggacgagatcaagctcacaaagcactcagcacagcgcctgatcaaaaaggaaggcgaatacttcctgaaggtgctgatccccagctacgcggcgggctccatcattggcaagggcgggcagaccatcgtgcagctgcagaaggagaccggagccaccatcaagctctccaagtccaaagacttctaccccggaaccacagagcgggtatgcctagtacagggcacggcagaggccttgaatgctgtgcacagctttattgccgagaaggtccgagaaatcccacaagcgatgaccaagcctgaggtggtcaacatccttcaaccccaaaccacgatgaaccccgacagagccaagcaggccaagctgatcgtccccaacagcacggcgggcctgatcatcggcaagggag

SEQ ID NO: 159041 - DNA, 704 bp, Homo sapiens
  Payload ID: 11121
  Gene Symbol: NPB
  Gene Name: neuropeptide B
  Uniprot ID: Q8NG41
  ENST ID: ENST00000333383
  CDS Start-End: 170-547
atgcggaggtgcgacggctcctccgcgcgcgcccgctgcaccccagcccgcccgccgcccctcccggccctccgcagcctcggcccgccctcgccgcagatataaggcggcccaggcggtggctgctccgagcccggacgccgccgcccaccagtcagccggcgtccccatggcccggtccgcgacactggcggccgccgccctggcgctgtgcctgctgctggcgccgcctggcctcgcgtggtacaagccagcggcggggcacagctcctactcggtgggccgcgccgcggggctgctgtccggcctccgcaggtccccgtacgcgcggcgctcccagccctacagaggggcggaacccccgggcggggccggcgcctccccggagctgcaactgcaccccaggctgcggagcctcgctgtgtgcgtccaggacgtcgccccaaacctgcagaggtgcgagcggctccccgacggccgcgggacctaccagtgcaaggcgaacgtcttcctgtccctgcgcgcagccgactgcctcgccgcctgagcccggacctctcctggcaccgctgggggccccccgcccccaccgtcccactcggtgaccccaggcccctccggcgcgggatggcgccccaggtctcccctactccgctcaccccgcagttaatggcaaacgaataaataaatgaggcggcctcgga

SEQ ID NO: 159042 - DNA, 2154 bp, Homo sapiens
  Payload ID: 11121
  Gene Symbol: NPB
  Gene Name: neuropeptide B
  ENST ID: ENST00000573081
  CDS Start-End: 1534-2004
aggggccgctgggggagtggcagccccggcatctcaggctgcttctggacagagcacaggctgtgtctccagtaacctagggagcccttggcattcatggggccagtgacccgtgcccagtgtctcttgacccttcctcacagcaacctgaggagtagaccaggcctcacctgaaatctgtgtcagggttctctagagagacaggactctatatgaagagtatatatgaagagtttattgggagtattgactcacgtgatcacaaggtgaagtcccacaataagccatgtgcaaggtgaggagcaaggaagccagtctgagtcccaaaacaaaagtagagaagccgatagtgcagccttcatcctgtggccaaaggctgcagagcccctggcaagccactggtgtaggtccgagagtccaaaagctgaagaacctggaggccgacgtgcgagggcgggaagcatccagcatgggagaaagatggaggccagattcagccagtctagtctttccacgttcctctgcctgcttgtatcctggctgtgctggcagccgattaggtggtgcccacctggattgagggtgggtctgcctctcccagcccactgactcaaatgggaatctcctctggcaacaccctcacagacacacccagtgacaatactttgcatccttcaatccagtcaagctgacactcagcattcaccatcacacctgggaagcatggaacccagaaacaagtgccagggctccagtgccagtgcctgtcctgggaagatacccaagagaagacatgaccaggaccttgggggagcatgaaatggtgagggcacagtgagcttgaaggctgatgtcacctgccaggagagcggctggcagtcctgcctggtgccccccaaggggcagagctggcagagaggggcctccaatcgaaggccaggagtcgtggagctccagtgccttggtgtggctggccttcttgcccccctcccagaggaccccgccagtaacagccctgctggtggaaccttccccagtgggcatgaaagaaatgagggccccacaagccacatggactctgatgcctggagccaagaataccccttagggtggtagaaaccgcccccggggcactgtgcagtgtggctggctctccagcatcaggagtactggggattgcctgggggacgactcctagggctgggcgcccgtgggccctcccctgctgccactgcggcccacgcaagccgggcctgaagggcgcgagcggcatgggtggggagcttgagggggcgttgggctcccaccaagcgccagatccttgcgcgcctccagcgctcgcccgcgcggctggttcctttgggatgcggaggtgcgacggctcctccgcgcgcgcccgctgcaccccagcccgcccgccgcccctcccggccctccgcagcctcggcccgccctcgccgcagatataaggcggcccaggcggtggctgctccgagcccggacgccgccgcccaccagtcagccggcgtccccatggcccggtccgcgacactggcggccgccgccctggcgctgtgcctgctgctggcgccgcctggcctcgcgtggtacaagccagcggcggggcacagctcctactcggtgggccgcgccgcggggctgctgtccggcctccgcaggtccccgtacgcgcggcgctcccagccctacagaggggcggaacccccgggcggggccggcgcctccccggagctgcaactgcaccccaggctgcggagcctcgtgagtccggcgtgccggggactgatggggggcggcggcaggacgtgggtgggggtgcggcggcccctcagcctttgcttgcctgccccccaggctgtgtgcgtccaggacgtcgccccaaacctgcagaggtgcgagcggctccccgacggccgcgggacctaccagtgcaaggcgaacgtcttcctgtccctgcgcgcagccgactgcctcgccgcctgagcccggacctctcctggcaccgctgggggccccccgcccccaccgtcccactcggtgaccccaggcccctccggcgcgggatggcgccccaggtctcccctactccgctcaccccgcagttaatggcaaacgaataaataaatgaggcgg

SEQ ID NO: 159043 - DNA, 8921 bp, Homo sapiens
  Payload ID: 11122
  Gene Symbol: NPFFR1
  Gene Name: neuropeptide FF receptor 1
  Uniprot ID: Q9GZQ6
  ENST ID: ENST00000277942
  CDS Start-End: 1-1293
atggagggggagccctcccagcctcccaacagcagttggcccctaagtcagaatgggactaacactgaggccaccccggctacaaacctcaccttctcctcctactatcagcacacctcccctgtggcggccatgttcattgtggcctatgcgctcatcttcctgctctgcatggtgggcaacaccctggtctgtttcatcgtgctcaagaaccggcacatgcatactgtcaccaacatgttcatcctcaacctggctgtcagtgacctgctggtgggcatcttctgcatgcccaccacccttgtggacaacctcatcactgggtggcccttcgacaatgccacatgcaagatgagcggcttggtgcagggcatgtctgtgtcggcttccgttttcacactggtggccattgctgtggaaaggttccgctgcatcgtgcaccctttccgcgagaagctgaccctgcggaaggcgctcgtcaccatcgccgtcatctgggccctggcgctgctcatcatgtgtccctcggccgtcacgctgaccgtcacccgtgaggagcaccacttcatggtggacgcccgcaaccgctcctacccgctctactcctgctgggaggcctggcccgagaagggcatgcgcagggtctacaccactgtgctcttctcgcacatctacctggcgccgctggcgctcatcgtggtcatgtacgcccgcatcgcgcgcaagctctgccaggccccgggcccggcccccgggggcgaggaggctgcggacccgcgagcatcgcggcgcagagcgcgcgtggtgcacatgctggtcatggtggcgctgttcttcacgctgtcctggctgccgctctgggcgctgctgctgctcatcgactacgggcagctcagcgcgccgcagctgcacctggtcaccgtctacgccttccccttcgcgcactggctggccttcttcaacagcagcgccaaccccatcatctacggctacttcaacgagaacttccgccgcggcttccaggccgccttccgcgcccgcctctgcccgcgcccgtcggggagccacaaggaggcctactccgagcggcccggcgggcttctgcacaggcgggtcttcgtggtggtgcggcccagcgactccgggctgccctctgagtcgggccctagcagtggggcccccaggcccggccgcctcccgctgcggaatgggcgggtggctcaccacggcttgcccagggaagggcctggctgctcccacctgcccctcaccattccagcctgggatatctgagggggtccagggagggcgggacgctgcctcagggccccgattggacacgagatacatgcaggcgatagcggcctggtgtggttaggtgaggatgcgtggtccctccctctccagagccaggcagtggtgggcagctgctggtgatgtcttctctgctgccttcaccctcagtagaggcaaatgcgggggacgggaaggaaccaacttgccctgtgtggtgggcttgacaaacatcatctcactgaattgtcacaacgctttggagataggttgtcttctcttccttctacagatgcaaaaactgaggcctggagagatgtgactcacccaagtttctcaggtggaaatggcatgtgaagctatctgactccaatacctgtgtggtttttatcatctccagctggctccaagagggcccggtaaggtagaacactgtgaactgagtaagtcctaattaggcagctaggaagaagcgaaaagcaaagccggcctgtcccttgatgctttgtgtccatgtgagggagtccctcatgttccgttactgaagccactccccttgatccttttctagaagaacacggtgtgcccccgctgccggctctaatgtgttggtttgtcttgtttgttccaagaagttccaagaagccattgtcctcagaggacggcagcttcagaacgagccttggggaggctgcctcagttgcagggcactctaggtcttgccctctgggtctgagcttagagaacagaggagggactcccagaccaaggcaagaacttacaatgccacagacattgtaatgctgcagggccacaggaggtgtccttttacgtactcatagacaacgaggaaggggaagcacggtatgcattttccacattgggaaacacatctgctcactggggctgcaggtacaaagccttgcccaaggtctctctcctccctgcttcctgggagggagaagttggtcaactgaagctgcagccggagtgccatttggagactcctgaaggacacacactaaactcttccccagcacaaatgacttgtgtactctaaggaggtaccaggagagccctgtttactctggctttcccccaacacccctgcatcaacttgaagaaatgtggcttctttccaggagacgggagcacatgggattgccttggagggtcctttcacaggccccttcatcttgcacttaaatggacatttccccccacctctgtagaaaacacggtgttgctagaaatttagtaaacaaaaaagaaacgtttccaggggtcggggctctgaggctctgttcccttaaccgacacacagtgactgtttactgtttgctccactctaagttccaggtttaggggcagaagaaaattcctaagcagttgtacaatacattctccaagcatgtccccagacaccgtctcatttaatccatagtaatgaggttgaaggagattgaatgttattgtcatttcacaaagtgactgaagctcaaaggggccaagtttccagggccacagaggggcaggatttagattaaaatttgtcttctgattgttcttcccaccccacatgctgcctttcaaggaaggtggggatgacgggagagctggtaatttccccaaaggcttttttgcctaacagtgaaccagaatgcccactcctggtgcccaagctcttggtctgggaaagaaatctattgtgtttactctcgtaatgtccagcctgagttgttcttgccctggtgctgagcaggctgccaagagccatcatgaccttgtcctggttctgggggtgatggatgagggtctgagagagagtatgccctcctgcccctcagtggtattagctggtgccatgcatttctggtactgtatcagtgtcatgtgtcatatgggccagagagttcccagctggttctgggctatttgttgtgaagaagtctgactccaggctctaaaagtaagccagagaaagggccgtctcaaacccaaaatgcctatccctatggctgggtgggaattgtctgaagacaccacctggtgtctcctctggggtgtgtttctcctttagcatagcctccccaagtacaagatcagcatttgaggctgggggcgggtagggataccaaagtactcactcaagccaacctttccatcacagcccctttgtcttcccccaaaagatgtcatgctttgaaaggttataactgcccaaaaaactccttcagctctcgctgaaggttacaattaacatattttgctgttatttttgtttcttctaaaaaatcaatcagaggctatacctgcccattcagatctgagtgataacaggcatgacaatgctttaatgaagcagtgagacattgtgggtatgtggggagttcgtttctttgtggatgtggtaaaatataaataatatagaatttaccattttggccatttttaagtgtacaggactggaattaaatatattcacattgttgtgtaaccattaccactatctattttcagaattttttattatcccaaactgcaactctgtatctataaacaatatcaccgcatcccctctcctcctagcccctggtaactactattctactttctgtctgtgaatttggccactctaggtacttctatacaagaggaatcatacaatactatcctttttgactggcttctttcacttagcacaatgtcttcaaggttcatccatgttgtggcatgtgtcagaatttctttcattttaaaagctgaataatatcccattgtctagatagtcctcattttgttcattcatccatcagtggacacttaggttgtttctatcttttggctactgtgaataatgtatggagtttttagatgctagaagtagttcctgacaatagtgcctgtgtgaatcctgaggacagagaccccaggttgggaaccagggtctctcccaacttaccctttatggctgacaaaacagaggcttccaggacagctgtgatgtgtctcacttccctgtgcccaccccagctgctctgggcttctgctgggctttacttcctgactagagtggctagaaaattgtatgtttcctctacaagatgtttttatgaagctattttataattatagatttattatcctcactggattcctatgttctgacacctggaccctgacggggccttgtgcagcctaggcgcccacgggcaagtggtgtggaccattcctgacacgccatcctccacctccaggttggctgggtttcctaaggtgactgccctttcataagcggcaagttcggagatgaacggcatgcgtgatgggggaaaagggccagaggcctgttgacactgagcatccccacccagagggcctcctggagggactctgtgtcctgtcctgccatgtgcggcatgagtggtcaccctcattgtggctctccactgatgaatggcctcttgactttaccaagaccaggcagcacccaacagaccaatgtgagctggaggcggatgccgggcctgcaccccacaaaccacagtctgcccagccctgtgctgaggagtctctcttggggcctggaggactcatgagctgatctgcattggaatggagggcgaagttggcaaaggaagatgagagcccccctatcattagtctactgtgtattcatccaaaaagcaaggcgagagccaagcccagagctggatggacaaaggattgctattaagctctgtacctttttgcacccgtttcctcagctcacccctcagaagtgtcactgatgaaagatagatgagaaggaggcggtctaaatgggcttcattacaatgaacaatgttgaatgaacaatacattccttgttgaataacccaattatttatgatcatggcattttattgttgtttttctctctctctacaaaagctctacataatcattgtggaaattttacaagatttcaataagcaaagacaagaaaatgaaaagcacccaaaatcctaccgcaagagacaagtatagcgtccttttctgtgcatatatctctcaatatatttaacattcttggaacagctttattgaggcagaacttgaatatgaaaaaattcacccgtcttaagtgtactgcttgacgagttttaacagttgtatatagttatgtccctaccacactgaagatattttcatcatcctaaaatgtttccttgtgctaatttatagtcagtcctttcccacgctcctgattccagaaaacgatgatctgatttcagaatgtcatgtagatggaatcagacagtttgcagccgagtctggtttctttcacttaaaatgatgtttgcaagattcattcatgctgtagcatgtatcagtagtttttccttttgattgctgagtactattccactgtatgaatagatcacattttgtttatccattcatcagttgatagacatttggttgtcaccagtttttggctattattaataatgttgccattaacattcatgtacaagtccttatatgtatgtgtatgtatgttttccatttttcttgggtagatacctaggatcgagattggtaggttgcatggtctgtgtaaaatttaactgtataagaaactgccaaagtgctttccaaagtcgctctaccattttgtactcccatcagcagtgtatgaatgttccagttgttctacatcctggccaacacttagcagtattagccttttgaaaatttccaggccaggtgtggtggctcacgtctgtaatcccagcactttgggaggctgaggtgcgtagatcacctgaggtcaggagttcaagaccagcctggccaatatggggaaaccccatctctactaaaaacacaaaaattagccaggcatggtggcacacacctgtagtcccagctacttgggaggctgagacacgagaatcacttgaacctaggaggcagaggatgcagtgagccaaaattgcgccactgcactccaacctgggtgacagagcaagactgtctcaaaaaaaaaaaaaaaaagaaagaaagaaagaagaaaagaaaatttccctgatgactagtgatgctgggcatctttttgtgtgcttactgcattcttatatcttttattgtaaagtatcttcaaatctttcttttaaaaacatgattttggctgggtgcggtggctcacacctgtaatcccagcactttgggaggccaaggtgggcagatcacctgaggtcaggagttcgagaccagcctggtcaacgtgatgaaaccccatctctaccaaaaacacaaaaattagccaggtgtggtgatgtgcgcctgtaatcccagctacttgggagactgaggcaggagaatcacttgaacctgggaggcagaggtttcagtgagccaagatggcgccactgcactccagcctaggtgacagagtgagattccatctcaaataataataataataataatattttattgtagagactttagcacaaaaacttgccctaactctaagggatttttttgtgaatataatttttttttttttgagacagagtcttgcttttgttgcccaggctggagtgcaatgacgtgattttggctcactgcaacctttgcctcctaggttcaagcgattctcctgcctcagcctcctgagtagctgggattacaggcatctgccaccacacccagctaatttttgtatttttaatagagatgggattttaccatgttggccaggctggtcttgaactcctgacctcagatgatctgcccgcctcggcctcccaaagtgctgggattacaggcgcgagccaccatgctccaccaatgatttttaaatccattaagaatgggtctaaagcaaggtaagaggatatagtgtgatagaagtaggagggctatttgaacagatggttaggaatggcctctgtgaagaggtgatgtttgagtacagatatgaagtgagagagggagccatgtgactagctggggaagaaacaaacccagacagagagagcatcatgtacacaggttctaagggaggagtgggataactgaaaaaggaattagtagatatcaaaatgctattgaatttcaataattaaatttctggttaactcaaaacatgtattcagtgtctattaaaagccaggcataggccaggcatgggggctcatgcctgtaatcccagcactttgggaggccgaggtgggtcgatcacttgaggtcaggagttcgagaccagcctggctaacatggtgaaaccccatctctattaaaaatacaaaaattagccaagcatgatggcaggcacctgtaatcccagctacttgggaggctgagggaggggaattgcttgaacctgggaggcggagtttgcagtaagccaagatagcgccactgtactctatcctgggcaacagagtgagactccatctcaaaaaaaaaaaaaaaaaacaaaaaacaaaaaaaaaacgccaggcatagtactacgtactttgtgtctgttatttatttctcacagtggaccataagctccatgaggacaggaactatgtctatttcacttacctttgtggattcaggtaggatattgcctggtgcataggaggcactcaataaatgtctgttgaatgaatgaagtaattaactaagcaggtatttattattattcccatacaatagattggaaaagcaaggctcagagaagtaaagtaacttactggaggttatataaccaggaggtcctgaaggtgagactcaaaccttagtctatctgaccacaaagtccaggtttttgccattccccaagctgctgtggtctctccttcctacatctgggaaactgaggttcagagtaaaagaaagagccttgatggaggtctcccataatcctaaaaataaaaccagccagccacaggctccaggctgctgttttggccatgagacacatttgcatcactttcaatggcttccaaagatttgggatagaaggaataccagcagtttaggtaaaaggtttaaatttagtttgactcaataccacatcaagccctcaaagcagccacgggctcccctgcactgtggtcactgaaggagcaaaagctgctgaactggctgtagcgtcctgccttgagttgtttgtgttctcctgctagctgcaatgcccaggtctttgaatcctgtcaccaataaatgatgctgttgtcatgtgcaagcaaccaaattaatgtgggtggaaaaacccaagcttagtgatttgggcaaattagtttatctgtcacatagccagtggtggtgttaaatcactctctgtttgaggagtaatcactctccccccatcaccaccctgtcttcctttcggtgtggaagttagaacagccaagtcaatccgtttcagtgactgagcgatctacatttctgtgttttgactgccccccaggaggagtatgttgtgtagtgcattttgtttgtccatagtgctgtctcgtggtcctccgaagccacctctaatgatcataattgcctcttttattcttctctagtccgtgtctttgcaaaatgattctgttacctatgctataaattatggaaaataaactcattatgaaaga

SEQ ID NO: 159044 - DNA, 1922 bp, Homo sapiens
  Payload ID: 11123
  Gene Symbol: NPFFR2
  Gene Name: neuropeptide FF receptor 2
  Uniprot ID: Q9Y5X5
  ENST ID: ENST00000308744
  CDS Start-End: 99-1667
tctggagccaagtaatggtgatactgatgcttccttttctttgccgcgctcggattctgagtttcacaagaatgtacctgggtgccccttagcgggatatgaatagcttcttcggaaccccagcggccagctggtgcctcctggaaagtgacgtctcatctgcaccggacaaggaggcggggagggagcgcagagcactcagcgtccagcagcgcggcgggccagcctggagcggaagcctggagtggagcaggcagtccgcgggggacagacgtcggctgggattgagccggcagactgcgaaaagtagctggagccggagcagggacagaacctgttgctgcagacgggcttggtggattctggttcctgccgccgacagggctcgccgggagaggttcatcatgaatgagaaatgggacacaaactcttcagaaaactggcatcccatctggaatgtcaatgacacaaagcatcatctgtactcagatattaatattacctatgtgaactactatcttcaccagcctcaagtggcagcaatcttcattatttcctactttctgatcttctttttgtgcatgatgggaaatactgtggtttgctttattgtaatgaggaacaaacatatgcacacagtcactaatctcttcatcttaaacctggccataagtgatttactagttggcatattctgcatgcctataacactgctggacaatattatagcaggatggccatttggaaacacgatgtgcaagatcagtggattggtccagggaatatctgtcgcagcttcagtctttacgttagttgcaattgctgtagataggttccagtgtgtggtctacccttttaaaccaaagctcactatcaagacagcgtttgtcattattatgatcatctgggtcctagccatcaccattatgtctccatctgcagtaatgttacatgtgcaagaagaaaaatattaccgagtgagactcaactcccagaataaaaccagtccagtctactggtgccgggaagactggccaaatcaggaaatgaggaagatctacaccactgtgctgtttgccaacatctacctggctcccctctccctcattgtcatcatgtatggaaggattggaatttcactcttcagggctgcagttcctcacacaggcaggaagaaccaggagcagtggcacgtggtgtccaggaagaagcagaagatcattaagatgctcctgattgtggccctgctttttattctctcatggctgcccctgtggactctaatgatgctctcagactacgctgacctttctccaaatgaactgcagatcatcaacatctacatctacccttttgcacactggctggcattcggcaacagcagtgtcaatcccatcatttatggtttcttcaacgagaatttccgccgtggtttccaagaagctttccagctccagctctgccaaaaaagagcaaagcctatggaagcttatgccctaaaagctaaaagccatgtgctcataaacacatctaatcagcttgtccaggaatctacatttcaaaaccctcatggggaaaccttgctttataggaaaagtgctgaaaaaccccaacaggaattagtgatggaagaattaaaagaaactactaacagcagtgagatttaaaaagagctagtgtgataatcctaactctactacgcattatatatttaaatccattgctttttgtggctttgcacttcaaatttttcaaagaatgttctaaataaaacatttactgaaagccctctctggcaaaaaaattaaaaataaacaaaaatggtcataagatcataaacaatcttatgttgtataaaaatacgtagagtgacttagacatgtttgcatgaataaatatatttctagagaacagtttacaaa

SEQ ID NO: 159045 - DNA, 1234 bp, Homo sapiens
  Payload ID: 11123
  Gene Symbol: NPFFR2
  Gene Name: neuropeptide FF receptor 2
  Uniprot ID: Q9Y5X5
  ENST ID: ENST00000344413
  CDS Start-End: 1-399
atgaatagcttcttcggaaccccagcggccagctggtgcctcctggaaagtgacgtctcatctgcaccggacaaggaggcggggagggagcgcagagcactcagcgtccagcagcgcggcgggccagcctggagcggaagcctggagtggagcaggcagtccgcgggggacagacgtcggctgggattgagccggcagactgcgaaaagtagctggagccggagcagggacagaacctgttgctgcagacgggcttggtggattctggttcctgccgccgacagggctcgccgggagaggatggccatttggaaacacgatgtgcaagatcagtggattggtccagggaatatctgtcgcagcttcagtctttacgttagttgcaattgctgtagataggttccagtgtgtggtctacccttttaaaccaaagctcactatcaagacagcgtttgtcattattatgatcatctgggtcctagccatcaccattatgtctccatctgcagtaatgttacatgtgcaagaagaaaaatattaccgagtgagactcaactcccagaataaaaccagtccagtctactggtgccgggaagactggccaaatcaggaaatgaggaagatctacaccactgtgctgtttgccaacatctacctggctcccctctccctcattgtcatcatgtatggaaggattggaatttcactcttcagggctgcagttcctcacacaggcaggaagaaccaggagcagtggcacgtggtgtccaggaagaagcagaagatcattaagatgctcctgattgtggccctgctttttattctctcatggctgcccctgtggactctaatgatgctctcagactacgctgacctttctccaaatgaactgcagatcatcaacatctacatctacccttttgcacactggctggcattcggcaacagcagtgtcaatcccatcatttatggtttcttcaacgagaatttccgccgtggtttccaagaagctttccagctccagctctgccaaaaaagagcaaagcctatggaagcttatgccctaaaagctaaaagccatgtgctcataaacacatctaatcagcttgtccaggaatctacatttcaaaaccctcatggggaaaccttgctttataggaaaagtgctgaaaaaccccaacaggaattagtgatggaagaattaaaagaaactactaacagcagtgagatttaa

SEQ ID NO: 159046 - DNA, 1559 bp, Homo sapiens
  Payload ID: 11123
  Gene Symbol: NPFFR2
  Gene Name: neuropeptide FF receptor 2
  Uniprot ID: Q9Y5X5
  ENST ID: ENST00000358749
  CDS Start-End: 48-1310
tgcctctgcccacctcttctcttctgcttccatattacaggttcatcatgaatgagaaatgggacacaaactcttcagaaaactggcatcccatctggaatgtcaatgacacaaagcatcatctgtactcagatattaatattacctatgtgaactactatcttcaccagcctcaagtggcagcaatcttcattatttcctactttctgatcttctttttgtgcatgatgggaaatactgtggtttgctttattgtaatgaggaacaaacatatgcacacagtcactaatctcttcatcttaaacctggccataagtgatttactagttggcatattctgcatgcctataacactgctggacaatattatagcaggatggccatttggaaacacgatgtgcaagatcagtggattggtccagggaatatctgtcgcagcttcagtctttacgttagttgcaattgctgtagataggttccagtgtgtggtctacccttttaaaccaaagctcactatcaagacagcgtttgtcattattatgatcatctgggtcctagccatcaccattatgtctccatctgcagtaatgttacatgtgcaagaagaaaaatattaccgagtgagactcaactcccagaataaaaccagtccagtctactggtgccgggaagactggccaaatcaggaaatgaggaagatctacaccactgtgctgtttgccaacatctacctggctcccctctccctcattgtcatcatgtatggaaggattggaatttcactcttcagggctgcagttcctcacacaggcaggaagaaccaggagcagtggcacgtggtgtccaggaagaagcagaagatcattaagatgctcctgattgtggccctgctttttattctctcatggctgcccctgtggactctaatgatgctctcagactacgctgacctttctccaaatgaactgcagatcatcaacatctacatctacccttttgcacactggctggcattcggcaacagcagtgtcaatcccatcatttatggtttcttcaacgagaatttccgccgtggtttccaagaagctttccagctccagctctgccaaaaaagagcaaagcctatggaagcttatgccctaaaagctaaaagccatgtgctcataaacacatctaatcagcttgtccaggaatctacatttcaaaaccctcatggggaaaccttgctttataggaaaagtgctgaaaaaccccaacaggaattagtgatggaagaattaaaagaaactactaacagcagtgagatttaaaaagagctagtgtgataatcctaactctactacgcattatatatttaaatccattgctttttgtggctttgcacttcaaatttttcaaagaatgttctaaataaaacatttactgaaagccctctctggcaaaaaaattaaaaataaacaaaaatggtcataagatcataaacaatcttatgttgtataaaaatacgtagagtgacttagacatgtttgcatgaataaatatatttctagagaacagtt

SEQ ID NO: 159047 - DNA, 1866 bp, Homo sapiens
  Payload ID: 11123
  Gene Symbol: NPFFR2
  Gene Name: neuropeptide FF receptor 2
  Uniprot ID: Q9Y5X5
  ENST ID: ENST00000395999
  CDS Start-End: 346-1617
cctcctgagtagctgggactacaggcgcccgccaccacgcctggctaatttttttgtatttttagtagggacggcgtttcactgtgttagccagatggtctccatctcccgacctcgtgatccacccacctcggcctcccaaagtgctgggattacaggcgtgagccaccgcgcccggccaatttcctttcttagttgcctctgcccacctcttctcttctgcttccatattacaggtctcctcagttgcgaaattaggatgttaattatagcttttgacatacaagaaacatcaaaaagattgaatgtcttaataagagtgaagcatgtagatcagtgactgctatgttcatcatgaatgagaaatgggacacaaactcttcagaaaactggcatcccatctggaatgtcaatgacacaaagcatcatctgtactcagatattaatattacctatgtgaactactatcttcaccagcctcaagtggcagcaatcttcattatttcctactttctgatcttctttttgtgcatgatgggaaatactgtggtttgctttattgtaatgaggaacaaacatatgcacacagtcactaatctcttcatcttaaacctggccataagtgatttactagttggcatattctgcatgcctataacactgctggacaatattatagcaggatggccatttggaaacacgatgtgcaagatcagtggattggtccagggaatatctgtcgcagcttcagtctttacgttagttgcaattgctgtagataggttccagtgtgtggtctacccttttaaaccaaagctcactatcaagacagcgtttgtcattattatgatcatctgggtcctagccatcaccattatgtctccatctgcagtaatgttacatgtgcaagaagaaaaatattaccgagtgagactcaactcccagaataaaaccagtccagtctactggtgccgggaagactggccaaatcaggaaatgaggaagatctacaccactgtgctgtttgccaacatctacctggctcccctctccctcattgtcatcatgtatggaaggattggaatttcactcttcagggctgcagttcctcacacaggcaggaagaaccaggagcagtggcacgtggtgtccaggaagaagcagaagatcattaagatgctcctgattgtggccctgctttttattctctcatggctgcccctgtggactctaatgatgctctcagactacgctgacctttctccaaatgaactgcagatcatcaacatctacatctacccttttgcacactggctggcattcggcaacagcagtgtcaatcccatcatttatggtttcttcaacgagaatttccgccgtggtttccaagaagctttccagctccagctctgccaaaaaagagcaaagcctatggaagcttatgccctaaaagctaaaagccatgtgctcataaacacatctaatcagcttgtccaggaatctacatttcaaaaccctcatggggaaaccttgctttataggaaaagtgctgaaaaaccccaacaggaattagtgatggaagaattaaaagaaactactaacagcagtgagatttaaaaagagctagtgtgataatcctaactctactacgcattatatatttaaatccattgctttttgtggctttgcacttcaaatttttcaaagaatgttctaaataaaacatttactgaaagccctctctggcaaaaaaattaaaaataaacaaaaatggtcataagatcataaacaatcttatgttgtataaaaatacgtagagtgacttagacatgtttgcatgaataaatatatttctagagaacagtt

SEQ ID NO: 159048 - DNA, 592 bp, Homo sapiens
  Payload ID: 11124
  Gene Symbol: NPFF
  Gene Name: neuropeptide FF-amide peptide precursor
  Uniprot ID: O15130
  ENST ID: ENST00000267017
  CDS Start-End: 165-506
catgaagtcctgggggcgccatgggaggagatcccaggtggctcctaatgagccctgcatttccatttgcctgctctagattcccctaaggctactgtgaggctgggggtgggggaacagcaggtataagaggttggggtggctgtaggagggtaggtggcagcatggattctaggcaggctgctgcactgctggtgctgctgctgttaatagacgggggctgtgctgaagggccaggaggccagcaggaagaccagctctccgcggaggaagacagcgaacccctcccaccacaggatgcccagacctctgggtcactgttgcactacctgctccaggcaatggagagacctggccggagccaagccttcctgtttcagccccagaggtttggcagaaatacccagggatcctggaggaatgaatggctgagtccccgggctggagaggggctgaattcccagttctggagcctggctgcccctcaacgctttgggaagaagtgacatgtcatcccttgatatgtctgcatgcaaggtccacacccaaaagtgtcaatgtttgccccccaaataaaattgtctggcttctg

SEQ ID NO: 159049 - DNA, 270 bp, Homo sapiens
  Payload ID: 11125
  Gene Symbol: NPS
  Gene Name: neuropeptide S
  Uniprot ID: P0C0P6
  ENST ID: ENST00000398023
  CDS Start-End: 1-270
atgattagctcagtaaaactcaatctcatcctagttctgtcgctgtccacaatgcatgtgttttggtgttatccagttccatcttctaaggtgtctggaaaatctgattactttctcattctgctgaacagctgcccaaccagattggacaggagcaaagaactagcttttctaaagccaattttggagaagatgtttgtgaaaaggtcctttcgcaatggagttggcacagggatgaaaaaaacttcctttcaaagagcaaaatcatga

SEQ ID NO: 159050 - DNA, 1410 bp, Homo sapiens
  Payload ID: 11126
  Gene Symbol: NPSR1
  Gene Name: neuropeptide S receptor 1
  Uniprot ID: Q6W5P4
  ENST ID: ENST00000359791
  CDS Start-End: 129-1262
gggctcagggagggctctgtgcctccgttcagcagagctgcagctgctgcccagctctcaggaggcaagctggactccctcactcagctgcaggagcaaggacagtgaggctcaaccccgcctgagccatgccagccaacttcacagagggcagcttcgattccagtgggaccgggcagacgctggattcttccccagtggcttgcactgaaacagtgacttttactgaagtggtggaaggaaaggaatggggttccttctactactcctttaagactgagcaattgataactctgtgggtcctctttgtttttaccattgttggaaactccgttgtgcttttttccacatggaggagaaagaagaagtcaagaatgaccttctttgtgactcagctggccatcacagattctttcacaggactggtcaacatcttgacagatattaattggcgattcactggagacttcacggcacctgacctggtttgccgagtggtccgctatttgcaggttgtgctgctctacgcctctacctacgtcctggtgtccctcagcatagacagataccatgccatcgtctaccccatgaagttccttcaaggagaaaagcaagccagggtcctcattgtgatcgcctggagcctgtcttttctgttctccattcccaccctgatcatatttgggaagaggacactgtccaacggtgaagtgcagtgctgggccctgtggcctgacgactcctactggaccccatacatgaccatcgtggccttcctggtgtacttcatccctctgacaatcatcagcatcatgtatggcattgtgatccgaactatttggattaaaagcaaaacctacgaaacagtgatttccaactgctcagatgggaaactgtgcagcagctataaccgaggactcatctcaaaggcaaaaatcaaggctatcaagtatagcatcatcatcattcttgccttcatctgctgttggagtccatacttcctgtttgacattttggacaatttcaacctccttccagacacccaggagcgtttctatgcctctgtgatcattcagaacctgccagcattgaatagtgccatcaaccccctcatctactgtgtcttcagcagctccatctctttcccctgcagggtcatccgtctccgtcagctccaggaggctgcgctaatgctctgccctcaacgagagaactggaagggtacttggccaggtgtaccttcctgggctcttccaaggtgacagctctcaccctgtgctgcaggtggccctgtgcctggtgccacttctcactgcttaccagggcacaaggacaccagtggttcccaaaatgggtcacagcaggatggcctgcatcagattcaccagggagggctataagaaggcagac

SEQ ID NO: 159051 - DNA, 1567 bp, Homo sapiens
  Payload ID: 11126
  Gene Symbol: NPSR1
  Gene Name: neuropeptide S receptor 1
  Uniprot ID: Q6W5P4
  ENST ID: ENST00000360581
  CDS Start-End: 129-1244
gggctcagggagggctctgtgcctccgttcagcagagctgcagctgctgcccagctctcaggaggcaagctggactccctcactcagctgcaggagcaaggacagtgaggctcaaccccgcctgagccatgccagccaacttcacagagggcagcttcgattccagtgggaccgggcagacgctggattcttccccagtggcttgcactgaaacagtgacttttactgaagtggtggaaggaaaggaatggggttccttctactactcctttaagactgagcaattgataactctgtgggtcctctttgtttttaccattgttggaaactccgttgtgcttttttccacatggaggagaaagaagaagtcaagaatgaccttctttgtgactcagctggccatcacagattctttcacaggactggtcaacatcttgacagatattaattggcgattcactggagacttcacggcacctgacctggtttgccgagtggtccgctatttgcaggttgtgctgctctacgcctctacctacgtcctggtgtccctcagcatagacagataccatgccatcgtctaccccatgaagttccttcaaggagaaaagcaagccagggtcctcattgtgatcgcctggagcctgtcttttctgttctccattcccaccctgatcatatttgggaagaggacactgtccaacggtgaagtgcagtgctgggccctgtggcctgacgactcctactggaccccatacatgaccatcgtggccttcctggtgtacttcatccctctgacaatcatcagcatcatgtatggcattgtgatccgaactatttggattaaaagcaaaacctacgaaacagtgatttccaactgctcagatgggaaactgtgcagcagctataaccgaggactcatctcaaaggcaaaaatcaaggctatcaagtatagcatcatcatcattcttgccttcatctgctgttggagtccatacttcctgtttgacattttggacaatttcaacctccttccagacacccaggagcgtttctatgcctctgtgatcattcagaacctgccagcattgaatagtgccatcaaccccctcatctactgtgtcttcagcagctccatctctttcccctgcagggagcaaagatcacaggattccagaatgacgttccgggagagaactgagaggcatgagatgcagattctgtccaagccagaattcatctagaccctagggcagtgccagtgctaggctgagcaccatcagctctcccaggtccttgtcacctgcttgggcacgtgcatggaacccgagccaacttcaccccaccctcgtcattacctgggagatgcacaagacaaatgttctaatgactgcatgcactgcttaagtattggccaacacgaactccccagttattcatgccagccaggaaggaaacgccttccttccccaccattcccagccctccttcccactggccagcacctgaacccagtgaacacaggcattagtggtccagggtcctggcttggagccagtgagtagac

SEQ ID NO: 159052 - DNA, 1233 bp, Homo sapiens
  Payload ID: 11126
  Gene Symbol: NPSR1
  Gene Name: neuropeptide S receptor 1
  Uniprot ID: Q6W5P4
  ENST ID: ENST00000381539
  CDS Start-End: 5-1177
agccatgccagccaacttcacagagggcagcttcgattccagtgggaccgggcagacgctggattcttccccagtggcttgcactgaaacagtgacttttactgaagtggtggaaggaaaggaatggggttccttctactactcctttaagactgagcaattgataactctgtgggtcctctttgtttttaccattgttggaaactccgttgtgcttttttccacatggaggagaaagaagaagtcaagaatgaccttctttgtgactcagctggccatcacagattctttcacaggactggtcaacatcttgacagatattaattggcgattcactggagacttcacggcacctgacctggtttgccgagtggtccgctatttgcaggttgtgctgctctacgcctctacctacgtcctggtgtccctcagcatagacagataccatgccatcgtctaccccatgaagttccttcaaggagaaaagcaagccagggtcctcattgtgatcgcctggagcctgtcttttctgttctccattcccaccctgatcatatttgggaagaggacactgtccaacggtgaagtgcagtgctgggccctgtggcctgacgactcctactggaccccatacatgaccatcgtggccttcctggtgtacttcatccctctgacaatcatcagcatcatgtatggcattgtgatccgaactatttggattaaaagcaaaacctacgaaacagtgatttccaactgctcagatgggaaactgtgcagcagctataaccgaggactcatctcaaaggcaaaaatcaaggctatcaagtatagcatcatcatcattcttgccttcatctgctgttggagtccatacttcctgtttgacattttggacaatttcaacctccttccagacacccaggagcgtttctatgcctctgtgatcattcagaacctgccagcattgaatagtgccatcaaccccctcatctactgtgtcttcagcagctccatctctttcccctgcagggctaatagcagtgtctacctgttggcctgtgatgtctctgtcctctgggctctggtgctgaccagtgagaaggagagctgtgagtcatggagaaggaagggagcaaagatcacaggattccagaatgacgttccgggagagaactgagaggcatgagatgcagattctgtccaagccagaattcatctagaccctagggcagt

SEQ ID NO: 159053 - DNA, 1369 bp, Homo sapiens
  Payload ID: 11126
  Gene Symbol: NPSR1
  Gene Name: neuropeptide S receptor 1
  Uniprot ID: Q6W5P4
  ENST ID: ENST00000381542
  CDS Start-End: 129-1046
gggctcagggagggctctgtgcctccgttcagcagagctgcagctgctgcccagctctcaggaggcaagctggactccctcactcagctgcaggagcaaggacagtgaggctcaaccccgcctgagccatgccagccaacttcacagagggcagcttcgattccagtgggaccgggcagacgctggattcttccccagtggcttgcactgaaacagtgacttttactgaagtggtggaaggaaaggaatggggttccttctactactcctttaagactgagcaattgataactctgtgggtcctctttgtttttaccattgttggaaactccgttgtgcttttttccacatggaggagaaagaagaagtcaagaatgaccttctttgtgactcagctggccatcacagaaaagcaagccagggtcctcattgtgatcgcctggagcctgtcttttctgttctccattcccaccctgatcatatttgggaagaggacactgtccaacggtgaagtgcagtgctgggccctgtggcctgacgactcctactggaccccatacatgaccatcgtggccttcctggtgtacttcatccctctgacaatcatcagcatcatgtatggcattgtgatccgaactatttggattaaaagcaaaacctacgaaacagtgatttccaactgctcagatgggaaactgtgcagcagctataaccgaggactcatctcaaaggcaaaaatcaaggctatcaagtatagcatcatcatcattcttgccttcatctgctgttggagtccatacttcctgtttgacattttggacaatttcaacctccttccagacacccaggagcgtttctatgcctctgtgatcattcagaacctgccagcattgaatagtgccatcaaccccctcatctactgtgtcttcagcagctccatctctttcccctgcagggagcaaagatcacaggattccagaatgacgttccgggagagaactgagaggcatgagatgcagattctgtccaagccagaattcatctagaccctagggcagtgccagtgctaggctgagcaccatcagctctcccaggtccttgtcacctgcttgggcacgtgcatggaacccgagccaacttcaccccaccctcgtcattacctgggagatgcacaagacaaatgttctaatgactgcatgcactgcttaagtattggccaacacgaactccccagttattcatgccagccaggaaggaaacgccttccttccccaccattcccagccctccttcccactggccagcacctgaacccagtgaacacaggcattagtggtccagggtcctggcttggagccagtgagtagac

SEQ ID NO: 159054 - DNA, 1463 bp, Homo sapiens
  Payload ID: 11126
  Gene Symbol: NPSR1
  Gene Name: neuropeptide S receptor 1
  Uniprot ID: Q6W5P4
  ENST ID: ENST00000381544
  CDS Start-End: 129-605
gggctcagggagggctctgtgcctccgttcagcagagctgcagctgctgcccagctctcaggaggcaagctggactccctcactcagctgcaggagcaaggacagtgaggctcaaccccgcctgagccatgccagccaacttcacagagggcagcttcgattccagtgggaccgggcagacgctggattcttccccagtggcttgcactgaaacagtgacttttactgaagtggtggaaggaaaggaatggggttccttctactactcctttaagactgagcaattgataactctgtgggtcctctttgtttttaccattgttggaaactccgttgtgcttttttccacatggaggagaaagaagaagtcaagaatgaccttctttgtgactcagctggccatcacaggttgtgctgctctacgcctctacctacgtcctggtgtccctcagcatagacagataccatgccatcgtctaccccatgaagttccttcaaggagaaaagcaagccagggtcctcattgtgatcgcctggagcctgtcttttctgttctccattcccaccctgatcatatttgggaagaggacactgtccaacggtgaagtgcagtgctgggccctgtggcctgacgactcctactggaccccatacatgaccatcgtggccttcctggtgtacttcatccctctgacaatcatcagcatcatgtatggcattgtgatccgaactatttggattaaaagcaaaacctacgaaacagtgatttccaactgctcagatgggaaactgtgcagcagctataaccgaggactcatctcaaaggcaaaaatcaaggctatcaagtatagcatcatcatcattcttgccttcatctgctgttggagtccatacttcctgtttgacattttggacaatttcaacctccttccagacacccaggagcgtttctatgcctctgtgatcattcagaacctgccagcattgaatagtgccatcaaccccctcatctactgtgtcttcagcagctccatctctttcccctgcagggagcaaagatcacaggattccagaatgacgttccgggagagaactgagaggcatgagatgcagattctgtccaagccagaattcatctagaccctagggcagtgccagtgctaggctgagcaccatcagctctcccaggtccttgtcacctgcttgggcacgtgcatggaacccgagccaacttcaccccaccctcgtcattacctgggagatgcacaagacaaatgttctaatgactgcatgcactgcttaagtattggccaacacgaactccccagttattcatgccagccaggaaggaaacgccttccttccccaccattcccagccctccttcccactggccagcacctgaacccagtgaacacaggcattagtggtccagggtcctggcttggagccagtgagtagac

SEQ ID NO: 159055 - DNA, 856 bp, Homo sapiens
  Payload ID: 11126
  Gene Symbol: NPSR1
  Gene Name: neuropeptide S receptor 1
  Uniprot ID: Q6W5P4
  ENST ID: ENST00000381553
  CDS Start-End: 175-606
agcacgtagatcctccctgtcatcaggcagagctcttcagtgaggtgggctcagggagggctctgtgcctccgttcagcagagctgcagctgctgcccagctctcaggaggcaagctggactccctcactcagctgcaggagcaaggacagtgaggctcaaccccgcctgagccatgccagccaacttcacagagggcagcttcgattccagtgggaccgggcagacgctggattcttccccagtggcttgcactgaaacagtgacttttactgaagtggtggaaggaaaggaatggggttccttctactactcctttaagactgagcaattgataactctgtgggtcctctttgtttttaccattgttggaaactccgttgtgcttttttccacatggaggagaaagaagaagtcaagaatgaccttctttgtgactcagctggccatcacagattctttcacaggactggtcaacatcttgacagatattaattggcgattcactggagacttcacggcacctgacctggtttgccgagtggtccgctatttgcaggtcatggtaatgaagttattccatattcagaaaatgaatatggaatagttacaatcttcttttgtgctctgaatataaccttgaaagtttggtatgtctgaaagagccttttctattatgtacggctagtattttctcaggggaaatttttaaaaacatatttcaatttctttctgaggatatttgcttccttgtaaataaatgctttcaattgcttattatattagcaatcaattgctgatacacaaattatgacaaaacatggtggcttaaaacaataaacatttattatctcaca

SEQ ID NO: 159056 - DNA, 1473 bp, Homo sapiens
  Payload ID: 11126
  Gene Symbol: NPSR1
  Gene Name: neuropeptide S receptor 1
  Uniprot ID: Q6W5P4
  ENST ID: ENST00000396095
  CDS Start-End: 129-539
gggctcagggagggctctgtgcctccgttcagcagagctgcagctgctgcccagctctcaggaggcaagctggactccctcactcagctgcaggagcaaggacagtgaggctcaaccccgcctgagccatgccagccaacttcacagagggcagcttcgattccagtgggaccgggcagacgctggattcttccccagtggcttgcactgaaacagtgacttttactgaagtggtggaaggaaaggaatggggttccttctactactcctttaagactgagcaattgataactctgtgggtcctctttgtttttaccattgttggaaactccgttgtgcttttttccacatggaggagaaagaagaagtcaagaatgaccttctttgtgactcagctggccatcacagattctttcacaggactggtcaacatcttgacagatattaattggcgattcactggagacttcacggcacctgacctggtttgccgagtggtccgctatttgcagaaaagcaagccagggtcctcattgtgatcgcctggagcctgtcttttctgttctccattcccaccctgatcatatttgggaagaggacactgtccaacggtgaagtgcagtgctgggccctgtggcctgacgactcctactggaccccatacatgaccatcgtggccttcctggtgtacttcatccctctgacaatcatcagcatcatgtatggcattgtgatccgaactatttggattaaaagcaaaacctacgaaacagtgatttccaactgctcagatgggaaactgtgcagcagctataaccgaggactcatctcaaaggcaaaaatcaaggctatcaagtatagcatcatcatcattcttgccttcatctgctgttggagtccatacttcctgtttgacattttggacaatttcaacctccttccagacacccaggagcgtttctatgcctctgtgatcattcagaacctgccagcattgaatagtgccatcaaccccctcatctactgtgtcttcagcagctccatctctttcccctgcagggagcaaagatcacaggattccagaatgacgttccgggagagaactgagaggcatgagatgcagattctgtccaagccagaattcatctagaccctagggcagtgccagtgctaggctgagcaccatcagctctcccaggtccttgtcacctgcttgggcacgtgcatggaacccgagccaacttcaccccaccctcgtcattacctgggagatgcacaagacaaatgttctaatgactgcatgcactgcttaagtattggccaacacgaactccccagttattcatgccagccaggaaggaaacgccttccttccccaccattcccagccctccttcccactggccagcacctgaacccagtgaacacaggcattagtggtccagggtcctggcttggagccagtgagtagac

SEQ ID NO: 159057 - DNA, 1377 bp, Homo sapiens
  Payload ID: 11126
  Gene Symbol: NPSR1
  Gene Name: neuropeptide S receptor 1
  Uniprot ID: Q6W5P4
  ENST ID: ENST00000531252
  CDS Start-End: 129-1229
gggctcagggagggctctgtgcctccgttcagcagagctgcagctgctgcccagctctcaggaggcaagctggactccctcactcagctgcaggagcaaggacagtgaggctcaaccccgcctgagccatgccagccaacttcacagagggcagcttcgattccagtgggaccgggcagacgctggattcttccccagtggcttgcactgaaacagtgacttttactgaagtggtggaaggaaaggaatggggttccttctactactcctttaagactgagcaattgataactctgtgggtcctctttgtttttaccattgttggaaactccgttgtgcttttttccacatggaggagaaagaagaagtcaagaatgaccttctttgtgactcagctggccatcacagatattaattggcgattcactggagacttcacggcacctgacctggtttgccgagtggtccgctatttgcaggttgtgctgctctacgcctctacctacgtcctggtgtccctcagcatagacagataccatgccatcgtctaccccatgaagttccttcaaggagaaaagcaagccagggtcctcattgtgatcgcctggagcctgtcttttctgttctccattcccaccctgatcatatttgggaagaggacactgtccaacggtgaagtgcagtgctgggccctgtggcctgacgactcctactggaccccatacatgaccatcgtggccttcctggtgtacttcatccctctgacaatcatcagcatcatgtatggcattgtgatccgaactatttggattaaaagcaaaacctacgaaacagtgatttccaactgctcagatgggaaactgtgcagcagctataaccgaggactcatctcaaaggcaaaaatcaaggctatcaagtatagcatcatcatcattcttgccttcatctgctgttggagtccatacttcctgtttgacattttggacaatttcaacctccttccagacacccaggagcgtttctatgcctctgtgatcattcagaacctgccagcattgaatagtgccatcaaccccctcatctactgtgtcttcagcagctccatctctttcccctgcagggtcatccgtctccgtcagctccaggaggctgcgctaatgctctgccctcaacgagagaactggaagggtacttggccaggtgtaccttcctgggctcttccaaggtgacagctctcaccctgtgctgcaggtggccctgtgcctggtgccacttctcactgcttaccagggcacaaggacaccagtggttcccaaaatgggtcacagcaggatggcctgcatcagattcaccagggagggctataagaaggcagac

SEQ ID NO: 159058 - DNA, 814 bp, Homo sapiens
  Payload ID: 11126
  Gene Symbol: NPSR1
  Gene Name: neuropeptide S receptor 1
  Uniprot ID: Q6W5P4
  ENST ID: ENST00000465305
  CDS Start-End: 129-413
gggctcagggagggctctgtgcctccgttcagcagagctgcagctgctgcccagctctcaggaggcaagctggactccctcactcagctgcaggagcaaggacagtgaggctcaaccccgcctgagccatgccagccaacttcacagagggcagcttcgattccagtgggaccgggcagacgctggattcttccccagtggcttgcactgaaacagtgacttttactgaagtggtggaaggaaaggaatggggttccttctactactcctttaagactgagcaattgataactctgtgggtcctctttgtttttaccattgttggaaactccgttgtgcttttttccacatggaggagaaagaagaagtcaagaatgaccttctttgtgactcagctggccatcacagtataacaagcccacctgcttgagctgggctgcagtggccagggtaaacatccaaggcaccagtgaaaaatacagagaaggtaaaaggagcaagagttctgaagatggaacctgggatgggggaaagtttcttcaatctttcctaccaacaagaactccaatttttcactcctataaccgtagaagtagaggtaattaggatcatccagcaaatgcttagaggcaaatatccctggatgaggatgccacagcttattttcattatatttcttcgattacagtgtggtaatgcatgttgtatggaactacatattctttcagaatgaaaggatttagaggtggcaagaatatcagcttgaaatttaaagttttttcataaacaataaacaaatgataattgaaaattc

SEQ ID NO: 159059 - DNA, 1190 bp, Homo sapiens
  Payload ID: 11127
  Gene Symbol: NPVF
  Gene Name: neuropeptide VF precursor
  Uniprot ID: Q9HCQ7
  ENST ID: ENST00000222674
  CDS Start-End: 48-638
ataaacattgggctgcacatagagacttaattttagatttagacaaaatggaaattatttcatcaaaactattcattttattgactttagccacttcaagcttgttaacatcaaacattttttgtgcagatgaattagtgatgtccaatcttcacagcaaagaaaattatgacaaatattctgagcctagaggatacccaaaaggggaaagaagcctcaattttgaggaattaaaagattggggaccaaaaaatgttattaagatgagtacacctgcagtcaataaaatgccacactccttcgccaacttgccattgagatttgggaggaacgttcaagaagaaagaagtgctggagcaacagccaacctgcctctgagatctggaagaaatatggaggtgagcctcgtgagacgtgttcctaacctgccccaaaggtttgggagaacaacaacagccaaaagtgtctgcaggatgctgagtgatttgtgtcaaggatccatgcattcaccatgtgccaatgacttattttactccatgacctgccagcaccaagaaatccagaatcccgatcaaaaacagtcaaggagactgctattcaagaaaatagatgatgcagaattgaaacaagaaaaataagaaacctggagcctgtccctaaagctgtggcctgtaatctacaaatggctctatagcgaagaccacacggaagagtagctacatacacttcatcagctatggatcatcaacggcaatttttccttgtcagtacagctataatagtatcttgaaagttgtaaaaaaattaaagcatatttgttacgtaaagttaaaatgatttttgtctgaataaaaaaaaagcattgcaaatgctttagaaatctctgataatggagagagagacagaggaccctcctcactaccctatataaaaatcattggcacagttacacttaataaaaaaaattaaacagaagagcaccctgaaaaacattatgatggaaattaaatagtatgccagaataacatggttgacaaataagtgaacaaggattaaaaatcacttacaaacgtgtttctgtacaccctttctatcgtgtcaaatgttaatgaatctgtgatcaattgaaatgtaaatgtctgtgtaaaactacaaaataaaaactcttagactttagggagaaaagaaaa

SEQ ID NO: 159060 - DNA, 1015 bp, Homo sapiens
  Payload ID: 11128
  Gene Symbol: NPW
  Gene Name: neuropeptide W
  Uniprot ID: Q8N729
  ENST ID: ENST00000329610
  CDS Start-End: 383-880
gtacccactccctggcacttccactcctagagggaggaggctgagcaggcagagaatgggacgtgtcccctcagaggagcctcgagcccagttccagccagcggcccactcagtgaggtgctcaagtacccacgtcccccgccagctgccagggttccctctcctccctccgtccctccccccatctggggagcccagcggtactgagggggcggaacgaggcggggccaccgagcggttatagctgggcctgcaggggacccacggctcgcctccagcctcctgcgctccggtacctgggcgtcccaactccactgcgcgcccaaacccagccgagccggttcgtggcccgccccgccgggcggccgtcgacgcgagcgccctggcgtggcgcccaggggagcggggggctcccgcgagccggccgcggctggcactgctgctgcttctgctcctgctgccgctgccctccggcgcgtggtacaagcacgtggcgagtccccgctaccacacggtgggccgcgccgctggcctgctcatggggctgcgtcgctcaccctatctgtggcgccgcgcgctgcgcgcggccgccgggcccctggccagggacaccctctcccccgaacccgcagcccgcgaggctcctctcctgctgccctcgtgggttcaggagctgtgggagacgcgacgcaggagctcccaggcagggatccccgtccgtgcgccccggagcccgcgcgccccagagcctgcgctggaaccggagtccctggacttcagcggagctggccagagacttcggagagacgtctcccgcccagcggtggaccccgcagcaaaccgccttggcctgccctgcctggcccccggaccgttctgacagcgtcccccgcccgcccgtggcgcctccgcgcctgacccaggaggagtggccgcgcgcttccaggagccgctcatagaccccgcctgccgtccggtcaataaaatccgcctgactcctgcgcccccgcatgcg

SEQ ID NO: 159061 - DNA, 991 bp, Homo sapiens
  Payload ID: 11128
  Gene Symbol: NPW
  Gene Name: neuropeptide W
  ENST ID: ENST00000566435
  CDS Start-End: 514-855
cctagagggaggaggctgagcaggcagagaatgggacgtgtcccctcagaggagcctcgagcccagttccagccagcggcccactcagtgaggtgctcaagtacccacgtcccccgccagctgccagggttccctctcctccctccgtccctccccccatctggggagcccagcggtactgagggggcggaacgaggcggggccaccgagcggttatagctgggcctgcaggggacccacggctcgcctccagcctcctgcgctccggtacctgggcgtcccaactccactgcgcgcccaaacccagccgagccggttcgtggcccgccccgccgggcggccgtcgacgcgagcgccctggcgtggcgcccaggggagcggggggctcccgcgagccggccgcggctggcactgctgctgcttctgctcctgctgccgctgccctccggcgcgtggtacaagcacgtggcgagtccccgctaccacacggtgggccgcgccgctggcctgctcatggggctgcgtcgctcaccctatctgtggcgccgcgcgctgcgcgcggccgccgggcccctggccagggacaccctctcccccgaacccgcagcccgcgaggctcctctcctgctgccctcgtgggttcaggagctgtgggagacgcgacgcaggagctcccaggcagggatccccgtccgtgcgccccggagcccgcgcgccccagagcctgcgctggaaccggagtccctggacttcagcggagctggccagagacttcggagagacgtctcccgcccagcggtggaccccgcagcaaaccgccttggcctgccctgcctggcccccggaccgttctgacagcgtcccccgcccgcccgtggcgcctccgcgcctgacccaggaggagtggccgcgcgcttccaggagccgctcatagaccccgcctgccgtccggtcaataaaatccgcctgactcctgcgcccccgcatgcga

SEQ ID NO: 159062 - DNA, 398 bp, Homo sapiens
  Payload ID: 11128
  Gene Symbol: NPW
  Gene Name: neuropeptide W
  ENST ID: ENST00000567649
  CDS Start-End: 13-398
ggccgctctaccatgagccgaccgctcgaaggtccgcgcggccacgcggccagccccgggctcctctgggccacgcgtgtcacgtcaacactcgccgggctccacgaactggcgttgtcagatgaaacacggcacaactggtttgcatctcagatgaacaaggggtcatgtcttagtcccgcgaggctcctctcctgctgccctcgtgggttcaggagctgtgggagacgcgacgcaggagctcccaggcagggatccccgtccgtgcgccccggagcccgcgcgccccagagcctgcgctggaaccggagtccctggacttcagcggagctggccagagacttcggagagacgtctcccgcccagcggtggaccccgcagcaaaccgccttggcctg

SEQ ID NO: 159063 - DNA, 585 bp, Homo sapiens
  Payload ID: 11129
  Gene Symbol: NPY
  Gene Name: neuropeptide Y
  Uniprot ID: P01303
  ENST ID: ENST00000242152
  CDS Start-End: 114-407
aaagccctgtcgcgacccgctctctgcaccccatccgctggctctcacccctcggagacgctcgcccgacagcatagtacttgccgcccagccacgcccgcgcgccagccaccatgctaggtaacaagcgactggggctgtccggactgaccctcgccctgtccctgctcgtgtgcctgggtgcgctggccgaggcgtacccctccaagccggacaacccgggcgaggacgcaccagcggaggacatggccagatactactcggcgctgcgacactacatcaacctcatcaccaggcagagatatggaaaacgatccagcccagagacactgatttcagacctcttgatgagagaaagcacagaaaatgttcccagaactcggcttgaagaccctgcaatgtggtgatgggaaatgagacttgctctctggccttttcctattttcagcccatatttcatcgtgtaaaacgagaatccacccatcctaccaatgcatgcagccactgtgctgaattctgcaatgttttcctttgtcatcattgtatatatgtgtgtttaaataaagtatcatgcattcaaaagtg

SEQ ID NO: 159064 - DNA, 705 bp, Homo sapiens
  Payload ID: 11129
  Gene Symbol: NPY
  Gene Name: neuropeptide Y
  Uniprot ID: P01303
  ENST ID: ENST00000407573
  CDS Start-End: 291-584
gcaccccatccgctggctctcacccctcggagacgctcgcccgacagcatagtacttgccgcccagccacgcccgcgcgccagccaccacaagagtttgggcaagaagggagaaaagtgacccagcaggaagaacttccaattcggttttgaatgctaaactggcggggcccccaccttgcactctcgccgcgcgcttcttggtccctgagacttcgaacgaagttgcgcgaagttttcaggtggagcagaggggcaggtcccgaccggacggcgcccggagcccgcaagatgctaggtaacaagcgactggggctgtccggactgaccctcgccctgtccctgctcgtgtgcctgggtgcgctggccgaggcgtacccctccaagccggacaacccgggcgaggacgcaccagcggaggacatggccagatactactcggcgctgcgacactacatcaacctcatcaccaggcagagatatggaaaacgatccagcccagagacactgatttcagacctcttgatgagagaaagcacagaaaatgttcccagaactcggcttgaagaccctgcaatgtggtgatgggaaatgagacttgctctctggccttttcctattttcagcccatatttcatcgtgtaaaacgagaatccacccatcctaccaatgcatgcagccactgtgctgaattctgcaatgtttt

SEQ ID NO: 159065 - DNA, 565 bp, Homo sapiens
  Payload ID: 11129
  Gene Symbol: NPY
  Gene Name: neuropeptide Y
  Uniprot ID: P01303
  ENST ID: ENST00000405982
  CDS Start-End: 135-428
cgggactgggacgagagcggattgggggtcgcgtgtggtagcaggaggaggagcgcggggggcagaggagggaggtgctgcgcgtgggtgctctgaatccccaagcccgtccgttgagccttctgtgcctgcagatgctaggtaacaagcgactggggctgtccggactgaccctcgccctgtccctgctcgtgtgcctgggtgcgctggccgaggcgtacccctccaagccggacaacccgggcgaggacgcaccagcggaggacatggccagatactactcggcgctgcgacactacatcaacctcatcaccaggcagagatatggaaaacgatccagcccagagacactgatttcagacctcttgatgagagaaagcacagaaaatgttcccagaactcggcttgaagaccctgcaatgtggtgatgggaaatgagacttgctctctggccttttcctattttcagcccatatttcatcgtgtaaaacgagaatccacccatcctaccaatgcatgcagccactgtgctgaattctgcaatgttttcctttgtcatcattgt

SEQ ID NO: 159066 - DNA, 3029 bp, Homo sapiens
  Payload ID: 11130
  Gene Symbol: NPY1R
  Gene Name: neuropeptide Y receptor Y1
  Uniprot ID: P25929
  ENST ID: ENST00000296533
  CDS Start-End: 533-1687
aaactgccctgccttccccggagtcgaggactgtggggattagggcttcctttcccctgcgcgggaggtctgtgtcgaataatgtgtggcttctgttggattgcttttctttccaaaattcctaggcaatgcttccccgaggtgtgcacctttgtgaggtgtttgtggggttgggggagcttcaggcgctactcgcgggacgccgtcacgtgatccgggatgaggtggagttcggctttaaggaggcgtctcttcctagcttcatcaatctttaggatctgagcaggagaaataccagcggatcttccccactctgctcccttccattcccacccttccttctttaataagcaggagcgaaaaagacaaattccaaagaggattgttcagttcaagggaatgaagaattcagaataattttggtaaatggattccaatatggggaataagaataagctgaacagttgacctgctttgaagaaacatactgtccatttgtctaaaataatctataacaaccaaaccaatcaaaatgaattcaacattattttcccaggttgaaaatcattcagtccactctaatttctcagagaagaatgcccagcttctggcttttgaaaatgatgattgtcatctgcccttggccatgatatttaccttagctcttgcttatggagctgtgatcattcttggtgtctctggaaacctggccttgatcataatcatcttgaaacaaaaggagatgagaaatgttaccaacatcctgattgtgaacctttccttctcagacttgcttgttgccatcatgtgtctcccctttacatttgtctacacattaatggaccactgggtctttggtgaggcgatgtgtaagttgaatccttttgtgcaatgtgtttcaatcactgtgtccattttctctctggttctcattgctgtggaacgacatcagctgataatcaaccctcgagggtggagaccaaataatagacatgcttatgtaggtattgctgtgatttgggtccttgctgtggcttcttctttgcctttcctgatctaccaagtaatgactgatgagccgttccaaaatgtaacacttgatgcgtacaaagacaaatacgtgtgctttgatcaatttccatcggactctcataggttgtcttataccactctcctcttggtgctgcagtattttggtccactttgttttatatttatttgctacttcaagatatatatacgcctaaaaaggagaaacaacatgatggacaagatgagagacaataagtacaggtccagtgaaaccaaaagaatcaatatcatgctgctctccattgtggtagcatttgcagtctgctggctccctcttaccatctttaacactgtgtttgattggaatcatcagatcattgctacctgcaaccacaatctgttattcctgctctgccacctcacagcaatgatatccacttgtgtcaaccccatattttatgggttcctgaacaaaaacttccagagagacttgcagttcttcttcaacttttgtgatttccggtctcgggatgatgattatgaaacaatagccatgtccacgatgcacacagatgtttccaaaacttctttgaagcaagcaagcccagtcgcatttaaaaaaatcaacaacaatgatgataatgaaaaaatctgaaactacttatagcctatggtcccggatgacatctgtttaaaaacaagcacaacctgcaacatactttgattacctgttctcccaaggaatggggttgaaatcatttgaaaatgactaagattttcttgtcttgctttttactgcttttgttgtagttgtcataattacatttggaacaaaaggtgtgggctttggggtcttctggaaatagttttgaccagacatctttgaagtgctttttgtgaatttatgcatataatataaagacttttatactgtacttattggaatgaaatttctttaaagtattactattaactgacttcagaagtacctgccatccaatacggtcattagattgggtcatcttgattagattagattagattagattgtcaacagattgggccatccttactttatgataggcatcattttagtgtgttacaatagtaacagtatgcaaaagcagcattcaggagccgaaagatagtctgaagtcattcagaagtggtttgaggtttctgttttttggtggtttttgtttgttttttttttttttcaccttaagggaggatttaatttgctcccaactgattgtcacttaaatgaaaatttaaaaatgaataaaaagacatacttctcagctgcaaatattatggagaattggggcacccacaggaatgaagagagaaagcagctccctaacttcaaaaccattttggtacctgacaacaagagcattttagagtaattaatttaataaagtaaattagtattgctgcaaatagttaaattatatttatttgaattgatggtcaagagattttccattttttttacagactgttcagtgtttgtcaagctttctggcataaatatgtactcaaaaggcatttccgcttacaatttgtagaaacacaaaatgcgttttccatacagcagtgcctatatagtgactgatttttaactttcaatgtccatctttcaaaggaagtaacaccaaggtacaatgttaaaggaatattcactttacctagcagggaaaaatacacaaaaactgcagatacttcatatagcccattttaacttgtataaactgtgtgacttgtggcgtcttataaataatgcactgtaaagattactgaatagttgtgtcatgttaatgtgcctaatttcatgtatcttgtaatcatgattgagcctcagaatcatttggagaaactatattttaaagaacaagacatacttcaatgtattatacagataaagtattacatgtgtttgattttaaaagggcggacattttattaaaatcaatattgtttttgctttttctgag

SEQ ID NO: 159067 - DNA, 568 bp, Homo sapiens
  Payload ID: 11130
  Gene Symbol: NPY1R
  Gene Name: neuropeptide Y receptor Y1
  ENST ID: ENST00000512819
  CDS Start-End: 271-568
aatctttaggatctgagcaggagaaataccagcggatcttccccactctgctcccttccattcccacccttccttctttaataagcaggagcgaaaaagacaaattccaaagaggattgttcagttcaagggaatgaagaattcagaataattttgctgataatcaaccctcgagggtggagaccaaataatagacatgcttatgtaggtattgctgtgatttgggtccttgctgtggcttcttctttgcctttcctgatctaccaagtaatgactgatgagccgttccaaaatgtaacacttgatgcgtacaaagacaaatacgtgtgctttgatcaatttccatcggactctcataggttgtcttataccactctcctcttggtgctgcagtattttggtccactttgttttatatttatttgctacttcaagatatatatacgcctaaaaaggagaaacaacatgatggacaagatgagagacaataagtacaggtccagtgaaaccaaaagaatcaatatcatgctgctctccattgtggtagcatttgcagtctgctggctcc

SEQ ID NO: 159068 - DNA, 536 bp, Homo sapiens
  Payload ID: 11130
  Gene Symbol: NPY1R
  Gene Name: neuropeptide Y receptor Y1
  ENST ID: ENST00000504391
  CDS Start-End: 344-536
aatctttaggatctgagcaggagaaataccagcggatcttccccactctgctcccttccattcccacccttccttctttaataagcaggagcgaaaaagacaaattccaaagaggattgttcagttcaagggaatgaagaattcagaataattttgacttgcttgttgccatcatgtgtctcccctttacatttgtctacacattaatggaccactgggtctttggtgaggcgatgtgttgtcttataccactctcctcttggtgctgcagtattttggtccactttgttttatatttatttgctacttcaagatatatatacgcctaaaaaggagaaacaacatgatggacaagatgagagacaataagtacaggtccagtgaaaccaaaagaatcaatatcatgctgctctccattgtggtagcatttgcagtctgctggctccctcttaccatctttaacactgtgtttgattggaatcatcagatcattgctacctgcaaccacaatctgttattcctgctctgccacctca

SEQ ID NO: 159069 - DNA, 753 bp, Homo sapiens
  Payload ID: 11130
  Gene Symbol: NPY1R
  Gene Name: neuropeptide Y receptor Y1
  ENST ID: ENST00000511901
  CDS Start-End: 680-753
ttgcattcggactgcaaaattctgctgaaagagccttaggctattttccatggtctaaggtaaaatcgttttggctttggtccaacacaacgcctcagttcctttaaaagattaactaaaggtctgtgaacttggaaaaaagaattcccgtttctggaattcgagttctatggatgtttgttattgctcgcatttgttatatgaagacacctcgcaaacaggagcgcaaaccttagagcgcagctgcctcccgggctcgggtcagcgctggaccgcgcggcagctggacggcctgagtggcgccccgcgggctgcgcccccggcctcgccagagacccgctagggttgagccctgacccgggcaccccgcgggctgctgttcccagctccggatgccagccgggctgcagccagagcgcgtccagccgggggcagcgctttgtccatcccccgccccatccccaggaggctccttcgcggatccccgacactctcctcccgggttcggcccgcgcctgctccacccggattgttcagttcaagggaatgaagaattcagaataattttggtaaatggattccaatatggggaataagaataagctgaacagttgacctgctttgaagaaacatactgtccatttgtctaaaataatctataacaaccaaaccaatcaaaatgaattcaacattattttcccaggttgaaaatcattcagtccactctaatttctcagagaagaatgcccagct

SEQ ID NO: 159070 - DNA, 799 bp, Homo sapiens
  Payload ID: 11130
  Gene Symbol: NPY1R
  Gene Name: neuropeptide Y receptor Y1
  ENST ID: ENST00000515701
  CDS Start-End: 619-799
gaaaagcagtagctgtttgttctcgaccctgggccggctctctggcgaagcaagcgagggagcagaaagctaacccgaccaggttccccacccaggactagaccgagtgctcttccgtgactactactttattagtctttattgtcttaaggcagcagtctgttgaacaagccctccccagcaaggaaggagcagagaattatgtaattcatttagataagctagcagtaactttgggaggctgtatgtaacaaggctgacatttcttttccaacacaagtgaggtgaacagccagccaatcctgagtatttgaaaaaatgtatctgcagcaggttatgatcagggagctgtattttcaagtagtaacagcactgcgaagagcaagcaatgaaaggccagcattctaattggaaagaaagaagaggaaatttccctctgcaagggggctaatttgccaactggtgatattgttcagttcaagggaatgaagaattcagaataattttggtaaatggattccaatatggggaataagaataagctgaacagttgacctgctttgaagaaacatactgtccatttgtctaaaataatctataacaaccaaaccaatcaaaatgaattcaacattattttcccaggttgaaaatcattcagtccactctaatttctcagagaagaatgcccagcttctggcttttgaaaatgatgattgtcatctgcccttggccatgatatttaccttagctcttgcttatggagctgtgatcattcttggtgtctctggaaacctggcct

SEQ ID NO: 159071 - DNA, 1017 bp, Homo sapiens
  Payload ID: 11130
  Gene Symbol: NPY1R
  Gene Name: neuropeptide Y receptor Y1
  ENST ID: ENST00000509586
  CDS Start-End: 263-688
aatctttaggatctgagcaggagaaataccagcggatcttccccactctgctcccttccattcccacccttccttctttaataagcaggagcgaaaaagacaaattccaaagaggattgttcagttcaagggaatgaagaattcagaataattttggttgtcttataccactctcctcttggtgctgcagtattttggtccactttgttttatatttatttgctacttcaagatatatatacgcctaaaaaggagaaacaacatgatggacaagatgagagacaataagtacaggtccagtgaaaccaaaagaatcaatatcatgctgctctccattgtggtagcatttgcagtctgctggctccctcttaccatctttaacactgtgtttgattggaatcatcagatcattgctacctgcaaccacaatctgttattcctgctctgccacctcacagcaatgatatccacttgtgtcaaccccatattttatgggttcctgaacaaaaacttccagagagacttgcagttcttcttcaacttttgtgatttccggtctcgggatgatgattatgaaacaatagccatgtccacgatgcacacagatgtttccaaaacttctttgaagcaagcaagcccagtcgcatttaaaaaaatcaacaacaatgatgataatgaaaaaatctgaaactacttatagcctatggtcccggatgacatctgtttaaaaacaagcacaacctgcaacatactttgattacctgttctcccaaggaatggggttgaaatcatttgaaaatgactaagattttcttgtcttgctttttactgcttttgttgtagttgtcataattacatttggaacaaaaggtgtgggctttggggtcttctggaaatagttttgaccagacatctttgaagtgctttttgtgaatttatgcatataatataaagacttttatactgtacttattggaatgaaatttctttaaagtattactattaactgacttcaga

SEQ ID NO: 159072 - DNA, 559 bp, Homo sapiens
  Payload ID: 11130
  Gene Symbol: NPY1R
  Gene Name: neuropeptide Y receptor Y1
  ENST ID: ENST00000504790
  CDS Start-End: 375-559
attattgtggcgaatttcatgtttcccagcgagccctttgattcctggtttgggctggcgctcgagctctccagccgggtatgacttcggccacaagatggcactgacctgcaaacaaagaaaagcacagtggcaccgactttttcaagcctcgggaaactgccctgccttccccggagtcgaggactgtggggattagggcttcctttcccctgcgcgggagattgttcagttcaagggaatgaagaattcagaataattttggtaaatggattccaatatggggaataagaataagctgaacagttgacctgctttgaagaaacatactgtccatttgtctaaaataatctataacaaccaaaccaatcaaaatgaattcaacattattttcccaggttgaaaatcattcagtccactctaatttctcagagaagaatgcccagcttctggcttttgaaaatgatgattgtcatctgcccttggccatgatatttaccttagctcttgcttatggagctgtgatcattcttggtgtctctggaaacctggccttgat

SEQ ID NO: 159073 - DNA, 3626 bp, Homo sapiens
  Payload ID: 11131
  Gene Symbol: NPY2R
  Gene Name: neuropeptide Y receptor Y2
  Uniprot ID: P49146
  ENST ID: ENST00000329476
  CDS Start-End: 490-1635
ggcggctgagagaccctggacactgttcctgctccctcgccaccaaaacttctcctccagtcccctcccctgcaggaccatcgcccgcagcctctgcacctgttttcttgtgtttaagggtggggtttgcccccctccccacgctcccatctctgatcctcccaccttcacccgcccaccccgcgagtgagtgcggtgcccaggcgcgcttggcctgagaggtcggcagcagacccggcagcgccaaccgcccagccgctctgactgctccggctgcccgcccgcgcggcgcgggctgtcctggaccctaggaggggacggaaccggacttgcctttgggcaccttccagggccctctccaggtcggctggctaatcatcggacagacggactgcacacatcttgtttccgcgtctccgcaaaaacgcgaggtccaggtcagttgtagactcttgtgctggttgcaggccaagtggacctgtactgaaaatgggtccaataggtgcagaggctgatgagaaccagacagtggaagaaatgaaggtggaacaatacgggccacaaacaactcctagaggtgaactggtccctgaccctgagccagagcttatagatagtaccaagctgattgaggtacaagttgttctcatattggcctactgctccatcatcttgcttggggtaattggcaactccttggtgatccatgtggtgatcaaattcaagagcatgcgcacagtaaccaactttttcattgccaatctggctgtggcagatcttttggtgaacactctgtgtctaccgttcactcttacctataccttaatgggggagtggaaaatgggtcctgtcctgtgccacctggtgccctatgcccagggcctggcagtacaagtatccacaatcaccttgacagtaattgccctggaccggcacaggtgcatcgtctaccacctagagagcaagatctccaagcgaatcagcttcctgattattggcttggcctggggcatcagtgccctgctggcaagtcccctggccatcttccgggagtattcgctgattgagatcatcccggactttgagattgtggcctgtactgaaaagtggcctggcgaggagaagagcatctatggcactgtctatagtctttcttccttgttgatcttgtatgttttgcctctgggcattatatcattttcctacactcgcatttggagtaaattgaagaaccatgtcagtcctggagctgcaaatgaccactaccatcagcgaaggcaaaaaaccaccaaaatgctggtgtgtgtggtggtggtgtttgcggtcagctggctgcctctccatgccttccagcttgccgttgacattgacagccaggtcctggacctgaaggagtacaaactcatcttcacagtgttccacatcatcgccatgtgctccacttttgccaatccccttctctatggctggatgaacagcaactacagaaaggctttcctctcggccttccgctgtgagcagcggttggatgccattcactctgaggtgtccgtgacattcaaggctaaaaagaacctggaggtcagaaagaacagtggccccaatgactctttcacagaggctaccaatgtctaaggaagctgtggtgtgaaaatgtatggatgaattctgaccagagctatgaatctggttgatggcggctcacaagtgaaaactgatttcccattttaaagaagaagtggatctaaatggaagcatctgctgtttaattcctggaaaactggctgggcagagcctgtgtgaaaatactggaattcaaagataaggcaacaaaatggtttacttaacagttggttgggtagtaggttgcattatgagtaaaagcagagagaagtacttttgattattttcctggagtgaagaaaacttgaacaagaaattggtattatcaaagcattgctgagagacggtgggaaaataagttgactttcaaatcacgttaggacctggattgaggaggtgtgcagttcgctgctccctgcttggcttatgaaaacaccactgaacagaaatttctccagggagccacaggctctccttcatcgcattttgatttttttgttcattctctagacaaaatccatcagggaatgctgcaggaaacgattgccaactatacgaatggcttcgaggagataaactgaaatttgctatataattaatattttggcagatgataggggaactcctcaacactcagtgggccaattgttcttaaaaccaattgcacgtttggtgaaagtttcttcaactctgaatcaaaagctgaaattctcagaattacaggaaatgcaaaccatcatttaatttctaatttcaagttacatccgctttatggagatactatttagataacaagaatacaacttgatacttttattgttatacctttttgaacatgtatgatttctgttgttattcctattggagctaagtttgtctacactaaaatttaaatcagactagagaataatttttgtggcatgttgtaacatttcacagtatttacaagctatttttgcacaggtacatagctctcatgtatttaaagaacactgcagtgttattttctttgaaattcatcctccacggacccattcatactaaataaaacaatgtaattacattaaaatggacctatctgtaagaggtactaaaaacactggattcatttcatcttgcaaatgttgtatttcaaaccagtttcacataagttatttgtcttcttttcaaaataattagctatatttttatataatatgaatatatacataaaaattgtttctataaattgtagaacatagatgctacagtattttttatttaattatattatgaataaaattgttatttcaatagtacccaaccaaagatgcttaaaaaccttctatgttcataaaaaataacaactgagatgttaaaatagtcatacgtctttagatgctattaaagtttcattagtcatatttttgtaaatatgacagaatttgtgaatatatttttaaagcaaaaaacttcaacatgcatatgatatatagttacaacattaattttatgaactggagagctttactttgtggatatatttaaaattcatattatagctcctattaaattccttccatgatagatataaaggactggtttttaagtgcactgcacttctggaatactgaaaaagaatgaaaacaatatgttagattaggtgtaagactttaagaagcgaacaaaaagtaatgtatatctgtaatatataatcaaatgattcatttttctgttagactaggcaaattgttcaaaaataacctttttgtcttttaagtagcagtcactttgcttaagatgctaatagaaaactgtggttaaagatttaccctccctcttggtgaattattacactgtaagaaatgtatatgctactgtgttacatgttgtattagtaaattattagaatccaattaatgattcaattaacatatatcttatccaattcattatgtcaattcattaataaaataccttttatgtagaggctttatgttgcaattaaaaagttgggaaaatga

SEQ ID NO: 159074 - DNA, 3518 bp, Homo sapiens
  Payload ID: 11131
  Gene Symbol: NPY2R
  Gene Name: neuropeptide Y receptor Y2
  Uniprot ID: P49146
  ENST ID: ENST00000506608
  CDS Start-End: 380-1525
cttgtgtttaagggtggggtttgcccccctccccacgctcccatctctgatcctcccaccttcacccgcccaccccgcgagtgagtgcggtgcccaggcgcgcttggcctgagaggtcggcagcagacccggcagcgccaaccgcccagccgctctgactgctccggctgcccgcccgcgcggcgcgggctgtcctggaccctaggaggggacggaaccggacttgcctttgggcaccttccagggccctctccaggtcggctggctaatcatcggacagacggactgcacacatcttgtttccgcgtctccgcaaaaacgcgaggtccaggttgtagactcttgtgctggttgcaggccaagtggacctgtactgaaaatgggtccaataggtgcagaggctgatgagaaccagacagtggaagaaatgaaggtggaacaatacgggccacaaacaactcctagaggtgaactggtccctgaccctgagccagagcttatagatagtaccaagctgattgaggtacaagttgttctcatattggcctactgctccatcatcttgcttggggtaattggcaactccttggtgatccatgtggtgatcaaattcaagagcatgcgcacagtaaccaactttttcattgccaatctggctgtggcagatcttttggtgaacactctgtgtctaccgttcactcttacctataccttaatgggggagtggaaaatgggtcctgtcctgtgccacctggtgccctatgcccagggcctggcagtacaagtatccacaatcaccttgacagtaattgccctggaccggcacaggtgcatcgtctaccacctagagagcaagatctccaagcgaatcagcttcctgattattggcttggcctggggcatcagtgccctgctggcaagtcccctggccatcttccgggagtattcgctgattgagatcatcccggactttgagattgtggcctgtactgaaaagtggcctggcgaggagaagagcatctatggcactgtctatagtctttcttccttgttgatcttgtatgttttgcctctgggcattatatcattttcctacactcgcatttggagtaaattgaagaaccatgtcagtcctggagctgcaaatgaccactaccatcagcgaaggcaaaaaaccaccaaaatgctggtgtgtgtggtggtggtgtttgcggtcagctggctgcctctccatgccttccagcttgccgttgacattgacagccaggtcctggacctgaaggagtacaaactcatcttcacagtgttccacatcatcgccatgtgctccacttttgccaatccccttctctatggctggatgaacagcaactacagaaaggctttcctctcggccttccgctgtgagcagcggttggatgccattcactctgaggtgtccgtgacattcaaggctaaaaagaacctggaggtcagaaagaacagtggccccaatgactctttcacagaggctaccaatgtctaaggaagctgtggtgtgaaaatgtatggatgaattctgaccagagctatgaatctggttgatggcggctcacaagtgaaaactgatttcccattttaaagaagaagtggatctaaatggaagcatctgctgtttaattcctggaaaactggctgggcagagcctgtgtgaaaatactggaattcaaagataaggcaacaaaatggtttacttaacagttggttgggtagtaggttgcattatgagtaaaagcagagagaagtacttttgattattttcctggagtgaagaaaacttgaacaagaaattggtattatcaaagcattgctgagagacggtgggaaaataagttgactttcaaatcacgttaggacctggattgaggaggtgtgcagttcgctgctccctgcttggcttatgaaaacaccactgaacagaaatttctccagggagccacaggctctccttcatcgcattttgatttttttgttcattctctagacaaaatccatcagggaatgctgcaggaaacgattgccaactatacgaatggcttcgaggagataaactgaaatttgctatataattaatattttggcagatgataggggaactcctcaacactcagtgggccaattgttcttaaaaccaattgcacgtttggtgaaagtttcttcaactctgaatcaaaagctgaaattctcagaattacaggaaatgcaaaccatcatttaatttctaatttcaagttacatccgctttatggagatactatttagataacaagaatacaacttgatacttttattgttatacctttttgaacatgtatgatttctgttgttattcctattggagctaagtttgtctacactaaaatttaaatcagactagagaataatttttgtggcatgttgtaacatttcacagtatttacaagctatttttgcacaggtacatagctctcatgtatttaaagaacactgcagtgttattttctttgaaattcatcctccacggacccattcatactaaataaaacaatgtaattacattaaaatggacctatctgtaagaggtactaaaaacactggattcatttcatcttgcaaatgttgtatttcaaaccagtttcacataagttatttgtcttcttttcaaaataattagctatatttttatataatatgaatatatacataaaaattgtttctataaattgtagaacatagatgctacagtattttttatttaattatattatgaataaaattgttatttcaatagtacccaaccaaagatgcttaaaaaccttctatgttcataaaaaataacaactgagatgttaaaatagtcatacgtctttagatgctattaaagtttcattagtcatatttttgtaaatatgacagaatttgtgaatatatttttaaagcaaaaaacttcaacatgcatatgatatatagttacaacattaattttatgaactggagagctttactttgtggatatatttaaaattcatattatagctcctattaaattccttccatgatagatataaaggactggtttttaagtgcactgcacttctggaatactgaaaaagaatgaaaacaatatgttagattaggtgtaagactttaagaagcgaacaaaaagtaatgtatatctgtaatatataatcaaatgattcatttttctgttagactaggcaaattgttcaaaaataacctttttgtcttttaagtagcagtcactttgcttaagatgctaatagaaaactgtggttaaagatttaccctccctcttggtgaattattacactgtaagaaatgtatatgctactgtgttacatgttgtattagtaaattattagaatccaattaatgattcaattaacatatatcttatccaattcattatgtcaattcattaataaaataccttttatgtagaggctttatgttgcaattaaaaagttgggaaaatgaga

SEQ ID NO: 159075 - DNA, 1956 bp, Homo sapiens
  Payload ID: 11132
  Gene Symbol: NPY4R
  Gene Name: neuropeptide Y receptor Y4
  Uniprot ID: P50391
  ENST ID: ENST00000374312
  CDS Start-End: 420-1547
gggcacaggagtgcggccgggggcggggccgagtgggccccggtacgaaccctccgggaagccgggcgcgctgcctgcccttggcccggggcgcagagcgtcacactggatctggggagcatcctacccccactgtggacctcagtctcctcacctgagacatgggcggccccatccgcaccctgtaagccgcaagccaaggagattcctggcccccatcctggattcacttaactacatctcctggtggaagggccctgggatctgcactttcaacatgcttctagaatgattctgatgtttactgaaggttgagaactgcaaccctgtgggattaataatgactagagaatctgagaggcgtcatccctcaagtgtatcacttagttcaagagtcctggaatcttttcacatccactatgaacacctctcacctcctggccttgctgctcccaaaatctccacaaggtgaaaacagaagcaaacccctgggcaccccatacaacttctctgaacattgccaggattccgtggacgtgatggtcttcatcgtcacttcctacagcattgagactgtcgtgggggtcctgggtaacctctgcctgatgtgtgtgactgtgaggcagaaggagaaagccaacgtgaccaacctgcttatcgccaacctggccttctctgacttcctcatgtgcctcctctgccagccgctgaccgccgtctacaccatcatggactactggatctttggagagaccctctgcaagatgtcggccttcatccagtgcatgtcggtgacggtctccatcctctcgctcgtcctcgtggccctggagaggcatcagctcatcatcaacccaacaggctggaagcccagcatctcacaggcctacctggggattgtgctcatctgggtcattgcctgtgtcctctccctgcccttcctggccaacagcatcctggagaatgtcttccacaagaaccactccaaggctctggagttcctggcggataaggtggtctgtaccgagtcctggccactggctcaccaccgcaccatctacaccaccttcctgctcctcttccagtactgcctcccactgggcttcatcttggtctgttatgcacgcatctaccggtgcctgcagaggcaggggcgcgtgtttcacaagggcacctacagcttgcgagctgggcacatgaagcaggtcaatgtggtgctggtggtgatggtggtggcctttgccgtgctctggctgcctctgcatgtgttcaacagcctggaagactggcaccatgaggccatccccatctgccatgggaacctcatcttcttagtgtgccacttgcttgccatggcctccacctgtgtcaacccattcatctatggctttctcaacaccaacttcaagaaggagatcaaggccctggtgctgacttgccagcagagcgcccccctggaggagtcagagcatctgcccctgtccacagtacatacggaagtctccaaagggtccctgaggctaagtggcaggtccaatcccatttaaccaggtctaggtcttctccctgccatgtcccttgccaggctcttccacttagctaagtgggcacactgcaagctggggtggcaccccagcattcctggctttctggggtccagataggctggcaagagctgtttttgcatccatttgcatcgtgaagactggcattttgatacttcagctgtttgttcctgggagaattctgagcacagattccagaggtcacagtaagccttgcagcttgagctgaaagatgccagagccggagatgtctgctggcagcaggcagggttcattctggtgacacagcaacagatgcctggcctgggaacccagggatttcacctccaccagtgagaccacggggccactgtggggtgagggaaggagcgcttggagtcagagctctaga

SEQ ID NO: 159076 - DNA, 1622 bp, Homo sapiens
  Payload ID: 11132
  Gene Symbol: NPY4R
  Gene Name: neuropeptide Y receptor Y4
  Uniprot ID: P50391
  ENST ID: ENST00000395716
  CDS Start-End: 86-1213
ttaataatgactagagaatctgagaggcgtcatccctcaagtgtatcacttagttcaagagtcctggaatcttttcacatccactatgaacacctctcacctcctggccttgctgctcccaaaatctccacaaggtgaaaacagaagcaaacccctgggcaccccatacaacttctctgaacattgccaggattccgtggacgtgatggtcttcatcgtcacttcctacagcattgagactgtcgtgggggtcctgggtaacctctgcctgatgtgtgtgactgtgaggcagaaggagaaagccaacgtgaccaacctgcttatcgccaacctggccttctctgacttcctcatgtgcctcctctgccagccgctgaccgccgtctacaccatcatggactactggatctttggagagaccctctgcaagatgtcggccttcatccagtgcatgtcggtgacggtctccatcctctcgctcgtcctcgtggccctggagaggcatcagctcatcatcaacccaacaggctggaagcccagcatctcacaggcctacctggggattgtgctcatctgggtcattgcctgtgtcctctccctgcccttcctggccaacagcatcctggagaatgtcttccacaagaaccactccaaggctctggagttcctggcggataaggtggtctgtaccgagtcctggccactggctcaccaccgcaccatctacaccaccttcctgctcctcttccagtactgcctcccactgggcttcatcttggtctgttatgcacgcatctaccggtgcctgcagaggcaggggcgcgtgtttcacaagggcacctacagcttgcgagctgggcacatgaagcaggtcaatgtggtgctggtggtgatggtggtggcctttgccgtgctctggctgcctctgcatgtgttcaacagcctggaagactggcaccatgaggccatccccatctgccatgggaacctcatcttcttagtgtgccacttgcttgccatggcctccacctgtgtcaacccattcatctatggctttctcaacaccaacttcaagaaggagatcaaggccctggtgctgacttgccagcagagcgcccccctggaggagtcagagcatctgcccctgtccacagtacatacggaagtctccaaagggtccctgaggctaagtggcaggtccaatcccatttaaccaggtctaggtcttctccctgccatgtcccttgccaggctcttccacttagctaagtgggcacactgcaagctggggtggcaccccagcattcctggctttctggggtccagataggctggcaagagctgtttttgcatccatttgcatcgtgaagactggcattttgatacttcagctgtttgttcctgggagaattctgagcacagattccagaggtcacagtaagccttgcagcttgagctgaaagatgccagagccggagatgtctgctggcagcaggcagggttcattctggtgacacagcaacagatgcctggcctgggaacccagggatttcacctccaccagtgagaccacggggccactgtggggtgagggaaggagcgcttggagtcagagctctaga

SEQ ID NO: 159077 - DNA, 1800 bp, Homo sapiens
  Payload ID: 11132
  Gene Symbol: NPY4R
  Gene Name: neuropeptide Y receptor Y4
  Uniprot ID: P50391
  ENST ID: ENST00000612632
  CDS Start-End: 264-1391
gggcacaggagtgcggccgggggcggggccgagtgggccccggtacgaaccctccgggaagccgggcgcgctgcctgcccttggcccggggcgcagagcgtcacactggatctggggagcatcctacccccactgtggacctcagtctcctcacctgagacatgggcggccccatccgcaccctgtaagccgcaagccaaggaggcgtcatccctcaagtgtatcacttagttcaagagtcctggaatcttttcacatccactatgaacacctctcacctcctggccttgctgctcccaaaatctccacaaggtgaaaacagaagcaaacccctgggcaccccatacaacttctctgaacattgccaggattccgtggacgtgatggtcttcatcgtcacttcctacagcattgagactgtcgtgggggtcctgggtaacctctgcctgatgtgtgtgactgtgaggcagaaggagaaagccaacgtgaccaacctgcttatcgccaacctggccttctctgacttcctcatgtgcctcctctgccagccgctgaccgccgtctacaccatcatggactactggatctttggagagaccctctgcaagatgtcggccttcatccagtgcatgtcggtgacggtctccatcctctcgctcgtcctcgtggccctggagaggcatcagctcatcatcaacccaacaggctggaagcccagcatctcacaggcctacctggggattgtgctcatctgggtcattgcctgtgtcctctccctgcccttcctggccaacagcatcctggagaatgtcttccacaagaaccactccaaggctctggagttcctggcggataaggtggtctgtaccgagtcctggccactggctcaccaccgcaccatctacaccaccttcctgctcctcttccagtactgcctcccactgggcttcatcttggtctgttatgcacgcatctaccggtgcctgcagaggcaggggcgcgtgtttcacaagggcacctacagcttgcgagctgggcacatgaagcaggtcaatgtggtgctggtggtgatggtggtggcctttgccgtgctctggctgcctctgcatgtgttcaacagcctggaagactggcaccatgaggccatccccatctgccatgggaacctcatcttcttagtgtgccacttgcttgccatggcctccacctgtgtcaacccattcatctatggctttctcaacaccaacttcaagaaggagatcaaggccctggtgctgacttgccagcagagcgcccccctggaggagtcagagcatctgcccctgtccacagtacatacggaagtctccaaagggtccctgaggctaagtggcaggtccaatcccatttaaccaggtctaggtcttctccctgccatgtcccttgccaggctcttccacttagctaagtgggcacactgcaagctggggtggcaccccagcattcctggctttctggggtccagataggctggcaagagctgtttttgcatccatttgcatcgtgaagactggcattttgatacttcagctgtttgttcctgggagaattctgagcacagattccagaggtcacagtaagccttgcagcttgagctgaaagatgccagagccggagatgtctgctggcagcaggcagggttcattctggtgacacagcaacagatgcctggcctgggaacccagggatttcacctccaccagtgagaccacggggccactgtggggtgagggaaggagcgcttggagtcagagctctaga

SEQ ID NO: 159078 - DNA, 1843 bp, Homo sapiens
  Payload ID: 11133
  Gene Symbol: NPY5R
  Gene Name: neuropeptide Y receptor Y5
  Uniprot ID: Q15761
  ENST ID: ENST00000338566
  CDS Start-End: 183-1520
agcgatcgcgctgggccgcgctcccgggagcccagggcctgcagcggccggggcgccccgaggtctgctcattgtgtttttcaggaaaaaggaagggaaagggtgttacaaggaaaggctatcggtaacaactgacctgccacaaagttagaagaaaggattgattcaagaaagactataatatggatttagagctcgacgagtattataacaagacacttgccacagagaataatactgctgccactcggaattctgatttcccagtctgggatgactataaaagcagtgtagatgacttacagtattttctgattgggctctatacatttgtaagtcttcttggctttatggggaatctacttattttaatggctctcatgaaaaagcgtaatcagaagactacggtaaacttcctcataggcaatctggccttttctgatatcttggttgtgctgttttgctcacctttcacactgacgtctgtcttgctggatcagtggatgtttggcaaagtcatgtgccatattatgccttttcttcaatgtgtgtcagttttggtttcaactttaattttaatatcaattgccattgtcaggtatcatatgataaaacatcccatatctaataatttaacagcaaaccatggctactttctgatagctactgtctggacactaggttttgccatctgttctccccttccagtgtttcacagtcttgtggaacttcaagaaacatttggttcagcattgctgagcagcaggtatttatgtgttgagtcatggccatctgattcatacagaattgcctttactatctctttattgctagttcagtatattctgcccttagtttgtcttactgtaagtcatacaagtgtctgcagaagtataagctgtggattgtccaacaaagaaaacagacttgaagaaaatgagatgatcaacttaactcttcatccatccaaaaagagtgggcctcaggtgaaactctctggcagccataaatggagttattcattcatcaaaaaacacagaagaagatatagcaagaagacagcatgtgtgttacctgctccagaaagaccttctcaagagaaccactccagaatacttccagaaaactttggctctgtaagaagtcagctctcttcatccagtaagttcataccaggggtccccacttgctttgagataaaacctgaagaaaattcagatgttcatgaattgagagtaaaacgttctgttacaagaataaaaaagagatctcgaagtgttttctacagactgaccatactgatattagtatttgctgttagttggatgccactacaccttttccatgtggtaactgattttaatgacaatcttatttcaaataggcatttcaagttggtgtattgcatttgtcatttgttgggcatgatgtcctgttgtcttaatccaattctatatgggtttcttaataatgggattaaagctgatttagtgtcccttatacactgtcttcatatgtaataattctcactgtttaccaaggaaagaacaaatgctggggtcatataaaatatatttatgataactatttacatataataaatagaaattttgttaacatggaatttaatttatgtgaaagagttctggattcaaatgtcagttcataatatatggaagataattttatgtgttatagtaggattaatttatttagttgtgcagtcagtgtcaatccaatctgtaatttcactttagaaggttgtattaccttccacttccatgttgtcttataaacaaatgaattgtattttttgttgaaagtaaaagttatatctaaccaa

SEQ ID NO: 159079 - DNA, 1418 bp, Homo sapiens
  Payload ID: 11133
  Gene Symbol: NPY5R
  Gene Name: neuropeptide Y receptor Y5
  Uniprot ID: Q15761
  ENST ID: ENST00000506953
  CDS Start-End: 56-1393
gtaatgtttttttggttgctgacaaatgtctttttattccaagcaggactataatatggatttagagctcgacgagtattataacaagacacttgccacagagaataatactgctgccactcggaattctgatttcccagtctgggatgactataaaagcagtgtagatgacttacagtattttctgattgggctctatacatttgtaagtcttcttggctttatggggaatctacttattttaatggctctcatgaaaaagcgtaatcagaagactacggtaaacttcctcataggcaatctggccttttctgatatcttggttgtgctgttttgctcacctttcacactgacgtctgtcttgctggatcagtggatgtttggcaaagtcatgtgccatattatgccttttcttcaatgtgtgtcagttttggtttcaactttaattttaatatcaattgccattgtcaggtatcatatgataaaacatcccatatctaataatttaacagcaaaccatggctactttctgatagctactgtctggacactaggttttgccatctgttctccccttccagtgtttcacagtcttgtggaacttcaagaaacatttggttcagcattgctgagcagcaggtatttatgtgttgagtcatggccatctgattcatacagaattgcctttactatctctttattgctagttcagtatattctgcccttagtttgtcttactgtaagtcatacaagtgtctgcagaagtataagctgtggattgtccaacaaagaaaacagacttgaagaaaatgagatgatcaacttaactcttcatccatccaaaaagagtgggcctcaggtgaaactctctggcagccataaatggagttattcattcatcaaaaaacacagaagaagatatagcaagaagacagcatgtgtgttacctgctccagaaagaccttctcaagagaaccactccagaatacttccagaaaactttggctctgtaagaagtcagctctcttcatccagtaagttcataccaggggtccccacttgctttgagataaaacctgaagaaaattcagatgttcatgaattgagagtaaaacgttctgttacaagaataaaaaagagatctcgaagtgttttctacagactgaccatactgatattagtatttgctgttagttggatgccactacaccttttccatgtggtaactgattttaatgacaatcttatttcaaataggcatttcaagttggtgtattgcatttgtcatttgttgggcatgatgtcctgttgtcttaatccaattctatatgggtttcttaataatgggattaaagctgatttagtgtcccttatacactgtcttcatatgtaataattctcactgtttaccaaggaaa

SEQ ID NO: 159080 - DNA, 3183 bp, Homo sapiens
  Payload ID: 11133
  Gene Symbol: NPY5R
  Gene Name: neuropeptide Y receptor Y5
  Uniprot ID: Q15761
  ENST ID: ENST00000515560
  CDS Start-End: 1523-2860
ccctgggagcccgcacccgtctctggtgccagggcgttgtcgggggtcccaagagagcggggtggggaaggtgaagggagcgcggctggaaaaatggggattagggtggcggaacaggcacttgtcaggagtgaagagacagcggagagggtactgggctgaattctttcgtgccgagcaggtccctccggttcccaactcacccgggtggagcaggcgcgggccgaacccgggaggagagtgtcggggatccgcgaaggagcctcctggggatggggcgggggatggacaaagcgctgcccccggctggacgcgctctggctgcagcccggctggcatccggagctgggaacagcagcccgcggggtgcccgggtcagggctcaaccctagcgggtctctggcgaggccgggggcgcagcccgcggggcgccactcaggccgtccagctgccgcgcggtccagcgctgacccgagcccgggaggcagctgcgctctaaggtttgcgctcctgtttgcgaggtgtcttcatataacaaatgcgagcaataacaaacatccatagaactcgaattccagaaacgggaattcttttttccaagttcacagacctttagttaatcttttaaaggaactgaggcgttgtgttggaccaaagccaaaacgattttaccttagaccatggaaaatagcctaaggctctttcagcagaattttgcagtccgaatgcaattttagatttcagatttctcaagggaagagaaactctgctgttagaatttggaagggagggtggtgcatgcctgtgtgtttgtcagctgagcagagctgtatttatctttccaattcaaattgtgccagattctggctttaagaacaaaccatgggaatatttgagaacatggaatcatgctgctgttccacgatcacagcaaaacagacaatagttgatattgtatcattgcaggaggaaaaagaattacatatattttattcttttgtgtgattgtcatcctttgtgaaaagaatgatgtgtattttcataaagcaaaaaattattcaaacaaagaaaccttatttaaatgtacaagtcagacttttaatatcctttgaattccctgcagttcctcctattattcttgagaactatctactttcttaaaatacttaaaatctattcagaaggtttcatttgtctaggtgtcagatatagaagagtttataagaaaattccagtaaacctttaaaaagatattattttttataagttgccatagtttaataaagaacttttatttttcacactttttactcagagattaaagttctgtgtttcagcctggaaattctgatggtgggagatacaactaatacaaaagagaatgagtaaatatagtaattaggtctgctcattgtgtttttcaggaaaaaggaagggaaagggtgttacaaggaaaggctatcggtaacaactgacctgccacaaagttagaagaaaggattgattcaagaaagactataatatggatttagagctcgacgagtattataacaagacacttgccacagagaataatactgctgccactcggaattctgatttcccagtctgggatgactataaaagcagtgtagatgacttacagtattttctgattgggctctatacatttgtaagtcttcttggctttatggggaatctacttattttaatggctctcatgaaaaagcgtaatcagaagactacggtaaacttcctcataggcaatctggccttttctgatatcttggttgtgctgttttgctcacctttcacactgacgtctgtcttgctggatcagtggatgtttggcaaagtcatgtgccatattatgccttttcttcaatgtgtgtcagttttggtttcaactttaattttaatatcaattgccattgtcaggtatcatatgataaaacatcccatatctaataatttaacagcaaaccatggctactttctgatagctactgtctggacactaggttttgccatctgttctccccttccagtgtttcacagtcttgtggaacttcaagaaacatttggttcagcattgctgagcagcaggtatttatgtgttgagtcatggccatctgattcatacagaattgcctttactatctctttattgctagttcagtatattctgcccttagtttgtcttactgtaagtcatacaagtgtctgcagaagtataagctgtggattgtccaacaaagaaaacagacttgaagaaaatgagatgatcaacttaactcttcatccatccaaaaagagtgggcctcaggtgaaactctctggcagccataaatggagttattcattcatcaaaaaacacagaagaagatatagcaagaagacagcatgtgtgttacctgctccagaaagaccttctcaagagaaccactccagaatacttccagaaaactttggctctgtaagaagtcagctctcttcatccagtaagttcataccaggggtccccacttgctttgagataaaacctgaagaaaattcagatgttcatgaattgagagtaaaacgttctgttacaagaataaaaaagagatctcgaagtgttttctacagactgaccatactgatattagtatttgctgttagttggatgccactacaccttttccatgtggtaactgattttaatgacaatcttatttcaaataggcatttcaagttggtgtattgcatttgtcatttgttgggcatgatgtcctgttgtcttaatccaattctatatgggtttcttaataatgggattaaagctgatttagtgtcccttatacactgtcttcatatgtaataattctcactgtttaccaaggaaagaacaaatgctggggtcatataaaatatatttatgataactatttacatataataaatagaaattttgttaacatggaatttaatttatgtgaaagagttctggattcaaatgtcagttcataatatatggaagataattttatgtgttatagtaggattaatttatttagttgtgcagtcagtgtcaatccaatctgtaatttcactttagaaggttgtattaccttccacttccatgttgtcttataaacaaatgaattgtattttttgttgaaagtaaaagttatatctaaccaa

SEQ ID NO: 159081 - DNA, 2687 bp, Homo sapiens
  Payload ID: 11134
  Gene Symbol: NPBWR1
  Gene Name: neuropeptides B/W receptor 1
  Uniprot ID: P48145
  ENST ID: ENST00000331251
  CDS Start-End: 1478-2464
ttggaaataaccaatatttagtttatttcattcgattcttaggggaactggtgaggagcctaagatgattttcccttcctagagaaagaatccaaagtccagggaaatagcgacaggggagttcaagactgcccctgctagtccttccttggctactctccgctgcgatcgcaggatagctctcattagcaggagaatcgggcaagtgtgtggataagtagagagtgtgttgaacaacttgtaacgttttatgaaatacgcattgtcatggttccctaaaaggctttgcggaagccgtttgtctttactaatcaagtctttacttacacaaaagtagaagtagaagtagttttagaaaacatactaacaatcttctatccccttgaagaccagagtagcagaaaacaggtgatttgcattataaaattgcactcactttttcctcctttcagatttcacattacattagcctatttgtgttacggtgtataaaaaatggaacaggcgcctccactacattgttctcctttaaaaatagatcacttacaccctaactttgttttccttaaattcgattcttaacaggagagctttctattatttcagatggagtgaggttgcacgactgggatggaagaaaggaatcccttaaatttgggggaatttctgttctctgttctaagaccattttacttggggtgtgggggtgggcgcggcggtcagggcagtggaacgcagtcgcggctgcgccatccctgcacttccaggcgcgcgggagggaccggcggggacgcgagctgcggactctggcgaactcgggggaggcagacagggggaggcggacacccagccggcaggcgtctcagcctccccgcagccggcgggcttttctcctgacagctccaggaaaggcagaccccttccccagccagccaggtaaggtaaagactgctgttgagcttgctgttactgagggcgcacagaccctggggagaccgaagcttgccactgcgggattctgtggggtaacctgggtctacggaagtttcctgaaagaggggagaagggtttgcatttttcctatggaggattcttctctctctagcatttcgtttgatgtattcaactggtagaagtgagatttcaacaggtagcagagagcgctcacgtggaggaggtttggggcgccgcggcgccacccccacccctcctcgggaccgcgcctatttctaaagttacacgtcgacgaactaacctatgctttaaattcctctttccagccccgtgagtccgcggcgacattgggccgtggggtggctgggaacggtcccctcctccggaaaaaccagagaacggcttggagagctgaaacgagcgtccgcgagcaggtccgtgcagaaccgggcttcaggaccgctgagctccgtagggcgtccttgggggacgccaggtcgccggctcctctgccctcgttgagatggacaacgcctcgttctcggagccctggcccgccaacgcatcgggcccggacccggcgctgagctgctccaacgcgtcgactctggcgccgctgccggcgccgctggcggtggctgtaccagttgtctacgcggtgatctgcgccgtgggtctggcgggcaactccgccgtgctgtacgtgttgctgcgggcgccccgcatgaagaccgtcaccaacctgttcatcctcaacctggccatcgccgacgagctcttcacgctggtgctgcccatcaacatcgccgacttcctgctgcggcagtggcccttcggggagctcatgtgcaagctcatcgtggctatcgaccagtacaacaccttctccagcctctacttcctcaccgtcatgagcgccgaccgctacctggtggtgttggccactgcggagtcgcgccgggtggccggccgcacctacagcgccgcgcgcgcggtgagcctggccgtgtgggggatcgtcacactcgtcgtgctgcccttcgcagtcttcgcccggctagacgacgagcagggccggcgccagtgcgtgctagtctttccgcagcccgaggccttctggtggcgcgcgagccgcctctacacgctcgtgctgggcttcgccatccccgtgtccaccatctgtgtcctctataccaccctgctgtgccggctgcatgccatgcggctggacagccacgccaaggccctggagcgcgccaagaagcgggtgaccttcctggtggtggcaatcctggcggtgtgcctcctctgctggacgccctaccacctgagcaccgtggtggcgctcaccaccgacctcccgcagacgccgctggtcatcgctatctcctacttcatcaccagcctgagctacgccaacagctgcctcaaccccttcctctacgccttcctggacgccagcttccgcaggaacctccgccagctgataacttgccgcgcggcagcctgactcccccagcgtccggctccgcaactgcccgccactcctggccagcgagggaggagccggcgccagagtgcgggaccagacaggccgcctaggcctcctggggaaaccgactcgcgccccatacccgacctagcagatcggaagcgctgcgactgtgcccgcaggttgaccttgccaagccctccaggtgatgcgcggccatgccgggtgaggagaactgagg

SEQ ID NO: 159082 - DNA, 1352 bp, Homo sapiens
  Payload ID: 11135
  Gene Symbol: NPBWR2
  Gene Name: neuropeptides B/W receptor 2
  Uniprot ID: P48146
  ENST ID: ENST00000369768
  CDS Start-End: 341-1342
ggcagggacggatccacatctcttcccaggagggtggccagcagctgctctctgcgggaggagggaactgatctgctgaagtctcaccaggaagaggcgggaggaggcccccacacaccccaccaggctccctctggccccatgtccttgacctggcaaagtggccgcagtctctgccagagaacctggagtggctgtgccctaacagacggccggatctcaaagtctctggttgtttttctttcctagaatccagcccaaggaggcccccaaccagatacccaactccaaggcacctcccacctgcccagggcgcaaatcgtcaacggtcccagctacaatgcaggccgctgggcacccagagccccttgacagcaggggctccttctccctccccacgatgggtgccaacgtctctcaggacaatggcactggccacaatgccaccttctccgagccactgccgttcctctatgtgctcctgcccgccgtgtactccgggatctgtgctgtggggctgactggcaacacggccgtcatccttgtaatcctaagggcgcccaagatgaagacggtgaccaacgtgttcatcctgaacctggccgtcgccgacgggctcttcacgctggtactgcccgtcaacatcgcggagcacctgctgcagtactggcccttcggggagctgctctgcaagctggtgctggccgtcgaccactacaacatcttctccagcatctacttcctagccgtgatgagcgtggaccgatacctggtggtgctggccaccgtgaggtcccgccacatgccctggcgcacctaccggggggcgaaggtcgccagcctgtgtgtctggctgggcgtcacggtcctggttctgcccttcttctctttcgctggcgtctacagcaacgagctgcaggtcccaagctgtgggctgagcttcccgtggcccgagcaggtctggttcaaggccagccgtgtctacacgttggtcctgggcttcgtgctgcccgtgtgcaccatctgtgtgctctacacagacctcctgcgcaggctgcgggccgtgcggctccgctctggagccaaggctctaggcaaggccaggcggaaggtgaccgtcctggtcctcgtcgtgctggccgtgtgcctcctctgctggacgcccttccacctggcctctgtcgtggccctgaccacggacctgccccagaccccactggtcatcagtatgtcctacgtcatcaccagcctcagctacgccaactcgtgcctgaaccccttcctctacgcctttctagatgacaacttccggaagaacttccgcagcatattgcggtgctgaagggcctggg

SEQ ID NO: 159083 - DNA, 1352 bp, Homo sapiens; identical to SEQ ID NO: 159082
  Payload ID: 11135
  Gene Symbol: NPBWR2
  Gene Name: neuropeptides B/W receptor 2
  Uniprot ID: P48146
  ENST ID: ENST00000612646
  CDS Start-End: 341-1342

SEQ ID NO: 159084 - DNA, 3058 bp, Homo sapiens
  Payload ID: 11136
  Gene Symbol: NETO1
  Gene Name: neuropilin (NRP) and tolloid (TLL)-like 1
  Uniprot ID: Q8TDF5
  ENST ID: ENST00000327305
  CDS Start-End: 659-2260
atgacggaccccttcttcctgccttcaatgcctcagcggaagatccccaagggctggagcgaggagcgctgccgctggacatcctcccggggaggctgctccgacctgctgcgcggcgcgtctgagactggggactgagccaccccgccgccgccggcgccgccgccgccgcccgctccgtcgctgccgtcggtctggactggcccccacctcgctgcgccctctccccggccccggccccggctcggggcgtcccggggctcgccctgcgaccgccgcctcccgcgcgccgcgtcctcccgaccccgcggcggcgacgatgcccgggaggagggtcctgacggcggcggcgcggatggtggcggccggcgcccgggtgtgatgcgagcgtcacggtggggatgctgctggctgcgcggcgctgagggccagcgagagcgagagcccgcccggggcggaggacggactcatccggatctggctgcagcgtgggctcggagctcccccttcctctcggtctccctctcggcccccctttatttccttcttgctttgcgtctttaacacctctcgaccctgtcctccccccgccactggaagtcttcccgtctctaaatggaattagtggagcccggagcctctggtgtaacgcacagacatgatccatgggcgcagcgtgcttcacattgtagcaagtttaatcatcctccatttgtctggggcaaccaagaaaggaacagaaaagcaaaccacctcagaaacacagaagtcagtgcagtgtggaacttggacaaaacatgcagagggaggtatctttacctctcccaactatcccagcaagtatccccctgaccgggaatgcatctacatcatagaagccgctccaagacagtgcattgaactttactttgatgaaaagtactctattgaaccgtcttgggagtgcaaatttgatcatattgaagttcgagatggaccttttggcttttctccaataattggacgtttctgtggacaacaaaatccacctgtcataaaatccagtggaagatttctatggattaaattttttgctgatggagagctggaatctatgggattttcagctcgatacaatttcacacctgatcctgactttaaggaccttggagctttgaaaccattaccagcgtgtgagtttgagatgggcggttccgaaggaattgtggagtctatacaaattatgaaggaaggcaaagctactgctagcgaggctgttgattgcaagtggtacatccgagcacctccacggtccaagatttacttacgattcttggactatgagatgcagaattcaaatgagtgcaagaggaattttgtggctgtgtatgatggaagcagttccgtggaggatttgaaagctaagttctgtagcactgtggctaatgatgtcatgctacgcacgggtcttggggtgatccgcatgtgggcagatgagggcagtcgaaacagccgatttcagatgctcttcacatcctttcaagaacctccttgtgaaggcaacacattcttctgccatagtaacatgtgtattaataatactttggtctgcaatggactccagaactgtgtgtatccttgggatgaaaatcactgtaaagagaagaggaaaaccagcctgctggaccagctgaccaacaccagtgggactgtcattggcgtgacttcctgcatcgtgatcatcctcattatcatctctgtcatcgtacagatcaaacagcctcgtaaaaagtatgtccaaaggaaatcagactttgaccagacagttttccaggaggtatttgaacctcctcattatgagttatgcactctcagagggacaggagctacagctgactttgcagatgtggcagatgactttgaaaattaccataaactgcggaggtcatcttccaaatgcattcatgaccatcactgtggatcacagctgtccagcactaaaggcagccgcagtaacctcagcacaagagatgcttctatcttgacagagatgcccacacagccaggaaaacccctcatcccacccatgaacagaagaaatatccttgtcatgaaacacagctactcgcaagatgctgcagatgcctgtgacatagatgaaatcgaagaggtgccgaccaccagtcacaggctgtccagacacgataaagccgtccagcggttctgcctcattgggtctctaagcaaacatgaatctgaatacaacacaactagggtctagaaagaaaattcaagagaagaactatttatacaaacatggggactgtgaaaagaaaattctatagtgaattgtgaaaagtggacatatttctaaattcattccactgcctttatccaaacttaagaattacagacatttgttattccttcggcaagacatccccgctgcacactgatatgttcatttcgtaatttggttgctggccaccaagtgctccttagtttttaaatacattttgagattaactggaaacttgaagaagaaattagttcccgattaagactatcccaactttatttttattgtcagtttcacttttgtttctatgttgttttatgtctttgttatataattgtacattgtgtgatatgtgaaaaaaaaacacgaatttggatgaaccttgtgttacatgtacattgttttcattatatagacagcttgagaatagtgcgttcctgaatgattttgaacatgctacagtgaaaagtgacagtgtggaccatggaatcaccagctagaggttatggactatacacacctattattatattctgattaaatacaggaaaaagtaacaagtaaaattactagattgcaataaaaaaattcattttttggtctttcctgtatacccctgatttcctttttgttttatatcaaagaaagtactgagtttcagaaatcctttttgaagtcaggtattttaccattcatactctacagtagaaatgtttttgattaagcactcagcaatatgaccaaattgacagtttgagaaaataccctgcatgtcagtac

SEQ ID NO: 159085 - DNA, 1849 bp, Homo sapiens
  Payload ID: 11136
  Gene Symbol: NETO1
  Gene Name: neuropilin (NRP) and tolloid (TLL)-like 1
  Uniprot ID: Q8TDF5
  ENST ID: ENST00000397929
  CDS Start-End: 103-573
acagccacactgcagtatgtcaggaacagtcatggagctgttctcattgtttgcctctccttttcctcctttttaccttctggcccctctcttcattcagagatgctggcagagccattccctaaggttgtagcaagtttaatcatcctccatttgtctggggcaaccaagaaaggaacagaaaagcaaaccacctcagaaacacagaagtcagtgcagtgtggaacttggacaaaacatgcagagggaggtatctttacctctcccaactatcccagcaagtatccccctgaccgggaatgcatctacatcatagaagccgctccaagacagtgcattgaactttactttgatgaaaagtactctattgaaccgtcttgggagtgcaaatttgatcatattgaagttcgagatggaccttttggcttttctccaataattggacgtttctgtggacaacaaaatccacctgtcataaaatccagtggaagatttctatggattaaattttttgctgatggagagctggaatctatgggattttcagctcgatacaatttcacacctgaataaaaggcaaactccttagcaggatctacagagtgtttcgtgatctctccttctccatcatctcatctctggatgctgtggtgcccagaacgttgatctaacaccatcttgaagcacacatgctgatctccaggtgcaccacgatttgtgcccttgaaaatgctgtttgctcaatctttctggagaaagtttgccacatattcggacttagtaaattagaactcctaccttgaaacccagatgaaggttcaattttccccaggattcctttcctcaccattctcctatgtgagggacttcttgtattataatcttttaatataatattatattttatgtaatattgtgttaaattatattgttttatgtaatatattattttaaatgttattttatatatgatattaaaagattataattatataatctttttcgataatttattcttgtattacaatctttttattataatagtctccactctccccaaaatattgtgaattcttcagctgaggagttttgctttagtttcttatcgccatggactgggaattaacatgtatttaacacattttgctcaaacaatcaaacagtaaaagctgaagagagcgtattattattcgcccattccgagagaaagttgaagatgactgaagaactaaaaatacataaatgaattaagtaattataaacataaatttcctgtagctccaacatgactttgatctgagtaatagtgttgtgaaatagattactacatgattttcattgcttttatattatatatagtaattaatattcagaatagttgattaactttcttaagtgtcacataatttaaaaatgaaattgctgtttgccccagatatgtttttctgtgttctttttaaatttcagtgaaattttcttatactcccttcattaaatctattatctggtttctaaacctttacctatttaatgtctcttttcctttctttctaaaaagtaactggttaaactacagttttgtcatttatgaaattttttctgttattattgtagggatagtcaatattatcattttaaggatagttaaaacttattttgcaattaatacgtattttacagtacactaatatgcatatatgttgtattttattaaaatattaaaatgttttttaaacaaaaatattgtccgaagctctaaataccagagtattgattttaaagtctgccaagacaataatacaagtaacacaactaagcctttctttaaataataaaacgagtatctaaa

SEQ ID NO: 159086 - DNA, 629 bp, Homo sapiens
  Payload ID: 11136
  Gene Symbol: NETO1
  Gene Name: neuropilin (NRP) and tolloid (TLL)-like 1
  ENST ID: ENST00000582281
  CDS Start-End: 1-11
ctagggtctagaaagaaaattcaagacagcttgagaatagtgcgttcctgaatgattttgaacatgctacagtgaaaagtgacagtgtggaccatggaatcaccagctagaggttatggactatacacacctattattatattctgattaaatacaggaaaaagtaacaagtaaaattactagattgcaataaaaaaattcattttttggtctttcctgtatacccctgatttcctttttgttttatatcaaagaaagtactgagtttcagaaatcctttttgaagtcaggtattttaccattcatactctacagtagaaatgtttttgattaagcactcagcaatatgaccaaattgacagtttgagaaaataccctgcatgtcagtactggatatttgagttgggaaaatatcctttttgttagacacattgtgaaaagcatgcattgtcaaatactgttgttactcttccatttctttatgtcatatgcttgctacttacgactttttatataaatatatataaaatgtataataatttcctaatttgagttaagagaaatgttttcttccattagagtgattaaaaaactgactcacataaatacacattttatgtcaactcttt

SEQ ID NO: 159087 - DNA, 575 bp, Homo sapiens
  Payload ID: 11136
  Gene Symbol: NETO1
  Gene Name: neuropilin (NRP) and tolloid (TLL)-like 1
  ENST ID: ENST00000579169
  CDS Start-End: 273-575
agtgcgcaggaaccccccgggggtggaggatagcgtgcagttcagggatggacacgtgcggcagagattggcccaagcgagggcgcaggtggaaagcgggagagcgcggatgatacctagtggggccagaggagtcttcctcttctaggggctcccggagctcggcgggcccctgttcgcagtacaggaggtagcagaaggcacacctgaagccagcgctggagggaagggcgagggtcagcttccacccctttccgccctggagaccgctgatgtcgctttatgggtttgtagcaagtttaatcatcctccatttgtctggggcaaccaagaaaggaacagaaaagcaaaccacctcagaaacacagaagtcagtgcagtgtggaacttggacaaaacatgcagagggaggtatctttacctctcccaactatcccagcaagtatccccctgaccgggaatgcatctacatcatagaagccgctccaagacagtgcattgaactttactttgatgaaaagtactctattgaaccgtcttgggagtgcaaatttgatcatattgaagttcgagat

SEQ ID NO: 159088 - DNA, 2357 bp, Homo sapiens
  Payload ID: 11136
  Gene Symbol: NETO1
  Gene Name: neuropilin (NRP) and tolloid (TLL)-like 1
  Uniprot ID: Q8TDF5
  ENST ID: ENST00000583169
  CDS Start-End: 285-1886
gggtgtgatgcgagcgtcacggtggggatgctgctggctgcgcggcgctgagggccagcgagagcgagagcccgcccggggcggaggacggactcatccggatctggctgcagcgtgggctcggagctcccccttcctctcggtctccctctcggcccccctttatttccttcttgctttgcgtctttaacacctctcgaccctgtcctccccccgccactggaagtcttcccgtctctaaatggaattagtggagcccggagcctctggtgtaacgcacagacatgatccatgggcgcagcgtgcttcacattgtagcaagtttaatcatcctccatttgtctggggcaaccaagaaaggaacagaaaagcaaaccacctcagaaacacagaagtcagtgcagtgtggaacttggacaaaacatgcagagggaggtatctttacctctcccaactatcccagcaagtatccccctgaccgggaatgcatctacatcatagaagccgctccaagacagtgcattgaactttactttgatgaaaagtactctattgaaccgtcttgggagtgcaaatttgatcatattgaagttcgagatggaccttttggcttttctccaataattggacgtttctgtggacaacaaaatccacctgtcataaaatccagtggaagatttctatggattaaattttttgctgatggagagctggaatctatgggattttcagctcgatacaatttcacacctgatcctgactttaaggaccttggagctttgaaaccattaccagcgtgtgagtttgagatgggcggttccgaaggaattgtggagtctatacaaattatgaaggaaggcaaagctactgctagcgaggctgttgattgcaagtggtacatccgagcacctccacggtccaagatttacttacgattcttggactatgagatgcagaattcaaatgagtgcaagaggaattttgtggctgtgtatgatggaagcagttccgtggaggatttgaaagctaagttctgtagcactgtggctaatgatgtcatgctacgcacgggtcttggggtgatccgcatgtgggcagatgagggcagtcgaaacagccgatttcagatgctcttcacatcctttcaagaacctccttgtgaaggcaacacattcttctgccatagtaacatgtgtattaataatactttggtctgcaatggactccagaactgtgtgtatccttgggatgaaaatcactgtaaagagaagaggaaaaccagcctgctggaccagctgaccaacaccagtgggactgtcattggcgtgacttcctgcatcgtgatcatcctcattatcatctctgtcatcgtacagatcaaacagcctcgtaaaaagtatgtccaaaggaaatcagactttgaccagacagttttccaggaggtatttgaacctcctcattatgagttatgcactctcagagggacaggagctacagctgactttgcagatgtggcagatgactttgaaaattaccataaactgcggaggtcatcttccaaatgcattcatgaccatcactgtggatcacagctgtccagcactaaaggcagccgcagtaacctcagcacaagagatgcttctatcttgacagagatgcccacacagccaggaaaacccctcatcccacccatgaacagaagaaatatccttgtcatgaaacacagctactcgcaagatgctgcagatgcctgtgacatagatgaaatcgaagaggtgccgaccaccagtcacaggctgtccagacacgataaagccgtccagcggttctgcctcattgggtctctaagcaaacatgaatctgaatacaacacaactagggtctagaaagaaaattcaagatgaggaaactgaagagttttagtaacttttttaagattacacaataaacaatgatgaatcaagctttgaagccaacctcaccaaccacaagatcaaccaacactcttcaccaatgtgtaatataaccacgttaatattcaacatagtacgtactgctgaaagaagttgatacttattcatattaaccccgtagttttgtgtttcctcatctgtaaaagtatgtattataacaccttctctccaccttacagcgtgtgaggttcaaatgaccattcattggaagatattttttatatcctataatgcattataaaaataaatcatttttcctaaatcatgtgtagacttcattttatgatcgacatggaacaaaagtatcatctataaagagtaacaatgtagagtaacccccctcagaacttgtccaccataaaatatatgactttccaaatccaa

SEQ ID NO: 159089 - DNA, 3241 bp, Homo sapiens
  Payload ID: 11137
  Gene Symbol: NETO2
  Gene Name: neuropilin (NRP) and tolloid (TLL)-like 2
  Uniprot ID: Q8NC67
  ENST ID: ENST00000303155
  CDS Start-End: 98-1654
gacggagtggggccgtcgccgccgcgccgagccgtgagcgccgagccaccgccgccgctacctcagcccttcgcgaagcgccgggcagctcgggaacatggccctggagcggctctgctcggtcctcaaagtgttgttaataacagtactggtagtggaagggattgccgtggcccaaaaaacccaagatggacaaaatattggaatcaagcatattcctgcaacccagtgtggcatttgggttcgaaccagcaatggaggtcattttgcttcgccaaattatcctgactcatatccaccaaacaaggagtgtatctacattttggaagctgctccacgtcaaagaatagagttgacctttgatgaacattattatatagaaccatcatttgagtgtcggtttgatcacttggaagttcgagatgggccatttggtttctctcctcttatagatcgttactgtggcgtgaaaagccctccattaattagatcaacagggagattcatgtggattaagtttagttctgatgaagagcttgaaggactgggatttcgagcaaaatattcatttattccagatccagactttacttacctaggagattgtcagttcgagctctcgggagctgatggaatagtgcgctctagtcaggtagaacaagaggagaaaacaaaaccaggccaagccgttgattgcatctggaccattaaagccactccaaaagctaagatttatttgaggttcctagattatcaaatggagcactcaaatgaatgcaagagaaacttcgttgcagtctatgatggaagcagttctattgaaaacctgaaggccaagttttgcagcactgtggccaatgatgtaatgcttaaaacaggaattggagtgattcgaatgtgggcagatgaaggtagtcggcttagcaggtttcgaatgctctttacttcctttgtggagcctccctgcacaagcagcactttcttttgccatagcaacatgtgcatcaataattctttagtctgtaatggtgtccaaaattgtgcatacccttgggatgaaaatcattgtaaagaaaagaaaaaagcaggagtatttgaacaaatcactaagactcatggaacaattattggcattacttcagggattgtcttggtccttctcattatttctattttagtacaagtgaaacagcctcgaaaaaaggtcatggcttgcaaaaccgcttttaataaaaccgggttccaagaagtgtttgatcctcctcattatgaactgttttcactaagggacaaagagatttctgcagacctggcagacttgtcggaagaattggacaactaccagaagatgcggcgctcctccaccgcctcccgctgcatccacgaccaccactgtgggtcgcaggcctccagcgtcaaacaaagcaggaccaacctcagttccatggaacttcctttccgaaatgactttgcacaaccacagccaatgaaaacatttaatagcaccttcaagaaaagtagttacactttcaaacagggacatgagtgccctgagcaggccctggaagaccgagtaatggaggagattccctgtgaaatttatgtcagggggcgagaagattctgcacaagcatccatatccattgacttctaatcttctgctaatggtgatgtgaattcttagggtgtgtacgtacgcagcctccagggcaccatactgtttccagcagccaacccttttctcccatcacaactacgaagaccttgatttaccgttaacctattgtatggtgatgtttttattctctcaggcagtctatatatgttaaaccaatcaaggaacttactctattcagtggaaacaataatcatctctattgcttggtgtcatttataggaagcactgccagttaaagagcattagaagaggtggttggatggagccaggctcaggctgcctcttcgttttagcaacaagaagactgctcttgactgataacagctctgtcaatattttgatgccacaataaacttgatttttctttacattccttttatttttcctttctctaaatttaatttgttttataagcctatcgttttaccatttcattttcttacataagtacaagtggttaatgtaccacatacttcagtataggcatttgttcttgagtgtgtcaaaatacagctagttactgtgccaattaagacccagttgtatttcacccatctgtttcttcttggctaatctctgtacttctgccttttaattactgggcccttattccttattttctgtgagaaataatagatgatatgatttattacctttcaattatatttttctcagttatactagaaaatttcataatcctgggatatatgtaccattgtcagctatgactaaaaatttgaaaaagataaaaatttctagcaagcctttgaagtttaccaagtatagtcacattcagtgacagcccattcattccagtaaagaatcatttcattcactttgggagaggcctataattacatttatttgcaatgtttctcttcgctagattgttacatagctcccattctgttggttttgcttacagcatatggtaaccaaggttagatgccagttaaaattccttagaaattggatgagccttgagattgcttcttaactgggacatgacatttttctagctcttatcaagaataacaacttccacttttttttaaactgcacttttgactttttttatggtataaaaacaataatttataaacataaaagctcattgtgttttttagacttttgatattatttgatactgtacaaactttattaaatcaagatgaaagacctacaggacagattcctttcagtgttcacatcagtggctttgtatgcaaatatgctgtgttggacctggacgctataacttattgtaaagaccttggaaatgtggacataagctctttctttccttttgttactgtatttagtttgtgataaatttttcactgtgtgatatttatgctctaaatcactacacaaatcccatattaaaatatacattgtacctgaccctttaatcatgttatttatgccaccaaggttgtggatcttaaggtatgtatggaaaggaactcatttatcaaattgtaagtaatacagacatgccatttaaaagaggtaaattcttgttttctatattttgttagtaaattctcaatgaaataagtt

SEQ ID NO: 159090 - DNA, 1327 bp, Homo sapiens
  Payload ID: 11137
  Gene Symbol: NETO2
  Gene Name: neuropilin (NRP) and tolloid (TLL)-like 2
  ENST ID: ENST00000562559
  CDS Start-End: 1-1096
tcttatagatcgttactgtggcgtgaaaagccctccattaattagatcaacagggagattcatgtggattaagtttagttctgatgaagagcttgaaggactgggatttcgagcaaaatattcatttattccagatccagactttacttacctaggagattgtcagttcgagctctcgggagctgatggaatagtgcgctctagtcaggtagaacaagaggagaaaacaaaaccaggccaagccgttgattgcatctggaccattaaagccactccaaaagctaagatttatttgaggttcctagattatcaaatggagcactcaaatgaatgcaagagaaacttcgttgcagtctatgatggaagcagttctattgaaaacctgaaggccaagttttgcagcactgtggccaatgatgtaatgcttaaaacaggaattggagtgattcgaatgtgggcagatgaaggtagtcggcttagcaggtttcgaatgctctttacttcctttgtggagcaaaagaaaaaagcaggagtatttgaacaaatcactaagactcatggaacaattattggcattacttcagggattgtcttggtccttctcattatttctattttagtacaagtgaaacagcctcgaaaaaaggtcatggcttgcaaaaccgcttttaataaaaccgggttccaagaagtgtttgatcctcctcattatgaactgttttcactaagggacaaagagatttctgcagacctggcagacttgtcggaagaattggacaactaccagaagatgcggcgctcctccaccgcctcccgctgcatccacgaccaccactgtgggtcgcaggcctccagcgtcaaacaaagcaggaccaacctcagttccatggaacttcctttccgaaatgactttgcacaaccacagccaatgaaaacatttaatagcaccttcaagaaaagtagttacactttcaaacagggacatgagtgccctgagcaggccctggaagaccgagtaatggaggagattccctgtgaaatttatgtcagggggcgagaagattctgcacaagcatccatatccattgacttctaatcttctgctaatggtgatgtgaattcttagggtgtgtacgtacgcagcctccagggcaccatactgtttccagcagccaacccttttctcccatcacaactacgaagaccttgatttaccgttaacctattgtatggtgatgtttttattctctcaggcagtctatatatgttaaaccaatcaaggaacttactctattcagtggaaacaataatcatctctattgcttgg

SEQ ID NO: 159091 - DNA, 7481 bp, Homo sapiens
  Payload ID: 11137
  Gene Symbol: NETO2
  Gene Name: neuropilin (NRP) and tolloid (TLL)-like 2
  Uniprot ID: Q8NC67
  ENST ID: ENST00000562435
  CDS Start-End: 386-1963
acgcggcgctcgcgctccctccttaaatgagcctgggcgccccgcgcccgccacttcagtggatcccgcgccggggccgcgggcggagctgcctgccggtcccgcgccgcgcgtccgcactcctcggccctcgggcggtcgatgggacggggcgccgcggagcaggaggcggcgcccgtcggggtgctcgggccgcgcgggagcccactgtggggctcgggcatggcgggccgcaggacctgagctctcctcaggggagcggggaggcagctgctggccggcgatggggacggagtggggccgtcgccgccgcgccgagccgtgagcgccgagccaccgccgccgctacctcagcccttcgcgaagcgccgggcagctcgggaacatggccctggagcggctctgctcggtcctcaaagtgttgttaataacagtactggtagtggaagggattgccgtggcccaaaaaacccaagatggacaaaatattggaatcaagcatattcctgcaacccagtgtggcatttgggttcgaaccagcaatggaggtcattttgcttcgccaaattatcctgactcatatccaccaaacaaggagtgtatctacattttggaagctgctccacgtcaaagaatagagttgacctttgatgaacattattatatagaaccatcatttgagtgtcggtttgatcacttggaagttcgagatgggccatttggtttctctcctcttatagatcgttactgtggcgtgaaaagccctccattaattagatcaacagggagattcatgtggattaagtttagttctgatgaagagcttgaaggactgggatttcgagcaaaatattcatttattccagatccagactttacttacctaggaggtattttaaatcccattccagattgtcagttcgagctctcgggagctgatggaatagtgcgctctagtcaggtagaacaagaggagaaaacaaaaccaggccaagccgttgattgcatctggaccattaaagccactccaaaagctaagatttatttgaggttcctagattatcaaatggagcactcaaatgaatgcaagagaaacttcgttgcagtctatgatggaagcagttctattgaaaacctgaaggccaagttttgcagcactgtggccaatgatgtaatgcttaaaacaggaattggagtgattcgaatgtgggcagatgaaggtagtcggcttagcaggtttcgaatgctctttacttcctttgtggagcctccctgcacaagcagcactttcttttgccatagcaacatgtgcatcaataattctttagtctgtaatggtgtccaaaattgtgcatacccttgggatgaaaatcattgtaaagaaaagaaaaaagcaggagtatttgaacaaatcactaagactcatggaacaattattggcattacttcagggattgtcttggtccttctcattatttctattttagtacaagtgaaacagcctcgaaaaaaggtcatggcttgcaaaaccgcttttaataaaaccgggttccaagaagtgtttgatcctcctcattatgaactgttttcactaagggacaaagagatttctgcagacctggcagacttgtcggaagaattggacaactaccagaagatgcggcgctcctccaccgcctcccgctgcatccacgaccaccactgtgggtcgcaggcctccagcgtcaaacaaagcaggaccaacctcagttccatggaacttcctttccgaaatgactttgcacaaccacagccaatgaaaacatttaatagcaccttcaagaaaagtagttacactttcaaacagggacatgagtgccctgagcaggccctggaagaccgagtaatggaggagattccctgtgaaatttatgtcagggggcgagaagattctgcacaagcatccatatccattgacttctaatcttctgctaatggtgatgtgaattcttagggtgtgtacgtacgcagcctccagggcaccatactgtttccagcagccaacccttttctcccatcacaactacgaagaccttgatttaccgttaacctattgtatggtgatgtttttattctctcaggcagtctatatatgttaaaccaatcaaggaacttactctattcagtggaaacaataatcatctctattgcttggtgtcatttataggaagcactgccagttaaagagcattagaagaggtggttggatggagccaggctcaggctgcctcttcgttttagcaacaagaagactgctcttgactgataacagctctgtcaatattttgatgccacaataaacttgatttttctttacattccttttatttttcctttctctaaatttaatttgttttataagcctatcgttttaccatttcattttcttacataagtacaagtggttaatgtaccacatacttcagtataggcatttgttcttgagtgtgtcaaaatacagctagttactgtgccaattaagacccagttgtatttcacccatctgtttcttcttggctaatctctgtacttctgccttttaattactgggcccttattccttattttctgtgagaaataatagatgatatgatttattacctttcaattatatttttctcagttatactagaaaatttcataatcctgggatatatgtaccattgtcagctatgactaaaaatttgaaaaagataaaaatttctagcaagcctttgaagtttaccaagtatagtcacattcagtgacagcccattcattccagtaaagaatcatttcattcactttgggagaggcctataattacatttatttgcaatgtttctcttcgctagattgttacatagctcccattctgttggttttgcttacagcatatggtaaccaaggttagatgccagttaaaattccttagaaattggatgagccttgagattgcttcttaactgggacatgacatttttctagctcttatcaagaataacaacttccacttttttttaaactgcacttttgactttttttatggtataaaaacaataatttataaacataaaagctcattgtgttttttagacttttgatattatttgatactgtacaaactttattaaatcaagatgaaagacctacaggacagattcctttcagtgttcacatcagtggctttgtatgcaaatatgctgtgttggacctggacgctataacttattgtaaagaccttggaaatgtggacataagctctttctttccttttgttactgtatttagtttgtgataaatttttcactgtgtgatatttatgctctaaatcactacacaaatcccatattaaaatatacattgtacctgaccctttaatcatgttatttatgccaccaaggttgtggatcttaaggtatgtatggaaaggaactcatttatcaaattgtaagtaatacagacatgccatttaaaagaggtaaattcttgttttctatattttgttagtaaattctcaatgaaataagttgaagtttcactggatttcattaacttttaaatattacatatatgtgttttctcagattagtgaaaattgtgaccttaaatttaatacacatatactgcctcagagtgctttcttgtatcaaaatttttgttttttaaaaaagtagataatatttaggagacagaaaaacctatacataatgtattcatgatttaaatttttttaagtcagcctagtttcttgttttaaaaatataacgtggaaacatgaaaagacttgatgcatataatattcaatgaactaataccagagacagctaagttttttcagtagttatgctgaataagcattttagtaggtaacttacaccagctaacatttgaacagcataataaatacttaatataacaacaactatgatcttatgatgataaaagggaagttagcatattttctatgtaaaattattcattttttaaaatagctgttaaacctatatttaatctttagattataatagcaaataatacagtatgctaaactatagtcacttgtaactacatttttgtttttgaaatttgatttctatttataaggtcttgaagaggcctacaaaatacagagcctttaaagaagacataacagtaaaatagaagtacacagttttatacgagtcaatgtagcaagtaacatttagacagtaagtttggttctgaattttctggctgctaaaacactttttgcttttcacagtaaaaaaacttatgtgcagaggctaatttcctcttgaactacagcatgagggtctgtatataggaacatttcttcagaatgtaaaaaagatgcaaaatggagacagaggttataatggtgcttcttaacccagtgaaggcacaacttaatgtcgtctaggaacattggtttagggtcagtctgtattttcagggatagaactaaagaaccagatgatcaatagctaagccagccttagcctgtcacatgttatacaccttcattgaatcatagatgggcattagatctcatttatttattaaacttctctatgcttttggaagaggtaagaatggaactaataaatcttaggcattattgccagaataatgctaattgctgtatatacagcctttaatctttgagatcagtgagaaaactttataaattgcttactaaaatgaaagccataaaatttaataacagaagacatgaaatttagcaatcttgtggaattcattacacagtattaactgtcacgcagggtaccccacacagtgtcccagtgttgaacacaaaatgcaaatctggaagggataaatatcttcaattcagaaacagcattaagtatacctgtataatactgtcaccattatcttccatctgcaattcaccgcatcatcccccaaatgcccacagatctattgcaggaaacctactaatcccaacatctaaagcatgtaggaataagatgtgatattccttttgtgtgtggggagagtgtcaatctaaacgtttaacaaaaggcaaagaatgttcacatttcacatcacaaaagagatttcaaagactcctttaacccgacagcgcttatgtcagtgtctttgtcatgtttcatagaattgttagactttaaaagaacctcctgaaagtctgcctctgaacatttgtatggttctgccaatgtctgatgagaagaatgcttccctgtttgaggagtgtgttcactgatgagaggggacgggagaagcctggttgtgatttcaggaataattctcaaaggagattatactcttattgcaaaatggggtctgctatatattgttcatgtcactttattgcaagtgacatgaattatatgacattaaaaataatatgccttgaatcacactgattagacccagaaggatcattgagtttttggtggttttaaagatccaagaaagacctatctagcccaagtgtatgaatgagaagactgaagcccacagaagtgaactcagcaccagtgtctcaagaaccccagtactctggtttttttcttttttgagacggagtctcgctctgtcgcccaggctggagtgcagtggcgcgatctcggctcactgcaagctccgcctcccgggttcacgctattctcctgcctcagtctcccaagtagctgggactacaggcgcccgacaccatgcccggctaatttcttgtatttttagtagagacggggtttcaccgtgttagccaggatagtctcaatctcctgacctcgtgatccacccgcctcggcctcccaaagtgctgggattacaggcgtgagccaccgcgcctggccttctgtttttgtttttctgtttttttgttttttgagacagagtctcgctctgtcacccaggctagagtgcagtggcgtgatctcggctcactgcaagctccgcctcccgggttcatgccattctcctgtctcagcctctcgagtagctgggactacaggcgcccgccaccatgcccggctaattttttgtatttttagtagagacggggtttcaccatgttagccaggatggtctcgatctcctgacctcgtgatccgcccgcctcggcctcccaaagtgctgggattacaggagtgagccaaggcgcccagcccagctgtacgttttaaaagtcaagcacttctgtttagcagcccatgtaagcttgtcaatcattctgaattgaaatgtaatttattctgtaatttcttcaatgcattatatttccccttttctttaaatgtatgtaacattgtgttctacagttttgctgccatgattccttggcaccgtgaattcttactaagcaatgtttgttaacagtatacaggctcgatactaggcaggaagagctcctgtgttcttgcttttttgatcttttttaaatctaaaggagacgtgtattctagaaattaaatatttgtgtgccatatctcttgagttttggagaatgattggagtttgagttactgtaaataacaagattatcttggatattttagttttctgcaaaatcacttatgttttatatacctctgctaataattcaaaactctgaatttgctttactttaactttttaaaaatgtatttttgcaattggtttaatgactaccaaagcctaaaaagctaatgactagggtgcatgtttagtatgcactgtctagtgtaagctttttaaaagcagtagatttttattagagatgaacttccaggccatatgagaatatgcttaatcctagatttggcattttatagaaaagaattttgactcttgaactagaattaaaaacttgttctgatttccttgcttgcctcaatttctaaagtctagaagtggcaaataatttagatcacttataccaacagaatctgtatttccttccggggcaaagttggcatttcctatccactagcttccaaaatacaataatcctagttatgataagggcaactttattttattacacttagaaccattttatgttttcaaattcattaatcttcaagtgaagatgaactaaagaaaaaaatgcgttttgtcccaggttgcctgcaggttgcagtctgctgcatccggtcactgaagaggcagtgaggactgtcacagagtgggctggagagccaagctgttctttcggggtgcacagtgcaccagccataacacagcttagaaacatggatgagtatacctcaagacaggtgaacacggagtggggagcaaaagaaggcagaaactcctctgagtttcacaagcatcaggcacagatcagggcacagaggaagaagaaagaaggtttaccactggtctgtctctgtaaattgttacagagcaattttactttgtgttatttaggatcaagaaacaagtgttatttaaaagttctcttaccctccaacctttgtcatact

SEQ ID NO: 159092 - DNA, 581 bp, Homo sapiens
  Payload ID: 11137
  Gene Symbol: NETO2
  Gene Name: neuropilin (NRP) and tolloid (TLL)-like 2
  ENST ID: ENST00000563078
  CDS Start-End: 1-581
ttacttacctaggaggtattttaaatcccattccagattgtcagttcgagctctcgggagctgatggaatagtgcgctctagtcaggtagaacaagaggagaaaacaaaaccaggccaagccgttgattgcatctggaccattaaagccactccaaaagctaagatttatttgaggttcctagattatcaaatggagcactcaaatgaatgcaagagaaacttcgttgcagtctatgatggaagcagttctattgaaaacctgaaggccaagttttgcagcactgtggccaatgatgtaatgcttaaaacaggaattggagtgattcgaatgtgggcagatgaaggtagtcggcttagcaggtttcgaatgctctttacttcctttgtggagcaaaagaaaaaagcaggagtatttgaacaaatcactaagactcatggaacaattattggcattacttcagggattgtcttggtccttctcattatttctattttagtacaagtgaaacagcctcgaaaaaaggtcatggcttgcaaaaccgcttttaataaaaccgggttccaagaagtgtttgatcct

SEQ ID NO: 159093 - DNA, 799 bp, Homo sapiens
  Payload ID: 11137
  Gene Symbol: NETO2
  Gene Name: neuropilin (NRP) and tolloid (TLL)-like 2
  ENST ID: ENST00000564667
  CDS Start-End: 1-685
aagcagttctattgaaaacctgaaggccaagttttgcagcactgtggccaatgatgtaatgcttaaaacaggaattggagtgattcgaatgtgggcagatgaagaaaagaaaaaagcaggagtatttgaacaaatcactaagactcatggaacaattattggcattacttcagggattgtcttggtccttctcattatttctattttagtacaagtgaaacagcctcgaaaaaaggtcatggcttgcaaaaccgcttttaataaaaccgggttccaagaagtgtttgatcctcctcattatgaactgttttcactaagggacaaagagatttctgcagacctggcagacttgtcggaagaattggacaactaccagaagatgcggcgctcctccaccgcctcccgctgcatccacgaccaccactgtgggtcgcaggcctccagcgtcaaacaaagcaggaccaacctcagttccatggaacttcctttccgaaatgactttgcacaaccacagccaatgaaaacatttaatagcaccttcaagaaaagtagttacactttcaaacagggacatgagtgccctgagcaggccctggaagaccgagtaatggaggagattccctgtgaaatttatgtcagggggcgagaagattctgcacaagcatccatatccattgacttctaatcttctgctaatggtgatgtgaattcttagggtgtgtacgtacgcagcctccagggcaccatactgtttccagcagccaacccttttctcccatcacaactacgaagaccttga

SEQ ID NO: 159094 - DNA, 5882 bp, Homo sapiens
  Payload ID: 11138
  Gene Symbol: NRP1
  Gene Name: neuropilin 1
  Uniprot ID: O14786
  ENST ID: ENST00000265371
  CDS Start-End: 527-3298
gccaaaacctttgaccagagtctccttgccagcattcctacctccctttggccagctatttgtgccagacacccggacctcccctgggcgccagctccgcggctccaacgggtccagaaacaagccggattttttttttttcttcctggaaattggctttggtgtgtgttgccctacctccctcctccccctcccacccacagcccccccccggccttttttttttttttttttttttttgagacatggcccgggcagtggctcctggaagaggaacaagtgtgggaaaagggagaggaagccggagctaaatgacaggatgcaggcgacttgagacacaaaaagagaagcgttcctctcggatccaggcattgcctcgctgctttcttttctccaagacgggctgaggattgtacagctctaggcggagttggggctcttcggatcgcttagattctcctctttgctgcatttccccccacgtcctcgttctcccgcgtctgcctgcggacccggagaagggagaatggagagggggctgccgctcctctgcgccgtgctcgccctcgtcctcgccccggccggcgcttttcgcaacgataaatgtggcgatactataaaaattgaaagccccgggtaccttacatctcctggttatcctcattcttatcacccaagtgaaaaatgcgaatggctgattcaggctccggacccataccagagaattatgatcaacttcaaccctcacttcgatttggaggacagagactgcaagtatgactacgtggaagtcttcgatggagaaaatgaaaatggacattttaggggaaagttctgtggaaagatagcccctcctcctgttgtgtcttcagggccatttctttttatcaaatttgtctctgactacgaaacacatggtgcaggattttccatacgttatgaaattttcaagagaggtcctgaatgttcccagaactacacaacacctagtggagtgataaagtcccccggattccctgaaaaatatcccaacagccttgaatgcacttatattgtctttgtgccaaagatgtcagagattatcctggaatttgaaagctttgacctggagcctgactcaaatcctccaggggggatgttctgtcgctacgaccggctagaaatctgggatggattccctgatgttggccctcacattgggcgttactgtggacagaaaacaccaggtcgaatccgatcctcatcgggcattctctccatggttttttacaccgacagcgcgatagcaaaagaaggtttctcagcaaactacagtgtcttgcagagcagtgtctcagaagatttcaaatgtatggaagctctgggcatggaatcaggagaaattcattctgaccagatcacagcttcttcccagtatagcaccaactggtctgcagagcgctcccgcctgaactaccctgagaatgggtggactcccggagaggattcctaccgagagtggatacaggtagacttgggccttctgcgctttgtcacggctgtcgggacacagggcgccatttcaaaagaaaccaagaagaaatattatgtcaagacttacaagatcgacgttagctccaacggggaagactggatcaccataaaagaaggaaacaaacctgttctctttcagggaaacaccaaccccacagatgttgtggttgcagtattccccaaaccactgataactcgatttgtccgaatcaagcctgcaacttgggaaactggcatatctatgagatttgaagtatacggttgcaagataacagattatccttgctctggaatgttgggtatggtgtctggacttatttctgactcccagatcacatcatccaaccaaggggacagaaactggatgcctgaaaacatccgcctggtaaccagtcgctctggctgggcacttccacccgcacctcattcctacatcaatgagtggctccaaatagacctgggggaggagaagatcgtgaggggcatcatcattcagggtgggaagcaccgagagaacaaggtgttcatgaggaagttcaagatcgggtacagcaacaacggctcggactggaagatgatcatggatgacagcaaacgcaaggcgaagtcttttgagggcaacaacaactatgatacacctgagctgcggacttttccagctctctccacgcgattcatcaggatctaccccgagagagccactcatggcggactggggctcagaatggagctgctgggctgtgaagtggaagcccctacagctggaccgaccactcccaacgggaacttggtggatgaatgtgatgacgaccaggccaactgccacagtggaacaggtgatgacttccagctcacaggtggcaccactgtgctggccacagaaaagcccacggtcatagacagcaccatacaatcagagtttccaacatatggttttaactgtgaatttggctggggctctcacaagaccttctgccactgggaacatgacaatcacgtgcagctcaagtggagtgtgttgaccagcaagacgggacccattcaggatcacacaggagatggcaacttcatctattcccaagctgacgaaaatcagaagggcaaagtggctcgcctggtgagccctgtggtttattcccagaactctgcccactgcatgaccttctggtatcacatgtctgggtcccacgtcggcacactcagggtcaaactgcgctaccagaagccagaggagtacgatcagctggtctggatggccattggacaccaaggtgaccactggaaggaagggcgtgtcttgctccacaagtctctgaaactttatcaggtgattttcgagggcgaaatcggaaaaggaaaccttggtgggattgctgtggatgacattagtattaataaccacatttcacaagaagattgtgcaaaaccagcagacctggataaaaagaacccagaaattaaaattgatgaaacagggagcacgccaggatacgaaggtgaaggagaaggtgacaagaacatctccaggaagccaggcaatgtgttgaagaccttagaccccatcctcatcaccatcatagccatgagtgccctgggggtcctcctgggggctgtctgtggggtcgtgctgtactgtgcctgttggcataatgggatgtcagaaagaaacttgtctgccctggagaactataactttgaacttgtggatggtgtgaagttgaaaaaagacaaactgaatacacagagtacttattcggaggcatgaaggcagacagagatgaaaagacagtcaaaggacggaagtggaaggacgggagtgagctggggagctgttgatctttcactatacaggctgggaagtgtgttgatgaccactgagccaggcttttctcaggagcttcaatgagtatggccgacagacatggacaaggagctgtgttcaccatcggactcatgtgcagtcagcttttttcctgttggtttcatttgaataatcagatgctggtgttgagaccaagtatgattgacataatcattcatttcgacccctcctgcccctctctctctctctcctctcccctttgtggattctttttggaaactgagcgaaatccaagatgctggcaccaagcgtattccgtgtggccctttggatggacatgctacctgaaacccagtgcccagaatatactagaatcaccgcatttcagtggactcctgaagttgtacttgtgtataattgcccgcgtcgtgcataggcaaagaaggattaggctgttttctttttaaagtactgtagcctcagtactggtgtagtgtgtcagctctgtttacgaagcaatactgtccagttttcttgctgtttttccggtgttgtactaaacctcgtgcttgtgaactccatacagaaaacggtgccatccctgaacacggctggccactgggtatactgctgacaaccgcaacaacaaaaacacaaatccttggcactggctagtctatgtcctctcaagtgcctttttgtttgtactggttcattgtgttacattaacgacccactctgcttcttgctggtgaaagccctgctctttaatcaaactctggtggcccactgactaagaagaaagtttattttcgtgtgagatgccagcccctccgggcaggcaagggctctgaagatttggcaacgtggcttaattgttctgctttttctgtagttcaatttcatgtttcttgacccttttgtataaagctacaatattctctcttattgttctttcatatggaatgtattttcaaatgtaaactctcttctctttctctctcctatctctctgtcttttttctctcttagaattggaggatttgccattgtccaggaaagaaacttgcagctttaacctgctgggaatggcaaacgattttactagactttatgtttaaaaataaataaataagggaaattcctaactttgccctccaaagtctaactttggttttcttgttaactggttaaagtgacagtatcttttttccttatctattctattcaaaatgacctttgatagaaatgttggcatttagtagaaatagtgataagttgaggaaagaaataatacaaattggctttcaagtgagacccaaaggaagaactggataaaatcttccaaatccaaaagcatgagatttttctatccaaatatgcaaaaatgacccaagagaactttcttattttgctactgagtcacacaagggaagtggaaggaagaacagttaatttaagaatgaaactataaatcctgatgcctgggggtcaagtattttaagataagagggggaaaaacacataaagtcaaacaaatgttttaaaaattcataacagcaaccttgaaaaaatagacttaaatgaatgcttctagaaacttccagcggctcacaaagaataagcctgccttagggctggcaacatctaagcctctaacagcacagggaagcaaatatcttaccaggcagcctatgaattaacccaaagaagctttggttggttttggtggatttttatcatgccatgttggacatgagattttttagatcttccttcccacattgctagacgtctcactcaaagacatttgttgggagtcacatttgcatcatagacgagacagtccattcatcttagttaaattggattgagaatgccttttgtttccaggaaaatattgatcaccatgaaagaagaatagttttttgtccccagagacattcatttagttgatataatcctaccagaaggaaagcactaagaaacactcgtttgttgtttttaaaggcaacagacttaaagttgtcctcagccaaggaaaaatgatactgcaactttaaaatttaaagtatcttgcactgataaatatatttaaaaattatatgtttataaagttattaatttgtaaaggcagtgttacaaaatgttcagtttatattgttttagattgttttgtaatttttaaaggtgtaaaataacatattttttctttatggaaatctataaaactttctgtagtaaaatgttttcattttactggtatattattgcttcatgttttgtaccatcataagattttgtgcagattttttttacagaaattattattttctatgacaatatgacacttgtaaattgttgtttcaaaatgaacagcgaagccttaactttaaatgacatttgtattctcagacactgagtagcataaaaaccacatagaactgaactgtaacttaaattccaaactatgactactacattccaaagaaacagttgaattaaacattttcataaaatatcccac

SEQ ID NO: 159095 - DNA, 2804 bp, Homo sapiens
  Payload ID: 11138
  Gene Symbol: NRP1
  Gene Name: neuropilin 1
  ENST ID: ENST00000374816
  CDS Start-End: 141-2066
cttttctccaagacgggctgaggattgtacagctctaggcggagttggggctcttcggatcgcttagattctcctctttgctgcatttccccccacgtcctcgttctcccgcgtctgcctgcggacccggagaagggagaatggagagggggctgccgctcctctgcgccgtgctcgccctcgtcctcgccccggccggcgcttttcgcaacgataaatgtggcgatactataaaaattgaaagccccgggtaccttacatctcctggttatcctcattcttatcacccaagtgaaaaatgcgaatggctgattcaggctccggacccataccagagaattatgatcaacttcaaccctcacttcgatttggaggacagagactgcaagtatgactacgtggaagtcttcgatggagaaaatgaaaatggacattttaggggaaagttctgtggaaagatagcccctcctcctgttgtgtcttcagggccatttctttttatcaaatttgtctctgactacgaaacacatggtgcaggattttccatacgttatgaaattttcaagagaggtcctgaatgttcccagaactacacaacacctagtggagtgataaagtcccccggattccctgaaaaatatcccaacagccttgaatgcacttatattgtctttgtgccaaagatgtcagagattatcctggaatttgaaagctttgacctggagcctgactcaaatcctccaggggggatgttctgtcgctacgaccggctagaaatctgggatggattccctgatgttggccctcacattgggcgttactgtggacagaaaacaccaggtcgaatccgatcctcatcgggcattctctccatggttttttacaccgacagcgcgatagcaaaagaaggtttctcagcaaactacagtgtcttgcagagcagtgtctcagaagatttcaaatgtatggaagctctgggcatggaatcaggagaaattcattctgaccagatcacagcttcttcccagtatagcaccaactggtctgcagagcgctcccgcctgaactaccctgagaatgggtggactcccggagaggattcctaccgagagtggatacaggtagacttgggccttctgcgctttgtcacggctgtcgggacacagggcgccatttcaaaagaaaccaagaagaaatattatgtcaagacttacaagatcgacgttagctccaacggggaagactggatcaccataaaagaaggaaacaaacctgttctctttcagggaaacaccaaccccacagatgttgtggttgcagtattccccaaaccactgataactcgatttgtccgaatcaagcctgcaacttgggaaactggcatatctatgagatttgaagtatacggttgcaagataacagattatccttgctctggaatgttgggtatggtgtctggacttatttctgactcccagatcacatcatccaaccaaggggacagaaactggatgcctgaaaacatccgcctggtaaccagtcgctctggctgggcacttccacccgcacctcattcctacatcaatgagtggctccaaatagacctgggggaggagaagatcgtgaggggcatcatcattcagggtgggaagcaccgagagaacaaggtgttcatgaggaagttcaagatcgggtacagcaacaacggctcggactggaagatgatcatggatgacagcaaacgcaaggcgaagtcttttgagggcaacaacaactatgatacacctgagctgcggacttttccagctctctccacgcgattcatcaggatctaccccgagagagccactcatggcggactggggctcagaatggagctgctgggctgtgaagtggaaggcactatcaacacagaccaagaatgtccatgtgccagggctttggcaaaggatgccaagaaaaagaagagatgggcagactccactcactgcagatgcgttcgttcaattcacggagaaatgtggtcatctggaaaaggagtctgctccctggatgcgaatctgtagcctggattctggaaggcgatgctgatttaggaggtggagtgaatggagaattgaaaagacagcctggtggcagttttgaaagcacgcttgcaaaaattgtaatgagaacatgatgacagtgaaagagatctgacctaactgactccatcttgcttctaacctccaagctgtccttgttcattcctgggcataggccaaactaactttaggaggaacttatagtttaactttgaaacaaagacaatgacagctctttcccaaaacaaacccccttcctgcctggggactagattgccttcgcaagactaacaaattagccacaaaattggaaattatggtttagggggaaaaaaatgaaattatggtttaggggtcatgcagctggaggctgcaagactctgaacctccccaaattgcttctgggaataatgtcactgttgtaaaacctgagatcagtgcttcagatattttccagaccctgtacttgatggatcagctggcaccacccagatcgataaactggctcatcctgtcttgtgtccctcaccagaaactgactcagcacaagaggacacctttgactccctgtgatttcacctcagacctgaccaatgagcacctgccccttttcaacccctgctcaacaaattacccttcaaaacctaaaccccaagtaataatagaacccccatctcccatacagttgtctctgcatgaattaaactctttctctattgc

SEQ ID NO: 159096 - DNA, 1988 bp, Homo sapiens
  Payload ID: 11138
  Gene Symbol: NRP1
  Gene Name: neuropilin 1
  Uniprot ID: O14786
  ENST ID: ENST00000374821
  CDS Start-End: 141-1970
cttttctccaagacgggctgaggattgtacagctctaggcggagttggggctcttcggatcgcttagattctcctctttgctgcatttccccccacgtcctcgttctcccgcgtctgcctgcggacccggagaagggagaatggagagggggctgccgctcctctgcgccgtgctcgccctcgtcctcgccccggccggcgcttttcgcaacgataaatgtggcgatactataaaaattgaaagccccgggtaccttacatctcctggttatcctcattcttatcacccaagtgaaaaatgcgaatggctgattcaggctccggacccataccagagaattatgatcaacttcaaccctcacttcgatttggaggacagagactgcaagtatgactacgtggaagtcttcgatggagaaaatgaaaatggacattttaggggaaagttctgtggaaagatagcccctcctcctgttgtgtcttcagggccatttctttttatcaaatttgtctctgactacgaaacacatggtgcaggattttccatacgttatgaaattttcaagagaggtcctgaatgttcccagaactacacaacacctagtggagtgataaagtcccccggattccctgaaaaatatcccaacagccttgaatgcacttatattgtctttgtgccaaagatgtcagagattatcctggaatttgaaagctttgacctggagcctgactcaaatcctccaggggggatgttctgtcgctacgaccggctagaaatctgggatggattccctgatgttggccctcacattgggcgttactgtggacagaaaacaccaggtcgaatccgatcctcatcgggcattctctccatggttttttacaccgacagcgcgatagcaaaagaaggtttctcagcaaactacagtgtcttgcagagcagtgtctcagaagatttcaaatgtatggaagctctgggcatggaatcaggagaaattcattctgaccagatcacagcttcttcccagtatagcaccaactggtctgcagagcgctcccgcctgaactaccctgagaatgggtggactcccggagaggattcctaccgagagtggatacaggtagacttgggccttctgcgctttgtcacggctgtcgggacacagggcgccatttcaaaagaaaccaagaagaaatattatgtcaagacttacaagatcgacgttagctccaacggggaagactggatcaccataaaagaaggaaacaaacctgttctctttcagggaaacaccaaccccacagatgttgtggttgcagtattccccaaaccactgataactcgatttgtccgaatcaagcctgcaacttgggaaactggcatatctatgagatttgaagtatacggttgcaagataacagattatccttgctctggaatgttgggtatggtgtctggacttatttctgactcccagatcacatcatccaaccaaggggacagaaactggatgcctgaaaacatccgcctggtaaccagtcgctctggctgggcacttccacccgcacctcattcctacatcaatgagtggctccaaatagacctgggggaggagaagatcgtgaggggcatcatcattcagggtgggaagcaccgagagaacaaggtgttcatgaggaagttcaagatcgggtacagcaacaacggctcggactggaagatgatcatggatgacagcaaacgcaaggcgaagtcttttgagggcaacaacaactatgatacacctgagctgcggacttttccagctctctccacgcgattcatcaggatctaccccgagagagccactcatggcggactggggctcagaatggagctgctgggctgtgaagtggaaggtggcaccactgtgctggccacagaaaagcccacggtcatagacagcaccatacaatcaggtatcaaataaaatacgaaatgtgacaga

SEQ ID NO: 159097 - DNA, 2213 bp, Homo sapiens
  Payload ID: 11138
  Gene Symbol: NRP1
  Gene Name: neuropilin 1
  Uniprot ID: O14786
  ENST ID: ENST00000374822
  CDS Start-End: 261-2195
ggaagaggaacaagtgtgggaaaagggagaggaagccggagctaaatgacaggatgcaggcgacttgagacacaaaaagagaagcgttcctctcggatccaggcattgcctcgctgctttcttttctccaagacgggctgaggattgtacagctctaggcggagttggggctcttcggatcgcttagattctcctctttgctgcatttccccccacgtcctcgttctcccgcgtctgcctgcggacccggagaagggagaatggagagggggctgccgctcctctgcgccgtgctcgccctcgtcctcgccccggccggcgcttttcgcaacgataaatgtggcgatactataaaaattgaaagccccgggtaccttacatctcctggttatcctcattcttatcacccaagtgaaaaatgcgaatggctgattcaggctccggacccataccagagaattatgatcaacttcaaccctcacttcgatttggaggacagagactgcaagtatgactacgtggaagtcttcgatggagaaaatgaaaatggacattttaggggaaagttctgtggaaagatagcccctcctcctgttgtgtcttcagggccatttctttttatcaaatttgtctctgactacgaaacacatggtgcaggattttccatacgttatgaaattttcaagagaggtcctgaatgttcccagaactacacaacacctagtggagtgataaagtcccccggattccctgaaaaatatcccaacagccttgaatgcacttatattgtctttgtgccaaagatgtcagagattatcctggaatttgaaagctttgacctggagcctgactcaaatcctccaggggggatgttctgtcgctacgaccggctagaaatctgggatggattccctgatgttggccctcacattgggcgttactgtggacagaaaacaccaggtcgaatccgatcctcatcgggcattctctccatggttttttacaccgacagcgcgatagcaaaagaaggtttctcagcaaactacagtgtcttgcagagcagtgtctcagaagatttcaaatgtatggaagctctgggcatggaatcaggagaaattcattctgaccagatcacagcttcttcccagtatagcaccaactggtctgcagagcgctcccgcctgaactaccctgagaatgggtggactcccggagaggattcctaccgagagtggatacaggtagacttgggccttctgcgctttgtcacggctgtcgggacacagggcgccatttcaaaagaaaccaagaagaaatattatgtcaagacttacaagatcgacgttagctccaacggggaagactggatcaccataaaagaaggaaacaaacctgttctctttcagggaaacaccaaccccacagatgttgtggttgcagtattccccaaaccactgataactcgatttgtccgaatcaagcctgcaacttgggaaactggcatatctatgagatttgaagtatacggttgcaagataacagattatccttgctctggaatgttgggtatggtgtctggacttatttctgactcccagatcacatcatccaaccaaggggacagaaactggatgcctgaaaacatccgcctggtaaccagtcgctctggctgggcacttccacccgcacctcattcctacatcaatgagtggctccaaatagacctgggggaggagaagatcgtgaggggcatcatcattcagggtgggaagcaccgagagaacaaggtgttcatgaggaagttcaagatcgggtacagcaacaacggctcggactggaagatgatcatggatgacagcaaacgcaaggcgaagtcttttgagggcaacaacaactatgatacacctgagctgcggacttttccagctctctccacgcgattcatcaggatctaccccgagagagccactcatggcggactggggctcagaatggagctgctgggctgtgaagtggaagcccctacagctggaccgaccactcccaacgggaacttggtggatgaatgtgatgacgaccaggccaactgccacagtggaacaggtgatgacttccagctcacaggtggcaccactgtgctggccacagaaaagcccacggtcatagacagcaccatacaatcaggtatcaaataaaatacgaaatgtgacaga

SEQ ID NO: 159098 - DNA, 3737 bp, Homo sapiens
  Payload ID: 11138
  Gene Symbol: NRP1
  Gene Name: neuropilin 1
  ENST ID: ENST00000374823
  CDS Start-End: 1-2115
atggagagggggctgccgctcctctgcgccgtgctcgccctcgtcctcgccccggccggcgcttttcgcaacgataaatgtggcgatactataaaaattgaaagccccgggtaccttacatctcctggttatcctcattcttatcacccaagtgaaaaatgcgaatggctgattcaggctccggacccataccagagaattatgatcaacttcaaccctcacttcgatttggaggacagagactgcaagtatgactacgtggaagtcttcgatggagaaaatgaaaatggacattttaggggaaagttctgtggaaagatagcccctcctcctgttgtgtcttcagggccatttctttttatcaaatttgtctctgactacgaaacacatggtgcaggattttccatacgttatgaaattttcaagagaggtcctgaatgttcccagaactacacaacacctagtggagtgataaagtcccccggattccctgaaaaatatcccaacagccttgaatgcacttatattgtctttgtgccaaagatgtcagagattatcctggaatttgaaagctttgacctggagcctgactcaaatcctccaggggggatgttctgtcgctacgaccggctagaaatctgggatggattccctgatgttggccctcacattgggcgttactgtggacagaaaacaccaggtcgaatccgatcctcatcgggcattctctccatggttttttacaccgacagcgcgatagcaaaagaaggtttctcagcaaactacagtgtcttgcagagcagtgtctcagaagatttcaaatgtatggaagctctgggcatggaatcaggagaaattcattctgaccagatcacagcttcttcccagtatagcaccaactggtctgcagagcgctcccgcctgaactaccctgagaatgggtggactcccggagaggattcctaccgagagtggatacaggtagacttgggccttctgcgctttgtcacggctgtcgggacacagggcgccatttcaaaagaaaccaagaagaaatattatgtcaagacttacaagatcgacgttagctccaacggggaagactggatcaccataaaagaaggaaacaaacctgttctctttcagggaaacaccaaccccacagatgttgtggttgcagtattccccaaaccactgataactcgatttgtccgaatcaagcctgcaacttgggaaactggcatatctatgagatttgaagtatacggttgcaagataacagattatccttgctctggaatgttgggtatggtgtctggacttatttctgactcccagatcacatcatccaaccaaggggacagaaactggatgcctgaaaacatccgcctggtaaccagtcgctctggctgggcacttccacccgcacctcattcctacatcaatgagtggctccaaatagacctgggggaggagaagatcgtgaggggcatcatcattcagggtgggaagcaccgagagaacaaggtgttcatgaggaagttcaagatcgggtacagcaacaacggctcggactggaagatgatcatggatgacagcaaacgcaaggcgaagtcttttgagggcaacaacaactatgatacacctgagctgcggacttttccagctctctccacgcgattcatcaggatctaccccgagagagccactcatggcggactggggctcagaatggagctgctgggctgtgaagtggaagcccctacagctggaccgaccactcccaacgggaacttggtggatgaatgtgatgacgaccaggccaactgccacagtggaacaggtgatgacttccagctcacaggtgcagaaaccatcttcatcccattgctgtaccatttcagttcatgtcttagttgggaccagctaacgcctgtgtgtgtgcttgtaactccgcatggcagagagctgcccaggaatagaagctgccttgccagaacacgtgcatcttcatttcctcatgtcatctggatagatgagttgttcttaatagccacaaccatttgtaacaataatttgagccatttcgagagccaaaggctaggattatcttaattgaataagaatttccccatggctaaatgtactaaaccgatccttattttcattattttcagacccccccccaataacacgtgcaccacccctacgtaaccacacacttcagaatgtttattttcattttctaatgaggacaagtttttttgagtggatcctttatccaacaaatggataaagttaggcttatatttgaagtgcggcttttaagttgggatttggtaaatcattgtacattaacatttacaaaggcagaattagctgctatttcacatcaccaccgaccagcaaatgcatcagagatgttgtgtgccaaatgtctcactaattaatctagagtattactctctaatctcctaaaaccctaaaagctaggaaatgaccttctcttccacttggaatggcagaggaaatattaggcaagtggagaaatgggattataccatttggaaattggccaaggcactagggttttcaccctgtggttgcaaaaggtatcgtgggacttttactgctccctgggtcaaaacgcagtttcaatagcatctgactctcatttgagattaaacatgagcttttgaatgcaggtctgcatttttacccagaagggactcggagagcccacataattaatttccatgggcaaaactgaaggcgttaccatgtaacttcataataaagccatgttattggctaatgcattcgtacaaaatctggaaggaagtgtcctagagtacatttccaattatttcaaaagctctcctctgaaggagtgagagggctctgcactctaagatggaataaagagtaaaagaaagaaaaaaaaattgaaaatctgtcccagaaatttagtactgtgaactgagtttacatttaaatcccacctcctaaagctgtctctctccaaatttccaggataatcatttacattcatatggccaataaatgtcacattgctatgagcttttgaatgcaaatcttgtatacaagcagccacaagccacaaaacttagattaattaatgcagagacattttctgtgtaacatgtcaagttcaagttgaaaactcaaccactgatataaaaaacagagtactattccatgaaccaagtcctctggaagcttcccggggttgcctgtaaacactctgccacaaacctcaggctttttacagaccccgtcacacatccatagtgaaatttctcataaaaaaggaatgattgcaggatcccagtgtgccctttcaattgccctcttgtggaaggggttcttttcttcataaaccctaaagtggtcagttaatattgattagaaacaaagcctcagatttactcctcatatcagaacaaccagccttctcatttttgcattagttcatgactgaatcaattgaaactgaaggctttgaatgaaatagggcgagtatgttagcctggagcaaattgtgtatggcagcgagttacaaaccacagaaaatgggtcatttatagtggaaacactgacaacctttcaaaactataaggttttgctttacctacagtgtttcaattatttctttggtagatagaagaaagttcattctgattttttctttttacatattagcatggtgaaaaaaa

SEQ ID NO: 159099 - DNA, 5877 bp, Homo sapiens
  Payload ID: 11138
  Gene Symbol: NRP1
  Gene Name: neuropilin 1
  Uniprot ID: O14786
  ENST ID: ENST00000374867
  CDS Start-End: 524-3295
gcagttggtgaaactcctctgtctcccgctcatcttttcattgctcgttcccctccttcccgcagacacccggacctcccctgggcgccagctccgcggctccaacgggtccagaaacaagccggattttttttttttcttcctggaaattggctttggtgtgtgttgccctacctccctcctccccctcccacccacagcccccccccggccttttttttttttttttttttttttgagacatggcccgggcagtggctcctggaagaggaacaagtgtgggaaaagggagaggaagccggagctaaatgacaggatgcaggcgacttgagacacaaaaagagaagcgttcctctcggatccaggcattgcctcgctgctttcttttctccaagacgggctgaggattgtacagctctaggcggagttggggctcttcggatcgcttagattctcctctttgctgcatttccccccacgtcctcgttctcccgcgtctgcctgcggacccggagaagggagaatggagagggggctgccgctcctctgcgccgtgctcgccctcgtcctcgccccggccggcgcttttcgcaacgataaatgtggcgatactataaaaattgaaagccccgggtaccttacatctcctggttatcctcattcttatcacccaagtgaaaaatgcgaatggctgattcaggctccggacccataccagagaattatgatcaacttcaaccctcacttcgatttggaggacagagactgcaagtatgactacgtggaagtcttcgatggagaaaatgaaaatggacattttaggggaaagttctgtggaaagatagcccctcctcctgttgtgtcttcagggccatttctttttatcaaatttgtctctgactacgaaacacatggtgcaggattttccatacgttatgaaattttcaagagaggtcctgaatgttcccagaactacacaacacctagtggagtgataaagtcccccggattccctgaaaaatatcccaacagccttgaatgcacttatattgtctttgtgccaaagatgtcagagattatcctggaatttgaaagctttgacctggagcctgactcaaatcctccaggggggatgttctgtcgctacgaccggctagaaatctgggatggattccctgatgttggccctcacattgggcgttactgtggacagaaaacaccaggtcgaatccgatcctcatcgggcattctctccatggttttttacaccgacagcgcgatagcaaaagaaggtttctcagcaaactacagtgtcttgcagagcagtgtctcagaagatttcaaatgtatggaagctctgggcatggaatcaggagaaattcattctgaccagatcacagcttcttcccagtatagcaccaactggtctgcagagcgctcccgcctgaactaccctgagaatgggtggactcccggagaggattcctaccgagagtggatacaggtagacttgggccttctgcgctttgtcacggctgtcgggacacagggcgccatttcaaaagaaaccaagaagaaatattatgtcaagacttacaagatcgacgttagctccaacggggaagactggatcaccataaaagaaggaaacaaacctgttctctttcagggaaacaccaaccccacagatgttgtggttgcagtattccccaaaccactgataactcgatttgtccgaatcaagcctgcaacttgggaaactggcatatctatgagatttgaagtatacggttgcaagataacagattatccttgctctggaatgttgggtatggtgtctggacttatttctgactcccagatcacatcatccaaccaaggggacagaaactggatgcctgaaaacatccgcctggtaaccagtcgctctggctgggcacttccacccgcacctcattcctacatcaatgagtggctccaaatagacctgggggaggagaagatcgtgaggggcatcatcattcagggtgggaagcaccgagagaacaaggtgttcatgaggaagttcaagatcgggtacagcaacaacggctcggactggaagatgatcatggatgacagcaaacgcaaggcgaagtcttttgagggcaacaacaactatgatacacctgagctgcggacttttccagctctctccacgcgattcatcaggatctaccccgagagagccactcatggcggactggggctcagaatggagctgctgggctgtgaagtggaagcccctacagctggaccgaccactcccaacgggaacttggtggatgaatgtgatgacgaccaggccaactgccacagtggaacaggtgatgacttccagctcacaggtggcaccactgtgctggccacagaaaagcccacggtcatagacagcaccatacaatcagagtttccaacatatggttttaactgtgaatttggctggggctctcacaagaccttctgccactgggaacatgacaatcacgtgcagctcaagtggagtgtgttgaccagcaagacgggacccattcaggatcacacaggagatggcaacttcatctattcccaagctgacgaaaatcagaagggcaaagtggctcgcctggtgagccctgtggtttattcccagaactctgcccactgcatgaccttctggtatcacatgtctgggtcccacgtcggcacactcagggtcaaactgcgctaccagaagccagaggagtacgatcagctggtctggatggccattggacaccaaggtgaccactggaaggaagggcgtgtcttgctccacaagtctctgaaactttatcaggtgattttcgagggcgaaatcggaaaaggaaaccttggtgggattgctgtggatgacattagtattaataaccacatttcacaagaagattgtgcaaaaccagcagacctggataaaaagaacccagaaattaaaattgatgaaacagggagcacgccaggatacgaaggtgaaggagaaggtgacaagaacatctccaggaagccaggcaatgtgttgaagaccttagaccccatcctcatcaccatcatagccatgagtgccctgggggtcctcctgggggctgtctgtggggtcgtgctgtactgtgcctgttggcataatgggatgtcagaaagaaacttgtctgccctggagaactataactttgaacttgtggatggtgtgaagttgaaaaaagacaaactgaatacacagagtacttattcggaggcatgaaggcagacagagatgaaaagacagtcaaaggacggaagtggaaggacgggagtgagctggggagctgttgatctttcactatacaggctgggaagtgtgttgatgaccactgagccaggcttttctcaggagcttcaatgagtatggccgacagacatggacaaggagctgtgttcaccatcggactcatgtgcagtcagcttttttcctgttggtttcatttgaataatcagatgctggtgttgagaccaagtatgattgacataatcattcatttcgacccctcctgcccctctctctctctctcctctcccctttgtggattctttttggaaactgagcgaaatccaagatgctggcaccaagcgtattccgtgtggccctttggatggacatgctacctgaaacccagtgcccagaatatactagaatcaccgcatttcagtggactcctgaagttgtacttgtgtataattgcccgcgtcgtgcataggcaaagaaggattaggctgttttctttttaaagtactgtagcctcagtactggtgtagtgtgtcagctctgtttacgaagcaatactgtccagttttcttgctgtttttccggtgttgtactaaacctcgtgcttgtgaactccatacagaaaacggtgccatccctgaacacggctggccactgggtatactgctgacaaccgcaacaacaaaaacacaaatccttggcactggctagtctatgtcctctcaagtgcctttttgtttgtactggttcattgtgttacattaacgacccactctgcttcttgctggtgaaagccctgctctttaatcaaactctggtggcccactgactaagaagaaagtttattttcgtgtgagatgccagcccctccgggcaggcaagggctctgaagatttggcaacgtggcttaattgttctgctttttctgtagttcaatttcatgtttcttgacccttttgtataaagctacaatattctctcttattgttctttcatatggaatgtattttcaaatgtaaactctcttctctttctctctcctatctctctgtcttttttctctcttagaattggaggatttgccattgtccaggaaagaaacttgcagctttaacctgctgggaatggcaaacgattttactagactttatgtttaaaaataaataaataagggaaattcctaactttgccctccaaagtctaactttggttttcttgttaactggttaaagtgacagtatcttttttccttatctattctattcaaaatgacctttgatagaaatgttggcatttagtagaaatagtgataagttgaggaaagaaataatacaaattggctttcaagtgagacccaaaggaagaactggataaaatcttccaaatccaaaagcatgagatttttctatccaaatatgcaaaaatgacccaagagaactttcttattttgctactgagtcacacaagggaagtggaaggaagaacagttaatttaagaatgaaactataaatcctgatgcctgggggtcaagtattttaagataagagggggaaaaacacataaagtcaaacaaatgttttaaaaattcataacagcaaccttgaaaaaatagacttaaatgaatgcttctagaaacttccagcggctcacaaagaataagcctgccttagggctggcaacatctaagcctctaacagcacagggaagcaaatatcttaccaggcagcctatgaattaacccaaagaagctttggttggttttggtggatttttatcatgccatgttggacatgagattttttagatcttccttcccacattgctagacgtctcactcaaagacatttgttgggagtcacatttgcatcatagacgagacagtccattcatcttagttaaattggattgagaatgccttttgtttccaggaaaatattgatcaccatgaaagaagaatagttttttgtccccagagacattcatttagttgatataatcctaccagaaggaaagcactaagaaacactcgtttgttgtttttaaaggcaacagacttaaagttgtcctcagccaaggaaaaatgatactgcaactttaaaatttaaagtatcttgcactgataaatatatttaaaaattatatgtttataaagttattaatttgtaaaggcagtgttacaaaatgttcagtttatattgttttagattgttttgtaatttttaaaggtgtaaaataacatattttttctttatggaaatctataaaactttctgtagtaaaatgttttcattttactggtatattattgcttcatgttttgtaccatcataagattttgtgcagattttttttacagaaattattattttctatgacaatatgacacttgtaaattgttgtttcaaaatgaacagcgaagccttaactttaaatgacatttgtattctcagacactgagtagcataaaaaccacatagaactgaactgtaacttaaattccaaactatgactactacattccaaagaaacagttgaattaaacattttcataaaatatccc

SEQ ID NO: 159100 - DNA, 5407 bp, Homo sapiens
  Payload ID: 11138
  Gene Symbol: NRP1
  Gene Name: neuropilin 1
  ENST ID: ENST00000374875
  CDS Start-End: 616-2823
ggaacaagtgtgggaaaagggagaggaagccggagctaaatgacaggatgcaggcgacttgagacacaaaaagagaagcgttcctctcggatccaggcattgcctcgctgctttcttttctccaagacgggctgaggattgtacagctctaggcggagttggggctcttcggatcgcttagattctcctctttgctgcatttccccccacgtcctcgttctcccgcgtctgcctgcggacccggagaagggagaatggagagggggctgccgctcctctgcgccgtgctcgccctcgtcctcgccccggccggcgcttttcgcaacgataaatgtggcgatactataaaaattgaaagccccgggtaccttacatctcctggttatcctcattcttatcacccaagtgaaaaatgcgaatggctgattcaggctccggacccataccagagaattatgatcaacttcaaccctcacttcgatttggaggacagagactgcaagtcctgaatgttcccagaactacacaacacctagtggagtgataaagtcccccggattccctgaaaaatatcccaacagccttgaatgcacttatattgtctttgtgccaaagatgtcagagattatcctggaatttgaaagctttgacctggagcctgactcaaatcctccaggggggatgttctgtcgctacgaccggctagaaatctgggatggattccctgatgttggccctcacattgggcgttactgtggacagaaaacaccaggtcgaatccgatcctcatcgggcattctctccatggttttttacaccgacagcgcgatagcaaaagaaggtttctcagcaaactacagtgtcttgcagagcagtgtctcagaagatttcaaatgtatggaagctctgggcatggaatcaggagaaattcattctgaccagatcacagcttcttcccagtatagcaccaactggtctgcagagcgctcccgcctgaactaccctgagaatgggtggactcccggagaggattcctaccgagagtggatacaggtagacttgggccttctgcgctttgtcacggctgtcgggacacagggcgccatttcaaaagaaaccaagaagaaatattatgtcaagacttacaagatcgacgttagctccaacggggaagactggatcaccataaaagaaggaaacaaacctgttctctttcagggaaacaccaaccccacagatgttgtggttgcagtattccccaaaccactgataactcgatttgtccgaatcaagcctgcaacttgggaaactggcatatctatgagatttgaagtatacggttgcaagataacagattatccttgctctggaatgttgggtatggtgtctggacttatttctgactcccagatcacatcatccaaccaaggggacagaaactggatgcctgaaaacatccgcctggtaaccagtcgctctggctgggcacttccacccgcacctcattcctacatcaatgagtggctccaaatagacctgggggaggagaagatcgtgaggggcatcatcattcagggtgggaagcaccgagagaacaaggtgttcatgaggaagttcaagatcgggtacagcaacaacggctcggactggaagatgatcatggatgacagcaaacgcaaggcgaagtcttttgagggcaacaacaactatgatacacctgagctgcggacttttccagctctctccacgcgattcatcaggatctaccccgagagagccactcatggcggactggggctcagaatggagctgctgggctgtgaagtggaagcccctacagctggaccgaccactcccaacgggaacttggtggatgaatgtgatgacgaccaggccaactgccacagtggaacaggtggcaccactgtgctggccacagaaaagcccacggtcatagacagcaccatacaatcagagtttccaacatatggttttaactgtgaatttggctggggctctcacaagaccttctgccactgggaacatgacaatcacgtgcagctcaagtggagtgtgttgaccagcaagacgggacccattcaggatcacacaggagatggcaacttcatctattcccaagctgacgaaaatcagaagggcaaagtggctcgcctggtgagccctgtggtttattcccagaactctgcccactgcatgaccttctggtatcacatgtctgggtcccacgtcggcacactcagggtcaaactgcgctaccagaagccagaggagtacgatcagctggtctggatggccattggacaccaaggtgaccactggaaggaagggcgtgtcttgctccacaagtctctgaaactttatcaggtgattttcgagggcgaaatcggaaaaggaaaccttggtgggattgctgtggatgacattagtattaataaccacatttcacaagaagattgtgcaaaaccagcagacctggataaaaagaacccagaaattaaaattgatgaaacagggagcacgccaggatacgaaggtgaaggagaaggtgacaagaacatctccaggaagccaggcaatgtgttgaagaccttagaccccatcctcatcaccatcatagccatgagtgccctgggggtcctcctgggggctgtctgtggggtcgtgctgtactgtgcctgttggcataatgggatgtcagaaagaaacttgtctgccctggagaactataactttgaacttgtggatggtgtgaagttgaaaaaagacaaactgaatacacagagtacttattcggaggcatgaaggcagacagagatgaaaagacagtcaaaggacggaagtggaaggacgggagtgagctggggagctgttgatctttcactatacaggctgggaagtgtgttgatgaccactgagccaggcttttctcaggagcttcaatgagtatggccgacagacatggacaaggagctgtgttcaccatcggactcatgtgcagtcagcttttttcctgttggtttcatttgaataatcagatgctggtgttgagaccaagtatgattgacataatcattcatttcgacccctcctgcccctctctctctctctcctctcccctttgtggattctttttggaaactgagcgaaatccaagatgctggcaccaagcgtattccgtgtggccctttggatggacatgctacctgaaacccagtgcccagaatatactagaatcaccgcatttcagtggactcctgaagttgtacttgtgtataattgcccgcgtcgtgcataggcaaagaaggattaggctgttttctttttaaagtactgtagcctcagtactggtgtagtgtgtcagctctgtttacgaagcaatactgtccagttttcttgctgtttttccggtgttgtactaaacctcgtgcttgtgaactccatacagaaaacggtgccatccctgaacacggctggccactgggtatactgctgacaaccgcaacaacaaaaacacaaatccttggcactggctagtctatgtcctctcaagtgcctttttgtttgtactggttcattgtgttacattaacgacccactctgcttcttgctggtgaaagccctgctctttaatcaaactctggtggcccactgactaagaagaaagtttattttcgtgtgagatgccagcccctccgggcaggcaagggctctgaagatttggcaacgtggcttaattgttctgctttttctgtagttcaatttcatgtttcttgacccttttgtataaagctacaatattctctcttattgttctttcatatggaatgtattttcaaatgtaaactctcttctctttctctctcctatctctctgtcttttttctctcttagaattggaggatttgccattgtccaggaaagaaacttgcagctttaacctgctgggaatggcaaacgattttactagactttatgtttaaaaataaataaataagggaaattcctaactttgccctccaaagtctaactttggttttcttgttaactggttaaagtgacagtatcttttttccttatctattctattcaaaatgacctttgatagaaatgttggcatttagtagaaatagtgataagttgaggaaagaaataatacaaattggctttcaagtgagacccaaaggaagaactggataaaatcttccaaatccaaaagcatgagatttttctatccaaatatgcaaaaatgacccaagagaactttcttattttgctactgagtcacacaagggaagtggaaggaagaacagttaatttaagaatgaaactataaatcctgatgcctgggggtcaagtattttaagataagagggggaaaaacacataaagtcaaacaaatgttttaaaaattcataacagcaaccttgaaaaaatagacttaaatgaatgcttctagaaacttccagcggctcacaaagaataagcctgccttagggctggcaacatctaagcctctaacagcacagggaagcaaatatcttaccaggcagcctatgaattaacccaaagaagctttggttggttttggtggatttttatcatgccatgttggacatgagattttttagatcttccttcccacattgctagacgtctcactcaaagacatttgttgggagtcacatttgcatcatagacgagacagtccattcatcttagttaaattggattgagaatgccttttgtttccaggaaaatattgatcaccatgaaagaagaatagttttttgtccccagagacattcatttagttgatataatcctaccagaaggaaagcactaagaaacactcgtttgttgtttttaaaggcaacagacttaaagttgtcctcagccaaggaaaaatgatactgcaactttaaaatttaaagtatcttgcactgataaatatatttaaaaattatatgtttataaagttattaatttgtaaaggcagtgttacaaaatgttcagtttatattgttttagattgttttgtaatttttaaaggtgtaaaataacatattttttctttatggaaatctataaaactttctgtagtaaaatgttttcattttactggtatattattgcttcatgttttgtaccatcataagattttgtgcagattttttttacagaaattattattttctatgacaatatgacacttgtaaattgttgtttcaaaatgaacagcgaagccttaactttaaatgacatttgtattctcagacactgagtagcataaaaaccacatagaactgaactgtaacttaaattccaaactatgactactacattccaaagaaacagttgaattaaacattttcataaaatatcccac

SEQ ID NO: 159101 - DNA, 5826 bp, Homo sapiens
  Payload ID: 11138
  Gene Symbol: NRP1
  Gene Name: neuropilin 1
  ENST ID: ENST00000395995
  CDS Start-End: 524-3244
gcagttggtgaaactcctctgtctcccgctcatcttttcattgctcgttcccctccttcccgcagacacccggacctcccctgggcgccagctccgcggctccaacgggtccagaaacaagccggattttttttttttcttcctggaaattggctttggtgtgtgttgccctacctccctcctccccctcccacccacagcccccccccggccttttttttttttttttttttttttgagacatggcccgggcagtggctcctggaagaggaacaagtgtgggaaaagggagaggaagccggagctaaatgacaggatgcaggcgacttgagacacaaaaagagaagcgttcctctcggatccaggcattgcctcgctgctttcttttctccaagacgggctgaggattgtacagctctaggcggagttggggctcttcggatcgcttagattctcctctttgctgcatttccccccacgtcctcgttctcccgcgtctgcctgcggacccggagaagggagaatggagagggggctgccgctcctctgcgccgtgctcgccctcgtcctcgccccggccggcgcttttcgcaacgataaatgtggcgatactataaaaattgaaagccccgggtaccttacatctcctggttatcctcattcttatcacccaagtgaaaaatgcgaatggctgattcaggctccggacccataccagagaattatgatcaacttcaaccctcacttcgatttggaggacagagactgcaagtatgactacgtggaagtcttcgatggagaaaatgaaaatggacattttaggggaaagttctgtggaaagatagcccctcctcctgttgtgtcttcagggccatttctttttatcaaatttgtctctgactacgaaacacatggtgcaggattttccatacgttatgaaattttcaagagaggtcctgaatgttcccagaactacacaacacctagtggagtgataaagtcccccggattccctgaaaaatatcccaacagccttgaatgcacttatattgtctttgtgccaaagatgtcagagattatcctggaatttgaaagctttgacctggagcctgactcaaatcctccaggggggatgttctgtcgctacgaccggctagaaatctgggatggattccctgatgttggccctcacattgggcgttactgtggacagaaaacaccaggtcgaatccgatcctcatcgggcattctctccatggttttttacaccgacagcgcgatagcaaaagaaggtttctcagcaaactacagtgtcttgcagagcagtgtctcagaagatttcaaatgtatggaagctctgggcatggaatcaggagaaattcattctgaccagatcacagcttcttcccagtatagcaccaactggtctgcagagcgctcccgcctgaactaccctgagaatgggtggactcccggagaggattcctaccgagagtggatacaggtagacttgggccttctgcgctttgtcacggctgtcgggacacagggcgccatttcaaaagaaaccaagaagaaatattatgtcaagacttacaagatcgacgttagctccaacggggaagactggatcaccataaaagaaggaaacaaacctgttctctttcagggaaacaccaaccccacagatgttgtggttgcagtattccccaaaccactgataactcgatttgtccgaatcaagcctgcaacttgggaaactggcatatctatgagatttgaagtatacggttgcaagataacagattatccttgctctggaatgttgggtatggtgtctggacttatttctgactcccagatcacatcatccaaccaaggggacagaaactggatgcctgaaaacatccgcctggtaaccagtcgctctggctgggcacttccacccgcacctcattcctacatcaatgagtggctccaaatagacctgggggaggagaagatcgtgaggggcatcatcattcagggtgggaagcaccgagagaacaaggtgttcatgaggaagttcaagatcgggtacagcaacaacggctcggactggaagatgatcatggatgacagcaaacgcaaggcgaagtcttttgagggcaacaacaactatgatacacctgagctgcggacttttccagctctctccacgcgattcatcaggatctaccccgagagagccactcatggcggactggggctcagaatggagctgctgggctgtgaagtggaagcccctacagctggaccgaccactcccaacgggaacttggtggatgaatgtgatgacgaccaggccaactgccacagtggaacaggtgatgacttccagctcacaggtggcaccactgtgctggccacagaaaagcccacggtcatagacagcaccatacaatcagagtttccaacatatggttttaactgtgaatttggctggggctctcacaagaccttctgccactgggaacatgacaatcacgtgcagctcaagtggagtgtgttgaccagcaagacgggacccattcaggatcacacaggagatggcaacttcatctattcccaagctgacgaaaatcagaagggcaaagtggctcgcctggtgagccctgtggtttattcccagaactctgcccactgcatgaccttctggtatcacatgtctgggtcccacgtcggcacactcagggtcaaactgcgctaccagaagccagaggagtacgatcagctggtctggatggccattggacaccaaggtgaccactggaaggaagggcgtgtcttgctccacaagtctctgaaactttatcaggtgattttcgagggcgaaatcggaaaaggaaaccttggtgggattgctgtggatgacattagtattaataaccacatttcacaagaagattgtgcaaggagcacgccaggatacgaaggtgaaggagaaggtgacaagaacatctccaggaagccaggcaatgtgttgaagaccttagaccccatcctcatcaccatcatagccatgagtgccctgggggtcctcctgggggctgtctgtggggtcgtgctgtactgtgcctgttggcataatgggatgtcagaaagaaacttgtctgccctggagaactataactttgaacttgtggatggtgtgaagttgaaaaaagacaaactgaatacacagagtacttattcggaggcatgaaggcagacagagatgaaaagacagtcaaaggacggaagtggaaggacgggagtgagctggggagctgttgatctttcactatacaggctgggaagtgtgttgatgaccactgagccaggcttttctcaggagcttcaatgagtatggccgacagacatggacaaggagctgtgttcaccatcggactcatgtgcagtcagcttttttcctgttggtttcatttgaataatcagatgctggtgttgagaccaagtatgattgacataatcattcatttcgacccctcctgcccctctctctctctctcctctcccctttgtggattctttttggaaactgagcgaaatccaagatgctggcaccaagcgtattccgtgtggccctttggatggacatgctacctgaaacccagtgcccagaatatactagaatcaccgcatttcagtggactcctgaagttgtacttgtgtataattgcccgcgtcgtgcataggcaaagaaggattaggctgttttctttttaaagtactgtagcctcagtactggtgtagtgtgtcagctctgtttacgaagcaatactgtccagttttcttgctgtttttccggtgttgtactaaacctcgtgcttgtgaactccatacagaaaacggtgccatccctgaacacggctggccactgggtatactgctgacaaccgcaacaacaaaaacacaaatccttggcactggctagtctatgtcctctcaagtgcctttttgtttgtactggttcattgtgttacattaacgacccactctgcttcttgctggtgaaagccctgctctttaatcaaactctggtggcccactgactaagaagaaagtttattttcgtgtgagatgccagcccctccgggcaggcaagggctctgaagatttggcaacgtggcttaattgttctgctttttctgtagttcaatttcatgtttcttgacccttttgtataaagctacaatattctctcttattgttctttcatatggaatgtattttcaaatgtaaactctcttctctttctctctcctatctctctgtcttttttctctcttagaattggaggatttgccattgtccaggaaagaaacttgcagctttaacctgctgggaatggcaaacgattttactagactttatgtttaaaaataaataaataagggaaattcctaactttgccctccaaagtctaactttggttttcttgttaactggttaaagtgacagtatcttttttccttatctattctattcaaaatgacctttgatagaaatgttggcatttagtagaaatagtgataagttgaggaaagaaataatacaaattggctttcaagtgagacccaaaggaagaactggataaaatcttccaaatccaaaagcatgagatttttctatccaaatatgcaaaaatgacccaagagaactttcttattttgctactgagtcacacaagggaagtggaaggaagaacagttaatttaagaatgaaactataaatcctgatgcctgggggtcaagtattttaagataagagggggaaaaacacataaagtcaaacaaatgttttaaaaattcataacagcaaccttgaaaaaatagacttaaatgaatgcttctagaaacttccagcggctcacaaagaataagcctgccttagggctggcaacatctaagcctctaacagcacagggaagcaaatatcttaccaggcagcctatgaattaacccaaagaagctttggttggttttggtggatttttatcatgccatgttggacatgagattttttagatcttccttcccacattgctagacgtctcactcaaagacatttgttgggagtcacatttgcatcatagacgagacagtccattcatcttagttaaattggattgagaatgccttttgtttccaggaaaatattgatcaccatgaaagaagaatagttttttgtccccagagacattcatttagttgatataatcctaccagaaggaaagcactaagaaacactcgtttgttgtttttaaaggcaacagacttaaagttgtcctcagccaaggaaaaatgatactgcaactttaaaatttaaagtatcttgcactgataaatatatttaaaaattatatgtttataaagttattaatttgtaaaggcagtgttacaaaatgttcagtttatattgttttagattgttttgtaatttttaaaggtgtaaaataacatattttttctttatggaaatctataaaactttctgtagtaaaatgttttcattttactggtatattattgcttcatgttttgtaccatcataagattttgtgcagattttttttacagaaattattattttctatgacaatatgacacttgtaaattgttgtttcaaaatgaacagcgaagccttaactttaaatgacatttgtattctcagacactgagtagcataaaaaccacatagaactgaactgtaacttaaattccaaactatgactactacattccaaagaaacagttgaattaaacattttcataaaatatccc

SEQ ID NO: 159102 - DNA, 497 bp, Homo sapiens
  Payload ID: 11138
  Gene Symbol: NRP1
  Gene Name: neuropilin 1
  ENST ID: ENST00000413802
  CDS Start-End: 1-318
aaccacatttcacaagaagattgtgcaaggagcacgccaggatacgaaggtgaaggagaaggtgacaagaacatctccaggaagccaggcaatgtgttgaagaccttagaccccatcctcatcaccatcatagccatgagtgccctgggggtcctcctgggggctgtctgtggggtcgtgctgtactgtgcctgttggcataatgggatgtcagaaagaaacttgtctgccctggagaactataactttgaacttgtggatggtgtgaagttgaaaaaagacaaactgaatacacagagtacttattcggaggcatgaaggcagacagagatgaaaagacagtcaaaggacggaagtggaaggacgggagtgagctggggagctgttgatctttcactatacaggctgggaagtgtgttgatgaccactgagccaggcttttctcaggagcttcaatgagtatggccgacagacatggacaaggagctgtgttcacc

SEQ ID NO: 159103 - DNA, 518 bp, Homo sapiens
  Payload ID: 11138
  Gene Symbol: NRP1
  Gene Name: neuropilin 1
  ENST ID: ENST00000455749
  CDS Start-End: 1-511
tccaggggggatgttctgtcgctacgaccggctagaaatctgggatggattccctgatgttggccctcacattgggcgttactgtggacagaaaacaccaggtcgaatccgatcctcatcgggcattctctccatggttttttacaccgacagcgcgatagcaaaagaaggtttctcagcaaactacagtgtcttgcagagcagtgtctcagaagatttcaaatgtatggaagctctgggcatggaatcaggagaaattcattctgaccagatcacagcttcttcccagtatagcaccaactggtctgcagagcgctcccgcctgaactaccctgagaatgggtggactcccggagaggattcctaccgagagtggatacaggatgcaaaatacagactccgtgtatcagtggtgcgatcaaaatcttcctcttcaagcacatcattagaacccaggccattaagctcattgaaactgagtttcttttcctataaaataaaaataacgtagccttcac

SEQ ID NO: 159104 - DNA, 372 bp, Homo sapiens
  Payload ID: 11138
  Gene Symbol: NRP1
  Gene Name: neuropilin 1
  ENST ID: ENST00000431894
  CDS Start-End: 1-302
ccactcatggcggactggggctcagaatggagctgctgggctgtgaagtggaagcccctacagctggaccgaccactcccaacgggaacttggtggatgaatgtgatgacgaccaggccaactgccacagtggaacaggtgatgacttccagctcacaggtggcaccactgtgctggccacagaaaagcccacggtcatagacagcaccatacaatcaggctccagattcttcaagcatcatcacaagcagcagtcaatgagacctcaaaaccttcatcataattccattttgctattatagactcaactcagagtcttactatttcatcttgctgattctcatcaatataataaactccatgggcatataa

SEQ ID NO: 159105 - DNA, 4137 bp, Homo sapiens
  Payload ID: 11138
  Gene Symbol: NRP1
  Gene Name: neuropilin 1
  ENST ID: ENST00000432372
  CDS Start-End: 548-2341
gcagggtctctgggaaagacagacagacggacggggagagcactcggagggaaagttgttcctcccagtctcctgtcaggcaattacagacacccggacctcccctgggcgccagctccgcggctccaacgggtccagaaacaagccggattttttttttttcttcctggaaattggctttggtgtgtgttgccctacctccctcctccccctcccacccacagcccccccccggccttttttttttttttttttttttttgagacatggcccgggcagtggctcctggaagaggaacaagtgtgggaaaagggagaggaagccggagctaaatgacaggatgcaggcgacttgagacacaaaaagagaagcgttcctctcggatccaggcattgcctcgctgctttcttttctccaagacgggctgaggattgtacagctctaggcggagttggggctcttcggatcgcttagattctcctctttgctgcatttccccccacgtcctcgttctcccgcgtctgcctgcggacccggagaagggagaatggagagggggctgccgctcctctgcgccgtgctcgccctcgtcctcgccccggccggcgcttttcgcaacgataaatgtggcgatactataaaaattgaaagccccgggtaccttacatctcctggttatcctcattcttatcacccaagtgaaaaatgcgaatggctgattcaggctccggacccataccagagaattatgatcaacttcaaccctcacttcgatttggaggacagagactgcaagtatgactacgtggaagtcttcgatggagaaaatgaaaatggacattttaggggaaagttctgtggaaagatagcccctcctcctgttgtgtcttcagggccatttctttttatcaaatttgtctctgactacgaaacacatggtgcaggattttccatacgttatgaaattttcaagagaggtcctgaatgttcccagaactacacaacacctagtggagtgataaagtcccccggattccctgaaaaatatcccaacagccttgaatgcacttatattgtctttgtgccaaagatgtcagagattatcctggaatttgaaagctttgacctggagcctgactcaaatcctccaggggggatgttctgtcgctacgaccggctagaaatctgggatggattccctgatgttggccctcacattgggcgttactgtggacagaaaacaccaggtcgaatccgatcctcatcgggcattctctccatggttttttacaccgacagcgcgatagcaaaagaaggtttctcagcaaactacagtgtcttgcagagcagtgtctcagaagatttcaaatgtatggaagctctgggcatggaatcaggagaaattcattctgaccagatcacagcttcttcccagtatagcaccaactggtctgcagagcgctcccgcctgaactaccctgagaatgggtggactcccggagaggattcctaccgagagtggatacaggtagacttgggccttctgcgctttgtcacggctgtcgggacacagggcgccatttcaaaagaaaccaagaagaaatattatgtcaagacttacaagatcgacgttagctccaacggggaagactggatcaccataaaagaaggaaacaaacctgttctctttcagggaaacaccaaccccacagatgttgtggttgcagtattccccaaaccactgataactcgatttgtccgaatcaagcctgcaacttgggaaactggcatatctatgagatttgaagtatacggttgcaagataacagattatccttgctctggaatgttgggtatggtgtctggacttatttctgactcccagatcacatcatccaaccaaggggacagaaactggatgcctgaaaacatccgcctggtaaccagtcgctctggctgggcacttccacccgcacctcattcctacatcaatgagtggctccaaatagacctgggggaggagaagatcgtgaggggcatcatcattcagggtgggaagcaccgagagaacaaggtgttcatgaggaagttcaagatcgggtacagcaacaacggctcggactggaagatgatcatggatgacagcaaacgcaaggcgaaggtgagggctggggactgggaggaggtcatcccttatgtccttgacttcaatcaagggcctctggcattctcccgaggaagggcttcttatttccttccagccatgacattagaggaggtgtgtgatggggtcagtaagacccttgattctaggaagacaggaatatggcatgaaaagtgatgtctgagataacatgcaaaagaattgcattgctggtcccattccctggctgtagggatggacagacagctcaacatgcagacaggagacggggaagcccaaggctgacagcagccatccagccagcgctcagaaccccttgcagataccactcagtcgtttgggtctgccctccccccatctcaaacctacccctagtttaagtgctttgtttcttttataaatttttattgtgggccaggctcagtggctcatgcctgtaatcccagcactttgggatgccgagtcgggcggattgtctgagctcaggagttcgagaccagactggacagcacggtgaaaccccatctctactaaaatacaaaaaattaacagggtgtggcagcgtgtgcctgtagtcctagctattctggaggctgaagcaggagaattgcttaaacccgggaggcagaggttgcagtgagctgagattgcaccactgctctctagcctgggtgacagagtgagattccgtctcaaaaaaaaaaaattaattgtgataaaatacatataatatacaatttcccatcttaacctttttagtgtgcagttcaacagtgttaagtatgtgtatattgtgcaaccaatctctagaactttctcatcttgcaaaactgaaactctacacccattaagcaacaactcccagtccccctgcccccagcctctggtgaccacctccactttctgtctgtgtgaattcaaccattttagggacctcatactgtatttgtctttttgtgattggcttatgtcacttaggataatgttttcaagggccatcagtgttatagcattgtgtcagaatttccatccttcgaaaggctggataatattcattgtgtgtttataccacactttgtttatccattcagccactgatggacacttgaattgctgtcacctttagctattgtgaataatgcttaagtatatttctttatgcgttgaaaccttttaagatgcagtaggctcttgataatccagtgaaaagaaaaggaaatctcaacacaaaaacattccattccaacatccaccaaaacccgtggtataatttttttcaaccaacaaatcaacctcagtcattatgttttacttagagtgatggctaaatttatttgcgaacatgcaacagcaacttggaaaggataccctggagtgtgctgggtggcccagaagctggtttaggattcaaatatggaccaacctacagacaactagcagtttaagttctgtgttcagtgtgggaattatattcagcgatggtatttctcacaccaatacaattggccttttggtcttagcctttccatccctgctttggccaggacctactcctcttgtgaaaaacagattttagcttattgaagggaatattaccctcactcccactctaagcaagtgtgggaacatggcttaatatagtgactcaagccagaggcattgcaggcagcaaagaagccaggctgtgctgccagctcccactccctccagatgtgaaggctccaaggaaacctccgtgtccccgacaggccaccggctaccactagagcagcgggccactggcagggctgggtgccatcagaaatatctgaatctctctcccatctctcccttccttaacttgtggtttctaaaatattttcagtgttatatttatctctctgtgcagctaccttttttcttgtgtccctttcattttccccttttgtgccttgtttggggggaagaaaaagtaaaataaacatcagaaactg

SEQ ID NO: 159106 - DNA, 579 bp, Homo sapiens
  Payload ID: 11138
  Gene Symbol: NRP1
  Gene Name: neuropilin 1
  ENST ID: ENST00000418675
  CDS Start-End: 1-233
cccctacagctggaccgaccactcccaacgggaacttggtggatgaatgtgatgacgaccaggccaactgccacagtggaacaggtgatgacttccagctcacaggtggcaccactgtgctggccacagaaaagcccacggtcatagacagcaccatacaatcagccaggctggaagtttccacattgaacctctcactccataaccctccccaacaaaaggcattgatctaaaaacatatcctttaaataaccaaattgccacaagttacatgatcaagacaagaagataaaagagcagtaaaatacaaaaacttagagcggttcacctggttaaatgtacaggatggggaaggacattggaaggtaaaggcagactgtcattctctgaagcgagaagtgcctgaaacattttttcaggcaaagcggttccatgtcctggtcatttcaaaaatatccaagttcctacattttatggtatcatcagaatatgaagagccaaaagaatggatgatgtcattttctgttctataaacaataaatgtaatgtattaacaaagtaaatacaggcagaactgtg

SEQ ID NO: 159107 - DNA, 523 bp, Homo sapiens
  Payload ID: 11138
  Gene Symbol: NRP1
  Gene Name: neuropilin 1
  ENST ID: ENST00000466932
  CDS Start-End: 1-182
acatcaatgagtggctccaaatagacctgggggaggagaagatcgtgaggggcatcatcattcagggtgggaagcaccgagagaacaaggtgttcatgaggaagttcaagatcgggtacagcaacaacggctcggactggaagatgatcatggatgacagcaaacgcaaggcattgatctaaaaacatatcctttaaataaccaaattgccacaagttacatgatcaagacaagaagataaaagagcagtaaaatacaaaaacttagagcggttcacctggttaaatgtacaggatggggaaggacattggaaggtaaaggcagactgtcattctctgaagcgagaagtgcctgaaacattttttcaggcaaagcggttccatgtcctggtcatttcaaaaatatccaagttcctacattttatggtatcatcagaatatgaagagccaaaagaatggatgatgtcattttctgttctataaacaataaatgtaatgtattaacaaagtaaatacaggcagaa

SEQ ID NO: 159108 - DNA, 5909 bp, Homo sapiens
  Payload ID: 11139
  Gene Symbol: NRP2
  Gene Name: neuropilin 2
  Uniprot ID: O60462
  ENST ID: ENST00000272849
  CDS Start-End: 1-2721
atggatatgtttcctctcacctgggttttcttagccctctacttttcaagacaccaagtgagaggccaaccagacccaccgtgcggaggtcgtttgaattccaaagatgctggctatatcacctctcccggttacccccaggactacccctcccaccagaactgcgagtggattgtttacgcccccgaacccaaccagaagattgtcctcaacttcaaccctcactttgaaatcgagaagcacgactgcaagtatgactttatcgagattcgggatggggacagtgaatccgcagacctcctgggcaaacactgtgggaacatcgccccgcccaccatcatctcctcgggctccatgctctacatcaagttcacctccgactacgcccggcagggggcaggcttctctctgcgctacgagatcttcaagacaggctctgaagattgctcaaaaaacttcacaagccccaacgggaccatcgaatctcctgggtttcctgagaagtatccacacaacttggactgcacctttaccatcctggccaaacccaagatggagatcatcctgcagttcctgatctttgacctggagcatgaccctttgcaggtgggagagggggactgcaagtacgattggctggacatctgggatggcattccacatgttggccccctgattggcaagtactgtgggaccaaaacaccctctgaacttcgttcatcgacggggatcctctccctgacctttcacacggacatggcggtggccaaggatggcttctctgcgcgttactacctggtccaccaagagccactagagaactttcagtgcaatgttcctctgggcatggagtctggccggattgctaatgaacagatcagtgcctcatctacctactctgatgggaggtggacccctcaacaaagccggctccatggtgatgacaatggctggacccccaacttggattccaacaaggagtatctccaggtggacctgcgctttttaaccatgctcacggccatcgcaacacagggagcgatttccagggaaacacagaatggctactatgtcaaatcctacaagctggaagtcagcactaatggagaggactggatggtgtaccggcatggcaaaaaccacaaggtatttcaagccaacaacgatgcaactgaggtggttctgaacaagctccacgctccactgctgacaaggtttgttagaatccgccctcagacctggcactcaggtatcgccctccggctggagctcttcggctgccgggtcacagatgctccctgctccaacatgctggggatgctctcaggcctcattgcagactcccagatctccgcctcttccacccaggaatacctctggagccccagtgcagcccgcctggttagcagccgctcgggctggttccctcgaatccctcaggcccagcccggtgaggagtggcttcaggtagatctgggaacacccaagacagtgaaaggtgtcatcatccagggagcccgcggaggagacagtatcactgctgtggaagccagagcatttgtgcgcaagttcaaagtctcctacagcctaaacggcaaggactgggaatacattcaggaccccaggacccagcagccaaagctgttcgaagggaacatgcactatgacacccctgacatccgaaggtttgaccccattccggcacagtatgtgcgggtatacccggagaggtggtcgccggcggggattgggatgcggctggaggtgctgggctgtgactggacagactccaagcccacggtagagacgctgggacccactgtgaagagcgaagagacaaccaccccctaccccaccgaagaggaggccacagagtgtggggagaactgcagctttgaggatgacaaagatttgcagctcccttcgggattcaattgcaacttcgatttcctcgaggagccctgtggttggatgtatgaccatgccaagtggctccggaccacctgggccagcagctccagcccaaacgaccggacgtttccagatgacaggaatttcttgcggctgcagagtgacagccagagagagggccagtatgcccggctcatcagcccccctgtccacctgccccgaagcccggtgtgcatggagttccagtaccaggccacgggcggccgcggggtggcgctgcaggtggtgcgggaagccagccaggagagcaagttgctgtgggtcatccgtgaggaccagggcggcgagtggaagcacgggcggatcatcctgcccagctacgacatggagtaccagattgtgttcgagggagtgatagggaaaggacgttccggagagattgccattgatgacattcggataagcactgatgtcccactggagaactgcatggaacccatctcggcttttgcaggtgagaattttaaagggggcaccctcctgccagggaccgagcccacagtggacacggtgcccatgcagcccatcccagcctactggtattacgtaatggccgccgggggcgccgtgctggtgctggtctccgtcgcgctggccctggtgctccactaccaccggttccgctatgcggccaagaagaccgatcactccatcacctacaaaacctcccactacaccaacggggcccctctggcggtggagcccaccctaaccattaagctagagcaagaccgtggctcgcactgctgagggccgaagcaagaacagcacccaaaacaaacgagaaagactgcaaacatgttgcctcgattttgcacttttttctcctcgcctagtttctgtgtgaactctcagacatctctttcccggatccccaaccctgagcactcttatcaatcccaaccatcctccttgggttcattttggtttctggtttttctttttcctttttgttgattccaaaccaacaaacccaactctaatgctgcatcttggactatccgaagagatccacccccaagcactccacaactcaaggctcagctggttttgttccagagactggttcgcttgttttttccccttgccttatcccatacctcctctcagtgggcagtctgccaggagacgtgaggggaagcctggatctgtgtgtatgtacatagtagacatgtgtgtgtgtgaatagctctctgtgtgtgggtgtgtgagagagcggctggttcattgtgtgtgtgtttgggcgaggggtgagtgttcagagagggcccctttaactcttatgttacttctcctggggtacattttacaagaaaataatatactgtacaagttttgtttacttggagaagagattgaagctttttgttgccttatctagctctggctgggtttctgttggctgtcattgtcatctccaggtacctaaagaaatagaggccacatgggatgcagtgtggcttctcccatccctatccccaacccacctgacccaagagaaggttcccctagcacactcaaacaagacccccttgtcttctggtgtctttgaaatgtcaagataacagccactgggtgtctgcggaaccacctctccagccctaaagcaaatctgtctcatgttgccttataaaagagaagctcataatgaatgtttagcctttatcagttacatccaatcttggaataagtcatagagaataacaagtctgggactgacgtaggaaaaacagtagtctgtttaagttgagaggaggaggaggtggacgagagaagggaggagagggaagaactgaaatgtctcctcacccagggtggttattgggcccaacttgggatggggttgagtacgaaggttaaaaaacatatactttggtattatattggtcattgtaatagcagttgtaaaatatggggggaaaagggatcatttgctttcctttcatggtgttaatgtgtgcctgaatctatagccgctaaaatgtaaggctgtccacctgacttatttaaatattatcagagaatagaaagtaatcactttttaagtgtacctatgtgctgccccttaaaacattcatggcatctggcaaatagacccttgtaggctggcctggcatattcagatgttgccgcatcatcacagagaaggtcaaatgaagatgtaaccattgctgctcatgtgtcttctctaagcaacaaggggagcgggatgtaagagagaagttgctaatgatactgtacaaaggatggattaaataatgaagtcaatttcattgatagaaaatgcaaattttaagattctcagtgtatgaggtctcagcctcgggagcatttattttttactttcctgctaaaaatccactggggaggtataaaattcactccaaagaagtttgcctgggccaaaagcctccaggttccttctgagaacaaaatactaatgattttttttttttttttggctgcttgggagagactttcagcattctttcacgatatccagatatgtcccttcagcacacacactcaactttctcatctggttcgtttcatcctcccgaaagaacggtgctctcccactcttactctatttcaaagagctactctgtctcaaccacagcagccctgccaagaaaaggcaagatgaaaggctagagcatgtgctaccttgagatttcaagaagtgtcctacctcagctgaagatggagaaacggggagtggagaggggatcagcccagggtaccatgtgatgactaatatgccactcattaagggcttttacctcggctgtccacatccagtcatgcatttggggccaggcatgcctgcgaaatgattgacattcctgtaggtgccccatagaggtgtggcattgagaaattatgtctggaaaatacagccagtgtagtgaccagctgagttaccatataccctgatgattccccttctgtaacagaaggtgacaacaactttgtgaactttctatatctttatctgatgccccaagtggcatcatctttatgtacatgccttagttgagaatatgagactgctctaatctttgtgaatgccttcacacttcagctgaggatgtcaccttctctgtcactccccatcctgcaacctctgcctttgctctgtctaccccagcaattttcatagtgttatccaggtactgtgctaaaaggtcagctcttctgtaaaatgccatgcttcgcagcttcaaaaagcaaaattctgtatttcatggagggagggaagggtcattctcttctaagaaaaatagactggacaggcgaatgcatgcatgcatgtgtttagagttgcttctcagaagacaaagagatgatagcaactattaaaatatgaatgaatgaatgagtgaatgagttgaaggcctagctcgggctgataaagcttttgccttagtagaggttttatgtcaacaccttcaggagggaagcccttatttctgggttgaactccccttccatgatattatgctagcaattgccatcacttagttcctggcgaaggcagaaaaagaaaacaaaaaatcagcattgtcattgacaaaactggatgctgaagataaagtaaaattgtcttttcccttgtcccacatttttgggattaaagccagaattgaataggaaatacagtactatttctgaagttgatagccgatctttaagaagaccctgtctttaaaatgaaactagcaggcaaacacctaaataatcgaaaattaccaaagaacaacaacgaaacaagaaaacctaaagatttttacttcctattcttattcctttccttattactgtgacaccccttgcattgctcagttgcctgtgtgtcaaaataacttgtggacgttggaaattatttgaaaatgtattgtgtggaatgtaataaaatgatgatatttttatacaaa

SEQ ID NO: 159109 - DNA, 3367 bp, Homo sapiens
  Payload ID: 11139
  Gene Symbol: NRP2
  Gene Name: neuropilin 2
  ENST ID: ENST00000357118
  CDS Start-End: 32-2737
cccagctctggaaagagccaccttctccaaaatggatatgtttcctctcacctgggttttcttagccctctacttttcaagacaccaagtgagaggccaaccagacccaccgtgcggaggtcgtttgaattccaaagatgctggctatatcacctctcccggttacccccaggactacccctcccaccagaactgcgagtggattgtttacgcccccgaacccaaccagaagattgtcctcaacttcaaccctcactttgaaatcgagaagcacgactgcaagtatgactttatcgagattcgggatggggacagtgaatccgcagacctcctgggcaaacactgtgggaacatcgccccgcccaccatcatctcctcgggctccatgctctacatcaagttcacctccgactacgcccggcagggggcaggcttctctctgcgctacgagatcttcaagacaggctctgaagattgctcaaaaaacttcacaagccccaacgggaccatcgaatctcctgggtttcctgagaagtatccacacaacttggactgcacctttaccatcctggccaaacccaagatggagatcatcctgcagttcctgatctttgacctggagcatgaccctttgcaggtgggagagggggactgcaagtacgattggctggacatctgggatggcattccacatgttggccccctgattggcaagtactgtgggaccaaaacaccctctgaacttcgttcatcgacggggatcctctccctgacctttcacacggacatggcggtggccaaggatggcttctctgcgcgttactacctggtccaccaagagccactagagaactttcagtgcaatgttcctctgggcatggagtctggccggattgctaatgaacagatcagtgcctcatctacctactctgatgggaggtggacccctcaacaaagccggctccatggtgatgacaatggctggacccccaacttggattccaacaaggagtatctccaggtggacctgcgctttttaaccatgctcacggccatcgcaacacagggagcgatttccagggaaacacagaatggctactatgtcaaatcctacaagctggaagtcagcactaatggagaggactggatggtgtaccggcatggcaaaaaccacaaggtatttcaagccaacaacgatgcaactgaggtggttctgaacaagctccacgctccactgctgacaaggtttgttagaatccgccctcagacctggcactcaggtatcgccctccggctggagctcttcggctgccgggtcacagatgctccctgctccaacatgctggggatgctctcaggcctcattgcagactcccagatctccgcctcttccacccaggaatacctctggagccccagtgcagcccgcctggttagcagccgctcgggctggttccctcgaatccctcaggcccagcccggtgaggagtggcttcaggtagatctgggaacacccaagacagtgaaaggtgtcatcatccagggagcccgcggaggagacagtatcactgctgtggaagccagagcatttgtgcgcaagttcaaagtctcctacagcctaaacggcaaggactgggaatacattcaggaccccaggacccagcagccaaagctgttcgaagggaacatgcactatgacacccctgacatccgaaggtttgaccccattccggcacagtatgtgcgggtatacccggagaggtggtcgccggcggggattgggatgcggctggaggtgctgggctgtgactggacagactccaagcccacggtagagacgctgggacccactgtgaagagcgaagagacaaccaccccctaccccaccgaagaggaggccacagagtgtggggagaactgcagctttgaggatgacaaagatttgcagctcccttcgggattcaattgcaacttcgatttcctcgaggagccctgtggttggatgtatgaccatgccaagtggctccggaccacctgggccagcagctccagcccaaacgaccggacgtttccagatgacaggaatttcttgcggctgcagagtgacagccagagagagggccagtatgcccggctcatcagcccccctgtccacctgccccgaagcccggtgtgcatggagttccagtaccaggccacgggcggccgcggggtggcgctgcaggtggtgcgggaagccagccaggagagcaagttgctgtgggtcatccgtgaggaccagggcggcgagtggaagcacgggcggatcatcctgcccagctacgacatggagtaccagattgtgttcgagggagtgatagggaaaggacgttccggagagattgccattgatgacattcggataagcactgatgtcccactggagaactgcatggaacccatctcggcttttgcagggggcaccctcctgccagggaccgagcccacagtggacacggtgcccatgcagcccatcccagcctactggtattacgtaatggccgccgggggcgccgtgctggtgctggtctccgtcgcgctggccctggtgctccactaccaccggttccgctatgcggccaagaagaccgatcactccatcacctacaaaacctcccactacaccaacggggcccctctggcggtggagcccaccctaaccattaagctagagcaagaccgtggctcgcactgctgagggccgaagcaagaacagcacccaaaacaaacgagaaagactgcaaacatgttgcctcgattttgcacttttttctcctcgcctagtttctgtgtgaactctcagacatctctttcccggatccccaaccctgagcactcttatcaatcccaaccatcctccttgggttcattttggtttctggtttttctttttcctttttgttgattccaaaccaacaaacccaactctaatgctgcatcttggactatccgaagagatccacccccaagcactccacaactcaaggctcagctggttttgttccagagactggttcgcttgttttttccccttgccttatcccatacctcctctcagtgggcagtctgccaggagacgtgaggggaagcctggatctgtgtgtatgtacatagtagacatgtgtgtgtgtgaatagctctctgtgtgtgggtgtgtgagagagcggctggttcattgtgtgtgtgtttgggcgaggggtgagtgttcagagagggcccctttaactcttatgttacttctcctggggtacattttacaagaaaataatatactgtacaagttttgtttacttggagaagagattgaagctttttgttgccttatcta

SEQ ID NO: 159110 - DNA, 2926 bp, Homo sapiens
  Payload ID: 11139
  Gene Symbol: NRP2
  Gene Name: neuropilin 2
  ENST ID: ENST00000357785
  CDS Start-End: 32-2812
cccagctctggaaagagccaccttctccaaaatggatatgtttcctctcacctgggttttcttagccctctacttttcaagacaccaagtgagaggccaaccagacccaccgtgcggaggtcgtttgaattccaaagatgctggctatatcacctctcccggttacccccaggactacccctcccaccagaactgcgagtggattgtttacgcccccgaacccaaccagaagattgtcctcaacttcaaccctcactttgaaatcgagaagcacgactgcaagtatgactttatcgagattcgggatggggacagtgaatccgcagacctcctgggcaaacactgtgggaacatcgccccgcccaccatcatctcctcgggctccatgctctacatcaagttcacctccgactacgcccggcagggggcaggcttctctctgcgctacgagatcttcaagacaggctctgaagattgctcaaaaaacttcacaagccccaacgggaccatcgaatctcctgggtttcctgagaagtatccacacaacttggactgcacctttaccatcctggccaaacccaagatggagatcatcctgcagttcctgatctttgacctggagcatgaccctttgcaggtgggagagggggactgcaagtacgattggctggacatctgggatggcattccacatgttggccccctgattggcaagtactgtgggaccaaaacaccctctgaacttcgttcatcgacggggatcctctccctgacctttcacacggacatggcggtggccaaggatggcttctctgcgcgttactacctggtccaccaagagccactagagaactttcagtgcaatgttcctctgggcatggagtctggccggattgctaatgaacagatcagtgcctcatctacctactctgatgggaggtggacccctcaacaaagccggctccatggtgatgacaatggctggacccccaacttggattccaacaaggagtatctccaggtggacctgcgctttttaaccatgctcacggccatcgcaacacagggagcgatttccagggaaacacagaatggctactatgtcaaatcctacaagctggaagtcagcactaatggagaggactggatggtgtaccggcatggcaaaaaccacaaggtatttcaagccaacaacgatgcaactgaggtggttctgaacaagctccacgctccactgctgacaaggtttgttagaatccgccctcagacctggcactcaggtatcgccctccggctggagctcttcggctgccgggtcacagatgctccctgctccaacatgctggggatgctctcaggcctcattgcagactcccagatctccgcctcttccacccaggaatacctctggagccccagtgcagcccgcctggttagcagccgctcgggctggttccctcgaatccctcaggcccagcccggtgaggagtggcttcaggtagatctgggaacacccaagacagtgaaaggtgtcatcatccagggagcccgcggaggagacagtatcactgctgtggaagccagagcatttgtgcgcaagttcaaagtctcctacagcctaaacggcaaggactgggaatacattcaggaccccaggacccagcagccaaagctgttcgaagggaacatgcactatgacacccctgacatccgaaggtttgaccccattccggcacagtatgtgcgggtatacccggagaggtggtcgccggcggggattgggatgcggctggaggtgctgggctgtgactggacagactccaagcccacggtagagacgctgggacccactgtgaagagcgaagagacaaccaccccctaccccaccgaagaggaggccacagagtgtggggagaactgcagctttgaggatgacaaagatttgcagctcccttcgggattcaattgcaacttcgatttcctcgaggagccctgtggttggatgtatgaccatgccaagtggctccggaccacctgggccagcagctccagcccaaacgaccggacgtttccagatgacaggaatttcttgcggctgcagagtgacagccagagagagggccagtatgcccggctcatcagcccccctgtccacctgccccgaagcccggtgtgcatggagttccagtaccaggccacgggcggccgcggggtggcgctgcaggtggtgcgggaagccagccaggagagcaagttgctgtgggtcatccgtgaggaccagggcggcgagtggaagcacgggcggatcatcctgcccagctacgacatggagtaccagattgtgttcgagggagtgatagggaaaggacgttccggagagattgccattgatgacattcggataagcactgatgtcccactggagaactgcatggaacccatctcggcttttgcagtggacatcccagaaatacatgagagagaaggatatgaagatgaaattgatgatgaatacgaggtggactggagcaattcttcttctgcaacctcagggtctggcgccccctcgaccgacaaagaaaagagctggctgtacaccctggatcccatcctcatcaccatcatcgccatgagctcactgggcgtcctcctgggggccacctgtgcaggcctcctgctctactgcacctgttcctactcgggcctgagctcccgaagctgcaccacactggagaactacaacttcgagctctacgatggccttaagcacaaggtcaagatgaaccaccaaaagtgctgctccgaggcatgacggattgcacctgaatcctatctgacgtttcattccagcaagaggggctggggaagattacatttttttttcctttggaaactgaatgccataatctcgatcaaaccgatccag

SEQ ID NO: 159111 - DNA, 6662 bp, Homo sapiens
  Payload ID: 11139
  Gene Symbol: NRP2
  Gene Name: neuropilin 2
  ENST ID: ENST00000360409
  CDS Start-End: 792-3587
cagagatcgcgagcgaggcaccagcctgcagccggcccccagcacatcctcagccgcacagacactcggcgaggtggaggtgagggcgggcgccagcgaactcggagaggggctcgctcactcccaggcgatcccagccgccaccgccgccgcaccagcagcagcaacagcagcagcagcttccttcctcagactcccctcgagaggctggccaagcgggtgtagccgttgggggaggctcccgccgggggaacccggcgaggacaagagcagggcggccgccttccactcgggctgtccggcggcggctgcctccgcccgtgtgtccgtcaagggtgccgcgggatgtgtgtcagtttacgcctctgagatcacacagctgcctgggggccgtgtgatgcccaaggcaagtcttggttttaattattattattatcattattgttacgcttggctttcgggaaatactcgtgatatttgtaggataaaggaaatgacactttgaggaactggagagaacatatatgcgttttgtttttaagaggaaaaccgtgttctcttcccggcttgttccctctttgctgatttcaggagctactctcctcctggtgaggtggaaattccagcaagaatagaggtgaagacaagccaccaggactcaggagggaaacgctgaccattagaaacctctgcataagacgttgtaaggaggaaaataaaagagagaaaaacacaaagatttaaacaagaaacctacgaacccagctctggaaagagccaccttctccaaaatggatatgtttcctctcacctgggttttcttagccctctacttttcaagacaccaagtgagaggccaaccagacccaccgtgcggaggtcgtttgaattccaaagatgctggctatatcacctctcccggttacccccaggactacccctcccaccagaactgcgagtggattgtttacgcccccgaacccaaccagaagattgtcctcaacttcaaccctcactttgaaatcgagaagcacgactgcaagtatgactttatcgagattcgggatggggacagtgaatccgcagacctcctgggcaaacactgtgggaacatcgccccgcccaccatcatctcctcgggctccatgctctacatcaagttcacctccgactacgcccggcagggggcaggcttctctctgcgctacgagatcttcaagacaggctctgaagattgctcaaaaaacttcacaagccccaacgggaccatcgaatctcctgggtttcctgagaagtatccacacaacttggactgcacctttaccatcctggccaaacccaagatggagatcatcctgcagttcctgatctttgacctggagcatgaccctttgcaggtgggagagggggactgcaagtacgattggctggacatctgggatggcattccacatgttggccccctgattggcaagtactgtgggaccaaaacaccctctgaacttcgttcatcgacggggatcctctccctgacctttcacacggacatggcggtggccaaggatggcttctctgcgcgttactacctggtccaccaagagccactagagaactttcagtgcaatgttcctctgggcatggagtctggccggattgctaatgaacagatcagtgcctcatctacctactctgatgggaggtggacccctcaacaaagccggctccatggtgatgacaatggctggacccccaacttggattccaacaaggagtatctccaggtggacctgcgctttttaaccatgctcacggccatcgcaacacagggagcgatttccagggaaacacagaatggctactatgtcaaatcctacaagctggaagtcagcactaatggagaggactggatggtgtaccggcatggcaaaaaccacaaggtatttcaagccaacaacgatgcaactgaggtggttctgaacaagctccacgctccactgctgacaaggtttgttagaatccgccctcagacctggcactcaggtatcgccctccggctggagctcttcggctgccgggtcacagatgctccctgctccaacatgctggggatgctctcaggcctcattgcagactcccagatctccgcctcttccacccaggaatacctctggagccccagtgcagcccgcctggttagcagccgctcgggctggttccctcgaatccctcaggcccagcccggtgaggagtggcttcaggtagatctgggaacacccaagacagtgaaaggtgtcatcatccagggagcccgcggaggagacagtatcactgctgtggaagccagagcatttgtgcgcaagttcaaagtctcctacagcctaaacggcaaggactgggaatacattcaggaccccaggacccagcagccaaagctgttcgaagggaacatgcactatgacacccctgacatccgaaggtttgaccccattccggcacagtatgtgcgggtatacccggagaggtggtcgccggcggggattgggatgcggctggaggtgctgggctgtgactggacagactccaagcccacggtagagacgctgggacccactgtgaagagcgaagagacaaccaccccctaccccaccgaagaggaggccacagagtgtggggagaactgcagctttgaggatgacaaagatttgcagctcccttcgggattcaattgcaacttcgatttcctcgaggagccctgtggttggatgtatgaccatgccaagtggctccggaccacctgggccagcagctccagcccaaacgaccggacgtttccagatgacaggaatttcttgcggctgcagagtgacagccagagagagggccagtatgcccggctcatcagcccccctgtccacctgccccgaagcccggtgtgcatggagttccagtaccaggccacgggcggccgcggggtggcgctgcaggtggtgcgggaagccagccaggagagcaagttgctgtgggtcatccgtgaggaccagggcggcgagtggaagcacgggcggatcatcctgcccagctacgacatggagtaccagattgtgttcgagggagtgatagggaaaggacgttccggagagattgccattgatgacattcggataagcactgatgtcccactggagaactgcatggaacccatctcggcttttgcaggtgagaattttaaagtggacatcccagaaatacatgagagagaaggatatgaagatgaaattgatgatgaatacgaggtggactggagcaattcttcttctgcaacctcagggtctggcgccccctcgaccgacaaagaaaagagctggctgtacaccctggatcccatcctcatcaccatcatcgccatgagctcactgggcgtcctcctgggggccacctgtgcaggcctcctgctctactgcacctgttcctactcgggcctgagctcccgaagctgcaccacactggagaactacaacttcgagctctacgatggccttaagcacaaggtcaagatgaaccaccaaaagtgctgctccgaggcatgacggattgcacctgaatcctatctgacgtttcattccagcaagaggggctggggaagattacatttttttttcctttggaaactgaatgccataatctcgatcaaaccgatccagaataccgaaggtatggacaggacagaaaagcgagtcgcaggaggaagggagatgcagccgcacaggggatgattaccctcctaggaccgcggtggctaagtcattgcaggaacggggctgtgttctctgctgggacaaaacaggagctcatctctttggggtcacagttctattttgtttgtgagtttgtattattattattattattattattattatattttatttctttggtctgtgagcaactcaaagaggcagaagaggagaatgacttttccagaatagaagtggagcagtgatcattattctccgctttctctttctaatcaacacttgaaaagcaaagtgtcttttcagcctttccatctttacaaataaaactcaaaaaagccgtccagcttatcccatcctctgattgtcttctgacttaagggatttactgtggtgtaggttctgccagccaaccctacaagctgccatttccagtcctagcatttaagtaggatgttgttgcctttaacttttcttatccaggggaaaattgccattttagggtcagcatgaacagctctttcttgtatgcgatttaaaacaaactggaaaggaaacttcacacgtcaaaatccatagaagcgcctggacgaggcttaaagtgctttgtgagtgaataggagccattcgctaattctagacccacagtgtctggtggtggggcttcccttgtggggcttctggtggtggttttgccttttcttttccctcctccatgttcttctaaaacatatacatatatacatacacacatacacatattcttcaggtctctaagcccctggaagcagcattgtgtgatattctcagaggcaggggaaaatagagggaaaaatagagactattggtatgttctccccatcagcgagttattgtaactggtcaccactggacgggaaggagaacagaggagagggaaagagaagcccaacctctgtgatcatatgagggccaaggctgagcagtgtagacagagaccctttgaaatgcatttgtctctcaaatagactagtaaacaccgacttctcctttgggttacaaacaccatttcaacctttcgggagagtcagagctaggatgtacaagaactgattctaaccagaagtccgcaagtactgtggacaagaatgcttaaccatgctgcttcagccttgagagacctaggttcttacacatatgcacacacgcatacacacatgcacgcacacacacatacacacatgcacgcacgcacgcatgcacaccaatttatgtttttattaagtgccttgaaaaaatgaagaaaaatgtattttccctttatgtaaaaattagtgaatatcttatgaattaaggcattcctctttccctaaccccgatggctccattcccaagtaccccaactcactgctgatcctattaaaggaatgagtcctgctacccgagtggtagtcatagccctagatgactctcaactactcttcaaagggaggcatcaggaatagaatgaaactgtgtgaaggataagattgttcgcatcaagatccaaatcttgatttcatattaacgcctaaggattgcctgtgtgctggaaatatatttgaaactcaaccagtatgcccagcctattgcatatcattgtcagaccatttttgctgctgtggtcacccacgatttcatttgtcttatacccaggtgaaaggggaagggtgaatgggactggctggttcctttaaatgttaacttatggaaatgctagttcaaatggtaatgtcacagtgttttgtatgcagagagcaagagttcaaccaacagctgtttattcatgtgtgtgtgtctttgctgctttgagttctctgtatctactgtgtatgtgaatggtcatgtgggactcagtggtggtgttgtgactttgacctagggtccgagtgtcacagctgatcttggcactcggcactcattggcacagtggtagttagaggtgaaaagtagagctgtcaagcccaagggcttagctttagggctcctcctgagttcggcccacagtagaagcaagattttaactagccccttttcctcttcaccctcccatgatgcgcagtgttcagaaagctggtaagtcctagggatttccagaagtagcctgcagaagaaggtaagtttgaaagccactccaggggtcctgatgctgtcatgctcagtgagccattttacagttctccaaagtctagccctgtttcggacctgcacttcacctctaagttatgtacaactcaacctgcatccctctaaaagtcctatatccatattcaccattggctaatttgaggccctgagtgggccttgaatgctaaaaagaagcagggtacgcagggctacatgtagataccacaccaaggctggaggctggtctgtcataagacagaaagaaagacgctgggcccaattttgacttggccaggggacaccttggtgtgtttgttatctttatctgtgggtaggctagctgacccatctccttgagtcattccctttgggaaaccccactgccagtattgatctcctttttgccttgtactgaatgacacattacctccacactctcccggactaggtggtcaacagggccacagggttgctttctgtctttggtggggcaggggagttgacagggatgagggtccaaggaataagcatgaatgacaagaaaacaagggaaagagttaacctgtcacatagcaggttaactttttcagggtttgcagttagaggtattcgaccattcactggctgagccagatcacgggaacttgagagcttttactgtgattcttcaatgtaaaaaataaacaacaatgtcaaactgtgtttatatgatttgtataaagcctttttaagattactatttaaataaacattataccagagata

SEQ ID NO: 159112 - DNA, 2386 bp, Homo sapiens
  Payload ID: 11139
  Gene Symbol: NRP2
  Gene Name: neuropilin 2
  Uniprot ID: O60462
  ENST ID: ENST00000417189
  CDS Start-End: 600-2267
cgcgagcgaggcaccagcctgcagccggcccccagcacatcctcagccgcacagacactcggcgaggtggaggtgagggcgggcgccagcgaactcggagaggggctcgctcactcccaggcgatcccagccgccaccgccgccgcaccagcagcagcaacagcagcagcagcttccttcctcagactcccctcgagaggctggccaagcgggtgtagccgttgggggaggctcccgccgggggaacccggcgaggacaagagcagggcggccgccttccactcgggctgtccggcggcggctgcctccgcccgtgtgtccgtcaagggtgccgcgggatgtgtgtcagtttacgcctctgagatcacacagctgcctgggggccgtgtgatgcccaaggagctactctcctcctggtgaggtggaaattccagcaagaatagaggtgaagacaagccaccaggactcaggagggaaacgctgaccattagaaacctctgcataagacgttgtaaggaggaaaataaaagagagaaaaacacaaagatttaaacaagaaacctacgaacccagctctggaaagagccaccttctccaaaatggatatgtttcctctcacctgggttttcttagccctctacttttcaagacaccaagtgagaggccaaccagacccaccgtgcggaggtcgtttgaattccaaagatgctggctatatcacctctcccggttacccccaggactacccctcccaccagaactgcgagtggattgtttacgcccccgaacccaaccagaagattgtcctcaacttcaaccctcactttgaaatcgagaagcacgactgcaagtatgactttatcgagattcgggatggggacagtgaatccgcagacctcctgggcaaacactgtgggaacatcgccccgcccaccatcatctcctcgggctccatgctctacatcaagttcacctccgactacgcccggcagggggcaggcttctctctgcgctacgagatcttcaagacaggctctgaagattgctcaaaaaacttcacaagccccaacgggaccatcgaatctcctgggtttcctgagaagtatccacacaacttggactgcacctttaccatcctggccaaacccaagatggagatcatcctgcagttcctgatctttgacctggagcatgaccctttgcaggtgggagagggggactgcaagtacgattggctggacatctgggatggcattccacatgttggccccctgattggcaagtactgtgggaccaaaacaccctctgaacttcgttcatcgacggggatcctctccctgacctttcacacggacatggcggtggccaaggatggcttctctgcgcgttactacctggtccaccaagagccactagagaactttcagtgcaatgttcctctgggcatggagtctggccggattgctaatgaacagatcagtgcctcatctacctactctgatgggaggtggacccctcaacaaagccggctccatggtgatgacaatggctggacccccaacttggattccaacaaggagtatctccaggtggacctgcgctttttaaccatgctcacggccatcgcaacacagggagcgatttccagggaaacacagaatggctactatgtcaaatcctacaagctggaagtcagcactaatggagaggactggatggtgtaccggcatggcaaaaaccacaaggtatttcaagccaacaacgatgcaactgaggtggttctgaacaagctccacgctccactgctgacaaggtttgttagaatccgccctcagacctggcactcaggtatcgccctccggctggagctcttcggctgccgggtcacagatgctccctgctccaacatgctggggatgctctcaggcctcattgcagactcccagatctccgcctcttccacccaggaatacctctggagccccagtgcagcccgcctggttagcagccgctcgggctggttccctcgaatccctcaggcccagcccggtgaggagtggcttcaggtagatctgggaacacccaagacagtgaaaggtgtcatcatccagggagcccgcggaggagacagtatcactgctgtggaagccagagcatttgtgcgcaagttcaaagtctcctacagcctaaacggcaaggactgggaatacattcaggaccccaggacccagcagccaaaggtaggctgttcttggaggcctctgtaacgttaccctcaacagggaggctaagtgtggtacagggagttgagactgatgatgtcccatctaaacagtcgtcatccaactcctgaaatccaataaaacaaatatcgtttgagagatta

SEQ ID NO: 159113 - DNA, 583 bp, Homo sapiens
  Payload ID: 11139
  Gene Symbol: NRP2
  Gene Name: neuropilin 2
  ENST ID: ENST00000450507
  CDS Start-End: 279-583
agagatcgcgagcgaggcaccagcctgcagccggcccccagcacatcctcagccgcacagacactcggcgaggtggaggagctactctcctcctggtgaggtggaaattccagcaagaatagaggtgaagacaagccaccaggactcaggagggaaacgctgaccattagaaacctctgcataagacgttgtaaggaggaaaataaaagagagaaaaacacaaagatttaaacaagaaacctacgaacccagctctggaaagagccaccttctccaaaatggatatgtttcctctcacctgggttttcttagccctctacttttcaagacaccaagtgagaggccaaccagacccaccgtgcggaggtcgtttgaattccaaagatgctggctatatcacctctcccggttacccccaggactacccctcccaccagaactgcgagtggattgtttacgcccccgaacccaaccagaagattgtcctcaacttcaaccctcactttgaaatcgagaagcacgactgcaagtatgactttatcgagattcgggatggggacagtgaatccgcagacctcctggg

SEQ ID NO: 159114 - DNA, 2730 bp, Homo sapiens
  Payload ID: 11139
  Gene Symbol: NRP2
  Gene Name: neuropilin 2
  ENST ID: ENST00000412873
  CDS Start-End: 1-2730
atggatatgtttcctctcacctgggttttcttagccctctacttttcaagacaccaagtgagaggccaaccagacccaccgtgcggaggtcgtttgaattccaaagatgctggctatatcacctctcccggttacccccaggactacccctcccaccagaactgcgagtggattgtttacgcccccgaacccaaccagaagattgtcctcaacttcaaccctcactttgaaatcgagaagcacgactgcaagtatgactttatcgagattcgggatggggacagtgaatccgcagacctcctgggcaaacactgtgggaacatcgccccgcccaccatcatctcctcgggctccatgctctacatcaagttcacctccgactacgcccggcagggggcaggcttctctctgcgctacgagatcttcaagacaggctctgaagattgctcaaaaaacttcacaagccccaacgggaccatcgaatctcctgggtttcctgagaagtatccacacaacttggactgcacctttaccatcctggccaaacccaagatggagatcatcctgcagttcctgatctttgacctggagcatgaccctttgcaggtgggagagggggactgcaagtacgattggctggacatctgggatggcattccacatgttggccccctgattggcaagtactgtgggaccaaaacaccctctgaacttcgttcatcgacggggatcctctccctgacctttcacacggacatggcggtggccaaggatggcttctctgcgcgttactacctggtccaccaagagccactagagaactttcagtgcaatgttcctctgggcatggagtctggccggattgctaatgaacagatcagtgcctcatctacctactctgatgggaggtggacccctcaacaaagccggctccatggtgatgacaatggctggacccccaacttggattccaacaaggagtatctccaggtggacctgcgctttttaaccatgctcacggccatcgcaacacagggagcgatttccagggaaacacagaatggctactatgtcaaatcctacaagctggaagtcagcactaatggagaggactggatggtgtaccggcatggcaaaaaccacaaggtatttcaagccaacaacgatgcaactgaggtggttctgaacaagctccacgctccactgctgacaaggtttgttagaatccgccctcagacctggcactcaggtatcgccctccggctggagctcttcggctgccgggtcacagatgctccctgctccaacatgctggggatgctctcaggcctcattgcagactcccagatctccgcctcttccacccaggaatacctctggagccccagtgcagcccgcctggttagcagccgctcgggctggttccctcgaatccctcaggcccagcccggtgaggagtggcttcaggtagatctgggaacacccaagacagtgaaaggtgtcatcatccagggagcccgcggaggagacagtatcactgctgtggaagccagagcatttgtgcgcaagttcaaagtctcctacagcctaaacggcaaggactgggaatacattcaggaccccaggacccagcagccaaagctgttcgaagggaacatgcactatgacacccctgacatccgaaggtttgaccccattccggcacagtatgtgcgggtatacccggagaggtggtcgccggcggggattgggatgcggctggaggtgctgggctgtgactggacagactccaagcccacggtagagacgctgggacccactgtgaagagcgaagagacaaccaccccctaccccaccgaagaggaggccacagagtgtggggagaactgcagctttgaggatgacaaagatttgcagctcccttcgggattcaattgcaacttcgatttcctcgaggagccctgtggttggatgtatgaccatgccaagtggctccggaccacctgggccagcagctccagcccaaacgaccggacgtttccagatgacaggaatttcttgcggctgcagagtgacagccagagagagggccagtatgcccggctcatcagcccccctgtccacctgccccgaagcccggtgtgcatggagttccagtaccaggccacgggcggccgcggggtggcgctgcaggtggtgcgggaagccagccaggagagcaagttgctgtgggtcatccgtgaggaccagggcggcgagtggaagcacgggcggatcatcctgcccagctacgacatggagtaccagattgtgttcgagggagtgatagggaaaggacgttccggagagattgccattgatgacattcggataagcactgatgtcccactggagaactgcatggaacccatctcggcttttgcagatgaatacgaggtggactggagcaattcttcttctgcaacctcagggtctggcgccccctcgaccgacaaagaaaagagctggctgtacaccctggatcccatcctcatcaccatcatcgccatgagctcactgggcgtcctcctgggggccacctgtgcaggcctcctgctctactgcacctgttcctactcgggcctgagctcccgaagctgcaccacactggagaactacaacttcgagctctacgatggccttaagcacaaggtcaagatgaaccaccaaaagtgctgctccgaggcatga

SEQ ID NO: 159115 - DNA, 2444 bp, Homo sapiens
  Payload ID: 11140
  Gene Symbol: NPTN
  Gene Name: neuroplastin
  Uniprot ID: Q9Y639
  ENST ID: ENST00000345330
  CDS Start-End: 199-1395
cacgacccggagcgaaggtctcgcgaggcctgggcgctgcggcggcaggaggaggacggggaaggacggagccgagccgcggctgcctccctcgctcactccctcgcgcactcgcccgccccctccctccctcccctcccttccccggccccggctctggccccggcccattcgctgttgggtcttctgctagggaggatgtcgggttcgtcgctgcccagcgccctggccctctcgctgttgctggtctctggctccctcctcccagggccaggcgccgctcagaacgctgggtttgtcaagtcgcccatgtcagaaactaagctcacgggggacgcctttgagctgtactgtgacgtggtcgggagccccacgccagagatccagtggtggtacgcagaagtcaaccgggcagagtctttcagacagctgtgggacggtgctcggaagcgccgtgtcaccgtaaacaccgcctacgggtcaaacggcgtgagtgtgctgagaataacccggctcaccttggaggactctgggacttacgagtgcagggccagcaacgaccccaagaggaatgacttgaggcaaaacccctccataacatggattcgagcccaggccaccataagcgtccttcagaagccaaggattgtcaccagtgaagaggtcattattcgagacagccctgttctccctgtcaccctgcagtgtaacctcacctccagctctcacacccttacatacagctactggacaaagaatggggtggaactgagtgccactcgtaagaatgccagcaacatggagtacaggatcaataagccgagagctgaggattcaggcgaataccactgcgtatatcactttgtcagcgctcctaaagcaaacgccaccattgaagtgaaagccgctcctgacatcactggccataaacggagtgagaacaagaatgaagggcaggatgccactatgtattgcaagtcagttggctacccccacccagactggatatggcgcaagaaggagaacgggatgcccatggacattgtcaatacctctggccgcttcttcatcatcaacaaggaaaattacactgagttgaacattgtgaacctgcagatcacggaagaccctggcgagtatgaatgtaatgccaccaacgccattggctccgcctctgttgtcactgtcctcagggtgcggagccacctggccccactctggcctttcttgggaattctggctgaaattatcatccttgtggtgatcattgttgtgtatgagaagaggaagaggccagatgaggttcctgacgatgatgaaccagctggaccaatgaaaaccaactctaccaacaatcacaaagataaaaacttgcgccagagaaacacaaattaagtactgcttacaatatctttaggttcctgaaactggtggcaacatgacctgctaaaattttctgcttggacctctttggttctctcccctttcaagtgagcaacaccacaatgactgtctaaagcatgccttatttagcctctcctgtaagggtgatctagccaggtacattttaaacaatgcttcagtgtagaaggtgtaaactattttgggcttgatgtgctgtgaatgttgcttttttttttcctttgttaaaatatttaaatagaagtgaaaaggtcctctgaggatcagatcatgcatgcgccattttttacttaatgcagctgttaaattggcaaagctctaaaatgcactgctgccatctagtgatacacttttgtaaagtacagcaaaacctacagatatatacagtatataaatatatatatatatatatttatatttttgggggtgggagaaatccaaaataaagtaaatgcttgtttcatttttaagctgctgatattcattccttattgtatgttgtcagatgaggaaattgtgcagttctggtacataaagatgagtaatataaactgaaatctataattttaagggcttaacctgtgactttaataagctggaacagtccactgaatgggtataatgaattgcagtatatacgtatgattgctttttaagtgattatcttttcttctgttaagtcatgtaaattcataaatccttttgcactgatgtgttgaaccttattcttgtacattcattcaatcaaggcaaacttttataatttttcttttgtttccaatgaccttgaaatgttatagcatggtaatattctatgcaactatagttatactttttggtttgacactgtattttttcacattgatttactggttgatgatagattttataacctaacggttctcatgcggtgcgtaattgtagatgcatgtacttgtgtgttttgtgtaattattgaagtgcaatgatgtataaaaaagtggattcacctgtttttaaaaataaaacattgataaaaggtg

SEQ ID NO: 159116 - DNA, 2817 bp, Homo sapiens
  Payload ID: 11140
  Gene Symbol: NPTN
  Gene Name: neuroplastin
  Uniprot ID: Q9Y639
  ENST ID: ENST00000351217
  CDS Start-End: 920-1768
aaatgttttccgcattaagacgcttcttaggagtcttcatgtaagttcatacacgacttccttgtagaattgtgtcaatgaacatgcaattaggctagctgaacttcaggccctgagagtctatgaagctaaaataaggcccagatgtggggtgggagggggagtaggcagaggcggcaaaggaggacatttcaggcaaagggagcagatgtccaggcaggaaagcacaaggtaacgggggcacagggggcgcaccacttttcctggaaggaaaaaacagcagatgagagaaggaggttggagccagttaccagtagaggtctatgttcaaagtccagaaggaagaaacagcaggacggggacaaagagaggaaggaggaaaggaggcacggtgtatgaaactctgtagccaagagcgctaacaaatgaaaggcaggatgggtggaggaaatgtactgtgttccaaagcttcctcttatttatgggtgctcccgggccacagaggagtaaactgaaggacttcccagctccccactgcccagagagctagcggagtcccgcctcgccccgtcacatggccagaggcgccctcggcacgtgacctacctcgcgctaggccaatcagcctctgcaggggcggggccaccgagtccgcggggcgggagtctccgtcggagccgcctcttctcgcgatccttgcggcggtcgctcctcagccgcccacgacccggagcgaaggtctcgcgaggcctgggcgctgcggcggcaggaggaggacggggaaggacggagccgagccgcggctgcctccctcgctcactccctcgcgcactcgcccgccccctccctccctcccctcccttccccggccccggctctggccccggcccattcgctgttgggtcttctgctagggaggatgtcgggttcgtcgctgcccagcgccctggccctctcgctgttgctggtctctggctccctcctcccagggccaggcgccgctcagaacgagccaaggattgtcaccagtgaagaggtcattattcgagacagccctgttctccctgtcaccctgcagtgtaacctcacctccagctctcacacccttacatacagctactggacaaagaatggggtggaactgagtgccactcgtaagaatgccagcaacatggagtacaggatcaataagccgagagctgaggattcaggcgaataccactgcgtatatcactttgtcagcgctcctaaagcaaacgccaccattgaagtgaaagccgctcctgacatcactggccataaacggagtgagaacaagaatgaagggcaggatgccactatgtattgcaagtcagttggctacccccacccagactggatatggcgcaagaaggagaacgggatgcccatggacattgtcaatacctctggccgcttcttcatcatcaacaaggaaaattacactgagttgaacattgtgaacctgcagatcacggaagaccctggcgagtatgaatgtaatgccaccaacgccattggctccgcctctgttgtcactgtcctcagggtgcggagccacctggccccactctggcctttcttgggaattctggctgaaattatcatccttgtggtgatcattgttgtgtatgagaagaggaagaggccagatgaggttcctgacgatgatgaaccagctggaccaatgaaaaccaactctaccaacaatcacaaagataaaaacttgcgccagagaaacacaaattaagtactgcttacaatatctttaggttcctgaaactggtggcaacatgacctgctaaaattttctgcttggacctctttggttctctcccctttcaagtgagcaacaccacaatgactgtctaaagcatgccttatttagcctctcctgtaagggtgatctagccaggtacattttaaacaatgcttcagtgtagaaggtgtaaactattttgggcttgatgtgctgtgaatgttgcttttttttttcctttgttaaaatatttaaatagaagtgaaaaggtcctctgaggatcagatcatgcatgcgccattttttacttaatgcagctgttaaattggcaaagctctaaaatgcactgctgccatctagtgatacacttttgtaaagtacagcaaaacctacagatatatacagtatataaatatatatatatatatatttatatttttgggggtgggagaaatccaaaataaagtaaatgcttgtttcatttttaagctgctgatattcattccttattgtatgttgtcagatgaggaaattgtgcagttctggtacataaagatgagtaatataaactgaaatctataattttaagggcttaacctgtgactttaataagctggaacagtccactgaatgggtataatgaattgcagtatatacgtatgattgctttttaagtgattatcttttcttctgttaagtcatgtaaattcataaatccttttgcactgatgtgttgaaccttattcttgtacattcattcaatcaaggcaaacttttataatttttcttttgtttccaatgaccttgaaatgttatagcatggtaatattctatgcaactatagttatactttttggtttgacactgtattttttcacattgatttactggttgatgatagattttataacctaacggttctcatgcggtgcgtaattgtagatgcatgtacttgtgtgttttgtgtaattattgaagtgcaatgatgtataaaaaagtggattcacctgtttttaaaaataaaacattgataaaaggtg

SEQ ID NO: 159117 - DNA, 571 bp, Homo sapiens
  Payload ID: 11140
  Gene Symbol: NPTN
  Gene Name: neuroplastin
  ENST ID: ENST00000567198
  CDS Start-End: 114-571
acaagaccggcgtttgtgttccgggcgacggggatggtggtgtccgtcaggccccccgggagctggggtcgtccaggattctactgaggccccctgggtttgtcaagtcgcccatgtcagaaactaagctcacgggggacgcctttgagctgtactgtgacgtggtcgggagccccacgccagagatccagtggtggtacgcagaagtcaaccgggcagagtctttcagacagctgtgggacggtgctcggaagcgccgtgtcaccgtaaacaccgcctacgggtcaaacggcgtgagtgtgctgagaataacccggctcaccttggaggactctgggacttacgagtgcagggccagcaacgaccccaagaggaatgacttgaggcaaaacccctccataacatggattcgagcccaggccaccataagcgtccttcagaagccaaggattgtcaccagtgaagaggtcattattcgagacagccctgttctccctgtcaccctgcagtgtaacctcacctccagctctcacacccttacatacagctactggacaaagaatggggtgga

SEQ ID NO: 159118 - DNA, 1247 bp, Homo sapiens
  Payload ID: 11140
  Gene Symbol: NPTN
  Gene Name: neuroplastin
  ENST ID: ENST00000565282
  CDS Start-End: 323-1247
gggggcggatgaggagggggcgcagctcttagggagggtggcacaagaccggcgtttgtgttccgggcgacggggatggtggtgtccgtcaggccccccgggagctggggtcgtccaggattctactgaggccccgtaggactggtgacatccttaaaaataagggggaaattggggggaagagagtcctgaggaacactaatgggcagagtacagtggcacgatcttggctcactgcaacctccgcctcctgggttcaagtgattcttctgtctcagcctcccgagtacctgggactacagctgggtttgtcaagtcgcccatgtcagaaactaagctcacgggggacgcctttgagctgtactgtgacgtggtcgggagccccacgccagagatccagtggtggtacgcagaagtcaaccgggcagagtctttcagacagctgtgggacggtgctcggaagcgccgtgtcaccgtaaacaccgcctacgggtcaaacggcgtgagtgtgctgagaataacccggctcaccttggaggactctgggacttacgagtgcagggccagcaacgaccccaagaggaatgacttgaggcaaaacccctccataacatggattcgagcccaggccaccataagcgtccttcagaagccaaggattgtcaccagtgaagaggtcattattcgagacagccctgttctccctgtcaccctgcagtgtaacctcacctccagctctcacacccttacatacagctactggacaaagaatggggtggaactgagtgccactcgtaagaatgccagcaacatggagtacaggatcaataagccgagagctgaggattcaggcgaataccactgcgtatatcactttgtcagcgctcctaaagcaaacgccaccattgaagtgaaagccgctcctgacatcactggccataaacggagtgagaacaagaatgaagggcaggatgccactatgtattgcaagtcagttggctacccccacccagactggatatggcgcaagaaggagaacgggatgcccatggacattgtcaatacctctggccgcttcttcatcatcaacaaggaaaattacactgagttgaacattgtgaacctgcagatcacggaagaccctggcgagtatgaatgtaatgccaccaacgccattggctccgcctctgttgtcactgtcctcagggtgcggagccacctggccccactctggcctttcttgggaa

SEQ ID NO: 159119 - DNA, 1094 bp, Homo sapiens
  Payload ID: 11140
  Gene Symbol: NPTN
  Gene Name: neuroplastin
  Uniprot ID: Q9Y639
  ENST ID: ENST00000562924
  CDS Start-End: 29-865
ttcgctgttgggtcttctgctagggaggatgtcgggttcgtcgctgcccagcgccctggccctctcgctgttgctggtctctggctccctcctcccagggccaggcgccgctcagaacgagccaaggattgtcaccagtgaagaggtcattattcgagacagccctgttctccctgtcaccctgcagtgtaacctcacctccagctctcacacccttacatacagctactggacaaagaatggggtggaactgagtgccactcgtaagaatgccagcaacatggagtacaggatcaataagccgagagctgaggattcaggcgaataccactgcgtatatcactttgtcagcgctcctaaagcaaacgccaccattgaagtgaaagccgctcctgacatcactggccataaacggagtgagaacaagaatgaagggcaggatgccactatgtattgcaagtcagttggctacccccacccagactggatatggcgcaagaaggagaacgggatgcccatggacattgtcaatacctctggccgcttcttcatcatcaacaaggaaaattacactgagttgaacattgtgaacctgcagatcacggaagaccctggcgagtatgaatgtaatgccaccaacgccattggctccgcctctgttgtcactgtcctcagggtgcggagccacctggccccactctggcctttcttgggaattctggctgaaattatcatccttgtggtgatcattgttgtgtatgagaagaggaagaggccagatgaggttcctgacgctggaccaatgaaaaccaactctaccaacaatcacaaagataaaaacttgcgccagagaaacacaaattaagtactgcttacaatatctttaggttcctgaaactggtggcaacatgacctgctaaaattttctgcttggacctctttggttctctcccctttcaagtgagcaacaccacaatgactgtctaaagcatgccttatttagcctctcctgtaagggtgatctagccaggtacattttaaacaatgcttcagtgtagaaggtgtaaactattttgggcttgatgtgctgtgaa

SEQ ID NO: 159120 - DNA, 1214 bp, Homo sapiens
  Payload ID: 11140
  Gene Symbol: NPTN
  Gene Name: neuroplastin
  Uniprot ID: Q9Y639
  ENST ID: ENST00000563691
  CDS Start-End: 30-1214
attcgctgttgggtcttctgctagggaggatgtcgggttcgtcgctgcccagcgccctggccctctcgctgttgctggtctctggctccctcctcccagggccaggcgccgctcagaacgctgggtttgtcaagtcgcccatgtcagaaactaagctcacgggggacgcctttgagctgtactgtgacgtggtcgggagccccacgccagagatccagtggtggtacgcagaagtcaaccgggcagagtctttcagacagctgtgggacggtgctcggaagcgccgtgtcaccgtaaacaccgcctacgggtcaaacggcgtgagtgtgctgagaataacccggctcaccttggaggactctgggacttacgagtgcagggccagcaacgaccccaagaggaatgacttgaggcaaaacccctccataacatggattcgagcccaggccaccataagcgtccttcagaagccaaggattgtcaccagtgaagaggtcattattcgagacagccctgttctccctgtcaccctgcagtgtaacctcacctccagctctcacacccttacatacagctactggacaaagaatggggtggaactgagtgccactcgtaagaatgccagcaacatggagtacaggatcaataagccgagagctgaggattcaggcgaataccactgcgtatatcactttgtcagcgctcctaaagcaaacgccaccattgaagtgaaagccgctcctgacatcactggccataaacggagtgagaacaagaatgaagggcaggatgccactatgtattgcaagtcagttggctacccccacccagactggatatggcgcaagaaggagaacgggatgcccatggacattgtcaatacctctggccgcttcttcatcatcaacaaggaaaattacactgagttgaacattgtgaacctgcagatcacggaagaccctggcgagtatgaatgtaatgccaccaacgccattggctccgcctctgttgtcactgtcctcagggtgcggagccacctggccccactctggcctttcttgggaattctggctgaaattatcatccttgtggtgatcattgttgtgtatgagaagaggaagaggccagatgaggttcctgacgctggaccaatgaaaaccaactctaccaacaatcacaaagataaaaacttgcgccagagaaacacaaattaa

SEQ ID NO: 159121 - DNA, 858 bp, Homo sapiens
  Payload ID: 11140
  Gene Symbol: NPTN
  Gene Name: neuroplastin
  ENST ID: ENST00000565325
  CDS Start-End: 31-584
cattcgctgttgggtcttctgctagggaggatgtcgggttcgtcgctgcccagcgccctggccctctcgctgttgctggtctctggctccctcctcccagggccaggcgccgctcagaacgccgctcctgacatcactggccataaacggagtgagaacaagaatgaagggcaggatgccactatgtattgcaagtcagttggctacccccacccagactggatatggcgcaagaaggagaacgggatgcccatggacattgtcaatacctctggccgcttcttcatcatcaacaaggaaaattacactgagttgaacattgtgaacctgcagatcacggaagaccctggcgagtatgaatgtaatgccaccaacgccattggctccgcctctgttgtcactgtcctcagggtgcggagccacctggccccactctggcctttcttgggaattctggctgaaattatcatccttgtggtgatcattgttgtgtatgagaagaggaagaggccagatgaggttcctgacgatgatgaaccagctggaccaatgaaaaccaactctaccaacaatcacaaagataaaaacttgcgccagagaaacacaaattaagtactgcttacaatatctttaggttcctgaaactggtggcaacatgacctgctaaaattttctgcttggacctctttggttctctcccctttcaagtgagcaacaccacaatgactgtctaaagcatgccttatttagcctctcctgtaagggtgatctagccaggtacattttaaacaatgcttcagtgtagaaggtgtaaactattttgggcttgatgtgctgtgaatgttgcttttttttttc

SEQ ID NO: 159122 - DNA, 1237 bp, Homo sapiens
  Payload ID: 11141
  Gene Symbol: NTS
  Gene Name: neurotensin
  Uniprot ID: P30990
  ENST ID: ENST00000256010
  CDS Start-End: 108-620
agttcactcactttcaaagccagctgaaggaaagaggaagtgctagagagagcccccttcagtgtgcttctgacttttacggacttggcttgttagaaggctgaaagatgatggcaggaatgaaaatccagcttgtatgcatgctactcctggctttcagctcctggagtctgtgctcagattcagaagaggaaatgaaagcattagaagcagatttcttgaccaatatgcatacatcaaagattagtaaagcacatgttccctcttggaagatgactctgctaaatgtttgcagtcttgtaaataatttgaacagcccagctgaggaaacaggagaagttcatgaagaggagcttgttgcaagaaggaaacttcctactgctttagatggctttagcttggaagcaatgttgacaatataccagctccacaaaatctgtcacagcagggcttttcaacactgggagttaatccaggaagatattcttgatactggaaatgacaaaaatggaaaggaagaagtcataaagagaaaaattccttatattctgaaacggcagctgtatgagaataaacccagaagaccctacatactcaaaagagattcttactattactgagagaataaatcatttatttacatgtgattgtgattcatcatcccttaattaaatatcaaattatatttgtgtgaaaatgtgacaaacacacttatctgtctcttctacaattgtggtttattgaatgtgatttttctgcactaatataaattagactaagtgttttcaaataaatctaaatcttcagcatgatgtgttgtgtataattggagtagatattaattaagtcacctgtataatgttttgtaattttgcaaaacatatcttgagttgtttaaacagtcaaaatgtttgatattttataccagcttatgagctcaaagtactacagcaaagcctagcctgcatatcattcacccaaaacaaagtaatagcgcctcttttattattttgactgaatgttttatggaattgaaagaaacatacgttcttttcaagacttcctcatgaatctctcaattataggaaaagttattgtgataaaataggaacagctgaaagattgattaatgaactattgttaattcttcctattttaatgaatgacattgaactgaattttttgtctgttaaatgaacttgatagctaataaaaagacaactagccatcaaaatca

SEQ ID NO: 159123 - DNA, 801 bp, Homo sapiens
  Payload ID: 11141
  Gene Symbol: NTS
  Gene Name: neurotensin
  ENST ID: ENST00000551529
  CDS Start-End: 110-397
atagttcactcactttcaaagccagctgaaggaaagaggaagtgctagagagagcccccttcagtgtgcttctgacttttacggacttggcttgttagaaggctgaaagatgatggcaggaatgaaaatccagcttgtatgcatgctactcctggctttcagctcctggagtctgtgctcagattcagaagaggaaatgaaagcattagaagcagatttcttgaccaatatgcatacatcaaagttaatccaggaagatattcttgatactggaaatgacaaaaatggaaaggaagaagtcataaagagaaaaattccttatattctgaaacggcagctgtatgagaataaacccagaagaccctacatactcaaaagagattcttactattactgagagaataaatcatttatttacatgtgattgtgattcatcatcccttaattaaatatcaaattatatttgtgtgaaaatgtgacaaacacacttatctgtctcttctacaattgtggtttattgaatgtgatttttctgcactaatataaattagactaagtgttttcaaataaatctaaatcttcagcatgatgtgttgtgtataattggagtagatattaattaagtcacctgtataatgttttgtaattttgcaaaacatatcttgagttgtttaaacagtcaaaatgtttgatattttataccagcttatgagctcaaagtactacagcaaagcctagcctgcatatcattcacccaaaacaaagtaatagcgcctcttttattattttgactgaatgttt

SEQ ID NO: 159124 - DNA, 4132 bp, Homo sapiens
  Payload ID: 11142
  Gene Symbol: NTSR1
  Gene Name: neurotensin receptor 1 (high affinity)
  Uniprot ID: P30989
  ENST ID: ENST00000370501
  CDS Start-End: 372-1628
caagctcgccccgcgcagcccgagccgggctgggcgctgtcctcgggggcctggggaaccgcgcggtttggagatcggaggcacctggaacccgtggcaagcgccgagccgggagacagcccgaggaaccacgggttctggagctaggagccggaagctgggagtccggaggagagcggagcccggagcccggagcccggggcggcgcgtctgggtctggcgcttcccgactggacggcgcgcccgctggtcttcgccacgcgccctcccctgggctcccgttcatcggtccccgcctgagacgcgcccactcctgcccggacttccagccccggaggcgccggacagagccgcggactccagcgcccaccatgcgcctcaacagctccgcgccgggaaccccgggcacgccggccgccgaccccttccagcgggcgcaggccggactggaggaggcgctgctggccccgggcttcggcaacgcttcgggcaacgcgtcggagcgcgtcctggcggcacccagcagcgagctggacgtgaacaccgacatctactccaaggtgctggtgaccgccgtgtacctggcgctcttcgtggtgggcacggtgggcaacacggtgacggcgttcacgctggcgcggaagaagtcgctgcagagcctgcagagcacggtgcattaccacctgggcagcctggcgctgtccgacctgctcaccctgctgctggccatgcccgtggagctgtacaacttcatctgggtgcaccacccctgggccttcggcgacgccggctgccgcggctactacttcctgcgcgacgcctgcacctacgccacggccctcaacgtggccagcctgagtgtggagcgctacctggccatctgccaccccttcaaggccaagaccctcatgtcccgaagccgcaccaagaagttcatcagcgccatctggctcgcctcggccctgctggcggtgcctatgctgttcaccatgggcgagcagaaccgcagcgccgacggccagcacgccggcggcctggtgtgcacccccaccatccacactgccaccgtcaaggtcgtcatacaggtcaacaccttcatgtccttcatattccccatggtggtcatctcggtcctgaacaccatcatcgccaacaagctgaccgtcatggtacgccaggcggccgagcagggccaagtgtgcacggtcgggggcgagcacagcacattcagcatggccatcgagcctggcagggtccaggccctgcggcacggcgtgcgcgtcctacgtgcagtggtcatcgcctttgtggtctgctggctgccctaccacgtgcggcgcctcatgttctgctacatctcggatgagcagtggactccgttcctctatgacttctaccactacttctacatggtgaccaacgcactcttctacgtcagctccaccatcaaccccatcctgtacaacctcgtctctgccaacttccgccacatcttcctggccacactggcctgcctctgcccggtgtggcggcgcaggaggaagaggccagccttctcgaggaaggccgacagcgtgtccagcaaccacaccctctccagcaatgccacccgcgagacgctgtactaggctgtgcgccccggaacgtgtccaggaggagcctggccatgggtccttgcccccgacagacagagcagcccccacccgggagccttgatgggggtcaggcagaggccagcctgcactggagtctgaggcctgggacccccccctcccaccccctaacccatgtttctcattagtgtctcccgggcctgtccccaactcctccccacccctcccccatctcctctttgaaagccagaacaagagagcgctcctctcccagataggaaaagggcctctaacaaggagaaattagtgtgcggcaaaaggcagttttctttgttctcagactaatggatggttccagagaaggaaatgaaaggtgctgggtggggccgggcctccggcggcccggctgctgttcccatgtccacatctctgaggcctgcaccccctctgtctagctcggggagtccagccccagtcccgcaggctccgtggctttgggcctcacgtgcagaccctgccatgcagacccatgcccccctcccccaggcagctccaagaaagctccctgactcgccccttcaggcctggcaagctgggggcccatcgccgtggggagtccctcccaccaccctcgccgcaggcagctgcagcccccagaggggaccacaagcccaaaaaggacaaaaatgggctggcctggaatggcccagaccccagcctcccctcctccctcccatcctcacccaggccaaggcccaggggctctgccaggacaccacatgggagggggctcaggcctcagcctcaagatcttcagctgtggcctctcgggctcggcagaagggacgccggatcaggggcctggtctccagcacctgcccgagtggccgtggccaggatggggtgcgcattccgtgtgctttgcttgtggctgtgcaggctgaggtctggagccaggcccagagctggcttcagggtggggccttgagaaggggaatgtgggacaggggcgatggtgcctggtctctgagtaagatgccaggtcccaggaactcaggcttcaggtgagaaggagcggtgtgtccaggcaccgctggccggcagccctgggctgaggcacagactcatttgtcaccttctggcggcggcagccctggccccggcctccaagcagttgaaaaagctggcgcctccttggtctctaggatccaggctccacagagcacatgactagccaggcccctggcttaagaaggtcgcctaagcctaagagaagacagtcccaggagaagctggccgggaccagccaggagctgggagccacaggaagcaaaagtcagccttttcttcaagggatttccctgtctcagagcagcctttgccccagggaaatgggctctgggctggctgcctgcaccggccatgtcgacccaggacccggacacctggtcttgggctgtgttcagccactttgccttctctggactcagtttccccgtctgagaaatgagagtcgaatgctacagtatctgcagtcgcttggatctggctgttgagttgacgggttccttgaaccccacaaaatccctctccaaccacaggacccttcggctcaccaagaacagggcccaggggagtcaggcctattcgctgcacttcctgccaaactttgcccccacaagcctggtcatcagccaggcagccctcccagtgcccaagggccaccaaccccagggaaacagggccagcacagaggggccttcctcccccacagagcccccatgacatagtctgctctgggcggaagagctttgctgccagccagggatgtccagaggtcagtgcagcccctacccctgctcaggagtgggctcagagtctagcaaatgctaaggcccctcaggctgggctctgaacgaggacctggactcagagccagacagggcagcctcagacccttctctggggctcctggaccttgggccataatttctgagcctcggtttccccatctaaggaacagatgtggtcgttccgccctctcagctggatgagactgtcctggaggatccaccccggaacagacagaatggtgtctctcaggatggtgctctgagagagggcagagtggatgccccactgccctagaccctcggtagacgtggggtctctggggcggggtctgtggctgtgactgaagtcggcttttcccgttgatgtcttgatgctcctatctgtgcacttaccgtaggtagggacacgtgtccacgcaccacagacacacccacgacacctgatctcgtatcactagcttgcggccaggtcatgatgtggccccggaagctggccctgcgtgccatgagtgcgtcggtcatggagtccggagcccctgagccggcccctggtgacggcacagccctcacagctcaaacgcccacccccactcccaccatctgcaggtggtgaaaacaaaccccgtgtatctctcaataaaggtggccgaagggcctcgatgtgga

SEQ ID NO: 159125 - DNA, 1569 bp, Homo sapiens
  Payload ID: 11143
  Gene Symbol: NTSR2
  Gene Name: neurotensin receptor 2
  Uniprot ID: O95665
  ENST ID: ENST00000306928
  CDS Start-End: 36-1268
agtgagagggagggagcgccggccgcgggagcgggatggaaaccagcagcccgcggcccccgcggcccagctccaacccggggctgagcctggacgcccggctgggcgtggacactcgcctctgggccaaggtgctgttcaccgcgctctacgcactcatctgggcgctgggcgcggcgggcaatgcgctgtccgcgcacgtggtgctgaaggcgcgggccgggcgcgcggggcgcctgcgccaccacgtgctcagcctggcgctcgcgggcctgctgctgctgctggtcggcgtgccggtggagctctacagcttcgtgtggttccactacccctgggtcttcggcgacctgggctgccgcggctactacttcgtgcacgagctgtgcgcctacgccacggtgctgagcgtggcaggcctgagcgccgagcgctgcctagccgtgtgccagcccctgcgtgcccgcagcctgctgacgccacgccggacccggtggctggtggcgctctcgtgggccgcctcgctcggcctcgccctgcccatggccgtcatcatggggcagaagcacgaactcgagacggcggacggggagccggagcccgcctcgcgagtgtgcacggtgctggtgagccgcaccgcgctccaagtctttatccaggtgaatgtgctggtgtccttcgtgctccccttggcactaactgctttcctgaatggggtcacagtgagccacctgctggccctctgctcccaagtgccgtccacttctaccccgggcagctccacccccagccgcctggagctgctgagtgaggagggtctcctcagcttcatcgtatggaagaagacctttatccagggaggccaggtcagcctggtgagacataaagacgtgcgccggatccgcagcctccagcgcagcgtccaggttctcagagccatcgtggtcatgtatgtcatctgctggctgccgtaccatgcccgcaggctcatgtactgctacgtacctgatgacgcgtggactgacccactgtacaatttctaccactacttctacatggtgaccaacacacttttctacgtcagctcagctgtgactcctcttctctacaacgccgtgtcctcctccttcagaaaactcttcctggaagccgtcagctccctgtgtggagagcaccaccccatgaagcggttacccccgaagccccagagtcccaccctaatggatacagcttcaggctttggggatcccccagaaacccggacctgaatgtaatgcaagaatgaacagaacaagcaaaatgaccagctgcttagtcacctggcaaagcaggtgagcaacctcatcactaatcattcaagcttcgcagccagggcgacttctatcaacccctgctctgctgagaaccatcaagcgcagggaagccacgtgacccctcctagcctcaggctccctcgtctgtgtagtggagataaagaacagcacccatctcttagtgttgcctgagactaaagtgcttagcacagaacctggtgcgtagtagatgctcaataaatttttgctggcacga

SEQ ID NO: 159126 - DNA, 1315 bp, Homo sapiens
  Payload ID: 11144
  Gene Symbol: NTM
  Gene Name: neurotrimin
  Uniprot ID: Q9P121
  ENST ID: ENST00000374784
  CDS Start-End: 15-965
tgtggctgtcgagaatgggggtctgtgggtacctgttcctgccctggaagtgcctcgtggtcgtgtctctcaggctgctgttccttgtacccacaggagtgcccgtgcgcagcggagatgccaccttccccaaagctatggacaacgtgacggtccggcagggggagagcgccaccctcaggtgcactattgacaaccgggtcacccgggtggcctggctaaaccgcagcaccatcctctatgctgggaatgacaagtggtgcctggatcctcgcgtggtccttctgagcaacacccaaacgcagtacagcatcgagatccagaacgtggatgtgtatgacgagggcccttacacctgctcggtgcagacagacaaccacccaaagacctctagggtccacctcattgtgcaagtatctcccaaaattgtagagatttcttcagatatctccattaatgaagggaacaatattagcctcacctgcatagcaactggtagaccagagcctacggttacttggagacacatctctcccaaagcggttggctttgtgagtgaagacgaatacttggaaattcagggcatcaccagggagcagtcaggggactacgagtgcagtgcctccaatgacgtggccgcgcccgtggtacggagagtaaaggtcaccgtgaactatccaccatacatttcagaagccaagggtacaggtgtccccgtgggacaaaaggggacactgcagtgtgaagcctcagcagtcccctcagcagaattccagtggtacaaggatgacaaaagactgattgaaggaaagaaaggggtgaaagtggaaaacagacctttcctctcaaaactcatcttcttcaatgtctctgaacatgactatgggaactacacttgcgtggcctccaacaagctgggccacaccaatgccagcatcatgctatttggtgagactgtgctctgagctgggcaagaagaggggagagggtgcagaacgggagagctgggtgggagggcccctcaaggccagggtcagaggttagcagggtatcagtggacatggagagggaggaaaaaaaagagagagacacagaaagaaatggagagagagggacagagagacagggaggaggcagacagaaagagaaagaacaagagatacagtttacatgtatacaaagtagtatatgtatagtacatgtataaaagtagatctcagaagtgggaaaaggaaaatgaaaaagaatgttcatgtttcattctataatggaaaagatcccgagataggagaaaaatactttggaatgccaaaaa

SEQ ID NO: 159127 - DNA, 3190 bp, Homo sapiens
  Payload ID: 11144
  Gene Symbol: NTM
  Gene Name: neurotrimin
  Uniprot ID: Q9P121
  ENST ID: ENST00000374786
  CDS Start-End: 480-1514
aacttacaaagtgttggatgtcccccgttcgaactgagggactgcagaccgcctctgggtagctggatgaagcccaccccgtccccttctggtaccaaagtgcttactcctctccaaagtgccgtgtctgaactgccgctgggaagaagcggctcctgagacgcgcccacacctttcacctgccgcgcgcttccccctcctcggccaccttcccggcggaagcagcgaggagggagccccctttggccgtcctccgtggaaccggttttccgaggctggcaaaagccgaggctggatttgggggaggaatattagactcggaggagtctgcgcgcttttctcctccccgcgcctcccggtcgccgcgggttcaccgctcagtccccgcgctcgctccgcaccccacccacttcctgtgctcgcccggggggcgtgtgccgtgcggctgccggagttcggggaagttgtggctgtcgagaatgggggtctgtgggtacctgttcctgccctggaagtgcctcgtggtcgtgtctctcaggctgctgttccttgtacccacaggagtgcccgtgcgcagcggagatgccaccttccccaaagctatggacaacgtgacggtccggcagggggagagcgccaccctcaggtgcactattgacaaccgggtcacccgggtggcctggctaaaccgcagcaccatcctctatgctgggaatgacaagtggtgcctggatcctcgcgtggtccttctgagcaacacccaaacgcagtacagcatcgagatccagaacgtggatgtgtatgacgagggcccttacacctgctcggtgcagacagacaaccacccaaagacctctagggtccacctcattgtgcaagtatctcccaaaattgtagagatttcttcagatatctccattaatgaagggaacaatattagcctcacctgcatagcaactggtagaccagagcctacggttacttggagacacatctctcccaaagcggttggctttgtgagtgaagacgaatacttggaaattcagggcatcaccagggagcagtcaggggactacgagtgcagtgcctccaatgacgtggccgcgcccgtggtacggagagtaaaggtcaccgtgaactatccaccatacatttcagaagccaagggtacaggtgtccccgtgggacaaaaggggacactgcagtgtgaagcctcagcagtcccctcagcagaattccagtggtacaaggatgacaaaagactgattgaaggaaagaaaggggtgaaagtggaaaacagacctttcctctcaaaactcatcttcttcaatgtctctgaacatgactatgggaactacacttgcgtggcctccaacaagctgggccacaccaatgccagcatcatgctatttggtccaggcgccgtcagcgaggtgagcaacggcacgtcgaggagggcaggctgcgtctggctgctgcctcttctggtcttgcacctgcttctcaaattttgatgtgagtgccacttccccacccgggaaaggctgccgccaccaccaccaccaacacaacagcaatggcaacaccgacagcaaccaatcagatatatacaaatgaaattagaagaaacacagcctcatgggacagaaatttgagggaggggaacaaagaatactttggggggaaaaaagttttaaaaaagaaattgaaaattgccttgcagatatttaggtacaatggagttttcttttcccaaacgggaagaacacagcacacccggcttggacccactgcaagctgcatcgtgcaacctctttggtgccagtgtgggcaagggctcagcctctctgcccacagagtgcccccacgtggaacattctggagctggccatcccaaattcaatcagtccatagagacgaacagaatgagaccttccggcccaagcgtggcgctgcgggcactttggtagactgtgccaccacggcgtgtgttgtgaaacgtgaaataaaaagagcaagaaagaaaaaggaaacaaaataagaccgtctgacagcaacaacggtcccacaaacaagtcacaaaagataccgttaaacttttttttttttttatcattttactacatgaacatcatggataacaagggattctgattcattattaatttcattaattatattttctgatatgagtctagaacttactgcaaaaacaagacaaaactaaaaaaatacaactgagaagggtgaagagaagtatgtttgttaaacagtaaaaatgaatagtatacttcttaactaggtttacaactggtggaccacacaccaggcactaatcacctggtgaggatttggcatatccaccaaaaaatgcatccgatttaaccaacatctccaccagcgctacggactcctcccaattctgacatctcttgcagacaatactatgctctctacacactgtttagaaatggaaaggtgatctgcactgtatcttgggtttgttggctatgcttcctttgatgacatatattatacagtatatatatacatatattttttttgttagagttctagccattttatttctccgcagggtcctttctcagacattactgcatgctgtatatggcgttagctgtgtgttgatcttctaaaagatgatagagtttactggtaattgtgtaatcagctcctgcctttttattttcttgggttatttacatgtcagagacatttataaaaagtgaaaggataaaaaaaaaaaaaaacaactaataccgggcgcagcatctttccaggtgtggctctgcgctaggccaccccaggtggccccgctttctccattctgccctgtggcgttaacagacagcaagcagctgaacaagcagtaccgtcagtacccacttgctttagcccattatgggaatctctgatgcctttgtgaccactggagagtttaatcctcttggtttattttatttcccacctttgtgtgagtgtgtatgaaagagaagaaaatgcaatttttaggtaatcttttttttttttcccctcccctgaaagtctgggaacctgagagtcctcggggaggggtcctggatgtgatgagggaaagggggattgggggatccgggagggtggggttgtctctgacttgacattaaaaagtgttccatgtccctcttca

SEQ ID NO: 159128 - DNA, 3040 bp, Homo sapiens
  Payload ID: 11144
  Gene Symbol: NTM
  Gene Name: neurotrimin
  Uniprot ID: Q9P121
  ENST ID: ENST00000374791
  CDS Start-End: 330-1364
agagtgtgtgtgcgtgtgtgtgtgtgtgtgtgcccgcgcgcgtgtgttgtagctctgtcaatccttggattagaaccaatgattgcagcttgtaggagggctgtccagggccagattgtacaatgtgtctcagtgccagagtatgagtggagataattacggagaagtcatactctctcacaccctcggctttcttgttgtgtccttcagcaaaacagtggatttaaatctccttgcacaagcttgagagcaacacaatctatcaggaaagaaagaaagaaaaaaaccgaacctgacaaaaaagaagaaaaagaagaagaaaaaaaatcatgaaaaccatccagccaaaaatgcacaattctatctcttgggcaatcttcacggggctggctgctctgtgtctcttccaaggagtgcccgtgcgcagcggagatgccaccttccccaaagctatggacaacgtgacggtccggcagggggagagcgccaccctcaggtgcactattgacaaccgggtcacccgggtggcctggctaaaccgcagcaccatcctctatgctgggaatgacaagtggtgcctggatcctcgcgtggtccttctgagcaacacccaaacgcagtacagcatcgagatccagaacgtggatgtgtatgacgagggcccttacacctgctcggtgcagacagacaaccacccaaagacctctagggtccacctcattgtgcaagtatctcccaaaattgtagagatttcttcagatatctccattaatgaagggaacaatattagcctcacctgcatagcaactggtagaccagagcctacggttacttggagacacatctctcccaaagcggttggctttgtgagtgaagacgaatacttggaaattcagggcatcaccagggagcagtcaggggactacgagtgcagtgcctccaatgacgtggccgcgcccgtggtacggagagtaaaggtcaccgtgaactatccaccatacatttcagaagccaagggtacaggtgtccccgtgggacaaaaggggacactgcagtgtgaagcctcagcagtcccctcagcagaattccagtggtacaaggatgacaaaagactgattgaaggaaagaaaggggtgaaagtggaaaacagacctttcctctcaaaactcatcttcttcaatgtctctgaacatgactatgggaactacacttgcgtggcctccaacaagctgggccacaccaatgccagcatcatgctatttggtccaggcgccgtcagcgaggtgagcaacggcacgtcgaggagggcaggctgcgtctggctgctgcctcttctggtcttgcacctgcttctcaaattttgatgtgagtgccacttccccacccgggaaaggctgccgccaccaccaccaccaacacaacagcaatggcaacaccgacagcaaccaatcagatatatacaaatgaaattagaagaaacacagcctcatgggacagaaatttgagggaggggaacaaagaatactttggggggaaaaaagttttaaaaaagaaattgaaaattgccttgcagatatttaggtacaatggagttttcttttcccaaacgggaagaacacagcacacccggcttggacccactgcaagctgcatcgtgcaacctctttggtgccagtgtgggcaagggctcagcctctctgcccacagagtgcccccacgtggaacattctggagctggccatcccaaattcaatcagtccatagagacgaacagaatgagaccttccggcccaagcgtggcgctgcgggcactttggtagactgtgccaccacggcgtgtgttgtgaaacgtgaaataaaaagagcaagaaagaaaaaggaaacaaaataagaccgtctgacagcaacaacggtcccacaaacaagtcacaaaagataccgttaaacttttttttttttttatcattttactacatgaacatcatggataacaagggattctgattcattattaatttcattaattatattttctgatatgagtctagaacttactgcaaaaacaagacaaaactaaaaaaatacaactgagaagggtgaagagaagtatgtttgttaaacagtaaaaatgaatagtatacttcttaactaggtttacaactggtggaccacacaccaggcactaatcacctggtgaggatttggcatatccaccaaaaaatgcatccgatttaaccaacatctccaccagcgctacggactcctcccaattctgacatctcttgcagacaatactatgctctctacacactgtttagaaatggaaaggtgatctgcactgtatcttgggtttgttggctatgcttcctttgatgacatatattatacagtatatatatacatatattttttttgttagagttctagccattttatttctccgcagggtcctttctcagacattactgcatgctgtatatggcgttagctgtgtgttgatcttctaaaagatgatagagtttactggtaattgtgtaatcagctcctgcctttttattttcttgggttatttacatgtcagagacatttataaaaagtgaaaggataaaaaaaaaaaaaaacaactaataccgggcgcagcatctttccaggtgtggctctgcgctaggccaccccaggtggccccgctttctccattctgccctgtggcgttaacagacagcaagcagctgaacaagcagtaccgtcagtacccacttgctttagcccattatgggaatctctgatgcctttgtgaccactggagagtttaatcctcttggtttattttatttcccacctttgtgtgagtgtgtatgaaagagaagaaaatgcaatttttaggtaatcttttttttttttcccctcccctgaaagtctgggaacctgagagtcctcggggaggggtcctggatgtgatgagggaaagggggattgggggatccgggagggtggggttgtctctgacttgacattaaaaagtgttccatgtccctcttca

SEQ ID NO: 159129 - DNA, 664 bp, Homo sapiens
  Payload ID: 11144
  Gene Symbol: NTM
  Gene Name: neurotrimin
  ENST ID: ENST00000457381
  CDS Start-End: 1-359
cctcagcagaattccagtggtacaaggatgacaaaagactgattgaaggaaagaaaggggtgaaagtggaaaacagacctttcctctcaaaactcatcttcttcaatgtctctgaacatgactatgggaactacacttgcgtggcctccaacaagctgggccacaccaatgccagcatcatgctatttgaactaaatgagcctacgagctcaactttgttgcaagaagtgaaaactacagccctgaccccttggaaaggtccaggcgccgtcagcgaggtgagcaacggcacgtcgaggagggcaggctgcgtctggctgctgcctcttctggtcttgcacctgcttctcaaattttgatgtgagtgccacttccccacccgggaaaggctgccgccaccaccaccaccaacacaacagcaatggcaacaccgacagcaaccaatcagatatatacaaatgaaattagaagaaacacagcctcatgggacagaaatttgagggaggggaacaaagaatactttggggggaaaaaagttttaaaaaagaaattgaaaattgccttgcagatatttaggtacaatggagttttcttttcccaaacgggaagaacacagcacacccggcttggacccactgcaagctgcatcgtgcaacctctttgg

SEQ ID NO: 159130 - DNA, 1607 bp, Homo sapiens
  Payload ID: 11144
  Gene Symbol: NTM
  Gene Name: neurotrimin
  Uniprot ID: Q9P121
  ENST ID: ENST00000425719
  CDS Start-End: 21-1088
ggaagttgtggctgtcgagaatgggggtctgtgggtacctgttcctgccctggaagtgcctcgtggtcgtgtctctcaggctgctgttccttgtacccacaggagtgcccgtgcgcagcggagatgccaccttccccaaagctatggacaacgtgacggtccggcagggggagagcgccaccctcaggtgcactattgacaaccgggtcacccgggtggcctggctaaaccgcagcaccatcctctatgctgggaatgacaagtggtgcctggatcctcgcgtggtccttctgagcaacacccaaacgcagtacagcatcgagatccagaacgtggatgtgtatgacgagggcccttacacctgctcggtgcagacagacaaccacccaaagacctctagggtccacctcattgtgcaagtatctcccaaaattgtagagatttcttcagatatctccattaatgaagggaacaatattagcctcacctgcatagcaactggtagaccagagcctacggttacttggagacacatctctcccaaagcggttggctttgtgagtgaagacgaatacttggaaattcagggcatcaccagggagcagtcaggggactacgagtgcagtgcctccaatgacgtggccgcgcccgtggtacggagagtaaaggtcaccgtgaactatccaccatacatttcagaagccaagggtacaggtgtccccgtgggacaaaaggggacactgcagtgtgaagcctcagcagtcccctcagcagaattccagtggtacaaggatgacaaaagactgattgaaggaaagaaaggggtgaaagtggaaaacagacctttcctctcaaaactcatcttcttcaatgtctctgaacatgactatgggaactacacttgcgtggcctccaacaagctgggccacaccaatgccagcatcatgctatttgaagtgaaaactacagccctgaccccttggaaaggtccaggcgccgtcagcgaggtgagcaacggcacgtcgaggagggcaggctgcgtctggctgctgcctcttctggtcttgcacctgcttctcaaattttgatgtgagtgccacttccccacccgggaaaggctgccgccaccaccaccaccaacacaacagcaatggcaacaccgacagcaaccaatcagatatatacaaatgaaattagaagaaacacagcctcatgggacagaaatttgagggaggggaacaaagaatactttggggggaaaaaagttttaaaaaagaaattgaaaattgccttgcagatatttaggtacaatggagttttcttttcccaaacgggaagaacacagcacacccggcttggacccactgcaagctgcatcgtgcaacctctttggtgccagtgtgggcaagggctcagcctctctgcccacagagtgcccccacgtggaacattctggagctggccatcccaaattcaatcagtccatagagacgaacagaatgagaccttccggcccaagcgtggcgctgcgggcactttggtagactgtgccaccacggcgtgtgttgtgaaacgtgaaataaaaagagcaagaaagaaaaaggaaa

SEQ ID NO: 159131 - DNA, 488 bp, Homo sapiens
  Payload ID: 11144
  Gene Symbol: NTM
  Gene Name: neurotrimin
  ENST ID: ENST00000416661
  CDS Start-End: 434-488
atcctgatgatctcaaaatccccttctagaggggctctcagccttcactctgcagatcaagaagcccaccagtcctcacccacccgactcccaccttccctgcccctgggagccagctttacccagacgagttctgctcccagcctctaaaatgcagaacgggctgctgctttcaaagctatacttcgatggagtttcctatactagtgaaatctgttttaaatgaacatcaagaatagccttgaaagggaaaatatggactcgaatctacgccgactggcaccaagcggcatgtgagaaacgtgaggaaaaaaagtccagctcttcctgctcgtcagctgggccctcccccttccagaaagctaactgtaagtgacatttcattctgctcatccccaaggcaaagttggatgtttttaaagtggaaaaaaaaatgaacggaaaaagaaacggggaaggtgggaagaggtggaaatggaagggcacag

SEQ ID NO: 159132 - DNA, 436 bp, Homo sapiens
  Payload ID: 11144
  Gene Symbol: NTM
  Gene Name: neurotrimin
  ENST ID: ENST00000436745
  CDS Start-End: 329-436
ggagataattacggagaagtcatactctctcacaccctcggctttcttgttgtgtccttcagcaaaacagtggatttaaatctccttgcacaagcttgagagcaacacaatctatcaggaaagaaagaaagaaaaaaaccgaacctgacaaaaaagaagaaaaagaagaagaaaaaaaatcatgaaaaccatccagccaaaaatgcacaattctatctcttgggcaatcttcacggggctggctgctctgtgtctcttccaaggtaagtgacatttcattctgctcatccccaaggcaaagttggatgtttttaaagtggaaaaaaaaatgaacggaaaaagaaacggggaaggtgggaagaggtggaaatggaagggcacaggagtgcccgtgcgcagcggagatgccaccttccccaaagctatggacaacgtg

SEQ ID NO: 159133 - DNA, 2583 bp, Homo sapiens
  Payload ID: 11144
  Gene Symbol: NTM
  Gene Name: neurotrimin
  ENST ID: ENST00000427481
  CDS Start-End: 369-908
ccttcaggtgcactattgacaaccgggtcacccgggtggcctggctaaaccgcagcaccatcctctatgctgggaatgacaagtggtgcctggatcctcgcgtggtccttctgagcaacacccaaacgcagtacagcatcgagatccagaacgtggatgtgtatgacgagggcccttacacctgctcggtgcagacagacaaccacccaaagacctctagggtccacctcattgtgcaagtatctcccaaaattgtagagatttcttcagatatctccattaatgaagggaacaatattagcctcacctgcatagcaactggtagaccagagcctacggttacttggagacacatctctcccaaagcggttggctttgtgagtgaagacgaatacttggaaattcagggcatcaccagggagcagtcaggggactacgagtgcagtgcctccaatgacgtggccgcgcccgtggtacggagagtaaaggtcaccgtgaactatccaccatacatttcagaagccaagggtacaggtgtccccgtgggacaaaaggggacactgcagtgtgaagcctcagcagtcccctcagcagaattccagtggtacaaggatgacaaaagactgattgaaggaaagaaaggggtgaaagtggaaaacagacctttcctctcaaaactcatcttcttcaatgtctctgaacatgactatgggaactacacttgcgtggcctccaacaagctgggccacaccaatgccagcatcatgctatttgaagtgaaaactacagccctgaccccttggaaaggtccaggcgccgtcagcgaggtgagcaacggcacgtcgaggagggcaggctgcgtctggctgctgcctcttctggtcttgcacctgcttctcaaattttgatgtgagtgccacttccccacccgggaaaggctgccgccaccaccaccaccaacacaacagcaatggcaacaccgacagcaaccaatcagatatatacaaatgaaattagaagaaacacagcctcatgggacagaaatttgagggaggggaacaaagaatactttggggggaaaaaagttttaaaaaagaaattgaaaattgccttgcagatatttaggtacaatggagttttcttttcccaaacgggaagaacacagcacacccggcttggacccactgcaagctgcatcgtgcaacctctttggtgccagtgtgggcaagggctcagcctctctgcccacagagtgcccccacgtggaacattctggagctggccatcccaaattcaatcagtccatagagacgaacagaatgagaccttccggcccaagcgtggcgctgcgggcactttggtagactgtgccaccacggcgtgtgttgtgaaacgtgaaataaaaagagcaagaaagaaaaaggaaacaaaataagaccgtctgacagcaacaacggtcccacaaacaagtcacaaaagataccgttaaacttttttttttttttatcattttactacatgaacatcatggataacaagggattctgattcattattaatttcattaattatattttctgatatgagtctagaacttactgcaaaaacaagacaaaactaaaaaaatacaactgagaagggtgaagagaagtatgtttgttaaacagtaaaaatgaatagtatacttcttaactaggtttacaactggtggaccacacaccaggcactaatcacctggtgaggatttggcatatccaccaaaaaatgcatccgatttaaccaacatctccaccagcgctacggactcctcccaattctgacatctcttgcagacaatactatgctctctacacactgtttagaaatggaaaggtgatctgcactgtatcttgggtttgttggctatgcttcctttgatgacatatattatacagtatatatatacatatattttttttgttagagttctagccattttatttctccgcagggtcctttctcagacattactgcatgctgtatatggcgttagctgtgtgttgatcttctaaaagatgatagagtttactggtaattgtgtaatcagctcctgcctttttattttcttgggttatttacatgtcagagacatttataaaaagtgaaaggataaaaaaaaaaaaaaacaactaataccgggcgcagcatctttccaggtgtggctctgcgctaggccaccccaggtggccccgctttctccattctgccctgtggcgttaacagacagcaagcagctgaacaagcagtaccgtcagtacccacttgctttagcccattatgggaatctctgatgcctttgtgaccactggagagtttaatcctcttggtttattttatttcccacctttgtgtgagtgtgtatgaaagagaagaaaatgcaatttttaggtaatcttttttttttttcccctcccctgaaagtctgggaacctgagagtcctcggggaggggtcctggatgtgatgagggaaagggggattgggggatccgggagggtggggttgtctctgacttgacattaaaaagtgttccatgtccctcttc

SEQ ID NO: 159134 - DNA, 2550 bp, Homo sapiens
  Payload ID: 11144
  Gene Symbol: NTM
  Gene Name: neurotrimin
  ENST ID: ENST00000539799
  CDS Start-End: 369-875
ccttcaggtgcactattgacaaccgggtcacccgggtggcctggctaaaccgcagcaccatcctctatgctgggaatgacaagtggtgcctggatcctcgcgtggtccttctgagcaacacccaaacgcagtacagcatcgagatccagaacgtggatgtgtatgacgagggcccttacacctgctcggtgcagacagacaaccacccaaagacctctagggtccacctcattgtgcaagtatctcccaaaattgtagagatttcttcagatatctccattaatgaagggaacaatattagcctcacctgcatagcaactggtagaccagagcctacggttacttggagacacatctctcccaaagcggttggctttgtgagtgaagacgaatacttggaaattcagggcatcaccagggagcagtcaggggactacgagtgcagtgcctccaatgacgtggccgcgcccgtggtacggagagtaaaggtcaccgtgaactatccaccatacatttcagaagccaagggtacaggtgtccccgtgggacaaaaggggacactgcagtgtgaagcctcagcagtcccctcagcagaattccagtggtacaaggatgacaaaagactgattgaaggaaagaaaggggtgaaagtggaaaacagacctttcctctcaaaactcatcttcttcaatgtctctgaacatgactatgggaactacacttgcgtggcctccaacaagctgggccacaccaatgccagcatcatgctatttggtccaggcgccgtcagcgaggtgagcaacggcacgtcgaggagggcaggctgcgtctggctgctgcctcttctggtcttgcacctgcttctcaaattttgatgtgagtgccacttccccacccgggaaaggctgccgccaccaccaccaccaacacaacagcaatggcaacaccgacagcaaccaatcagatatatacaaatgaaattagaagaaacacagcctcatgggacagaaatttgagggaggggaacaaagaatactttggggggaaaaaagttttaaaaaagaaattgaaaattgccttgcagatatttaggtacaatggagttttcttttcccaaacgggaagaacacagcacacccggcttggacccactgcaagctgcatcgtgcaacctctttggtgccagtgtgggcaagggctcagcctctctgcccacagagtgcccccacgtggaacattctggagctggccatcccaaattcaatcagtccatagagacgaacagaatgagaccttccggcccaagcgtggcgctgcgggcactttggtagactgtgccaccacggcgtgtgttgtgaaacgtgaaataaaaagagcaagaaagaaaaaggaaacaaaataagaccgtctgacagcaacaacggtcccacaaacaagtcacaaaagataccgttaaacttttttttttttttatcattttactacatgaacatcatggataacaagggattctgattcattattaatttcattaattatattttctgatatgagtctagaacttactgcaaaaacaagacaaaactaaaaaaatacaactgagaagggtgaagagaagtatgtttgttaaacagtaaaaatgaatagtatacttcttaactaggtttacaactggtggaccacacaccaggcactaatcacctggtgaggatttggcatatccaccaaaaaatgcatccgatttaaccaacatctccaccagcgctacggactcctcccaattctgacatctcttgcagacaatactatgctctctacacactgtttagaaatggaaaggtgatctgcactgtatcttgggtttgttggctatgcttcctttgatgacatatattatacagtatatatatacatatattttttttgttagagttctagccattttatttctccgcagggtcctttctcagacattactgcatgctgtatatggcgttagctgtgtgttgatcttctaaaagatgatagagtttactggtaattgtgtaatcagctcctgcctttttattttcttgggttatttacatgtcagagacatttataaaaagtgaaaggataaaaaaaaaaaaaaacaactaataccgggcgcagcatctttccaggtgtggctctgcgctaggccaccccaggtggccccgctttctccattctgccctgtggcgttaacagacagcaagcagctgaacaagcagtaccgtcagtacccacttgctttagcccattatgggaatctctgatgcctttgtgaccactggagagtttaatcctcttggtttattttatttcccacctttgtgtgagtgtgtatgaaagagaagaaaatgcaatttttaggtaatcttttttttttttcccctcccctgaaagtctgggaacctgagagtcctcggggaggggtcctggatgtgatgagggaaagggggattgggggatccgggagggtggggttgtctctgacttgacattaaaaagtgttccatgtccctcttc

SEQ ID NO: 159135 - DNA, 644 bp, Homo sapiens
  Payload ID: 11144
  Gene Symbol: NTM
  Gene Name: neurotrimin
  ENST ID: ENST00000550167
  CDS Start-End: 71-644
agtaagtaagtgacatttcattctgctcatccccaaggcaaagttggatgtttttaaagtggaaaaaaaaatgaacggaaaaagaaacggggaaggtgggaagaggtggaaatggaagggcacaggagtgcccgtgcgcagcggagatgccaccttccccaaagctatggacaacgtgacggtccggcagggggagagcgccaccctcaggtgcactattgacaaccgggtcacccgggtggcctggctaaaccgcagcaccatcctctatgctgggaatgacaagtggtgcctggatcctcgcgtggtccttctgagcaacacccaaacgcagtacagcatcgagatccagaacgtggatgtgtatgacgagggcccttacacctgctcggtgcagacagacaaccacccaaagacctctagggtccacctcattgtgcaagtatctcccaaaattgtagagatttcttcagatatctccattaatgaagggaacaatattagcctcacctgcatagcaactggtagaccagagcctacggttacttggagacacatctctcccaaagcggttggctttgtgagtgaagacgaatacttggaaattcagggcatcaccagggagcagtcaggggactacgagt

SEQ ID NO: 159136 - DNA, 2492 bp, Homo sapiens
  Payload ID: 11145
  Gene Symbol: NTRK1
  Gene Name: neurotrophic tyrosine kinase, receptor, type 1
  ENST ID: ENST00000358660
  CDS Start-End: 42-2423
acagacggctgccccgcctgagcgaggcgggcgccgccgcgatgctgcgaggcggacggcgcgggcagcttggctggcacagctgggctgcggggccgggcagcctgctggcttggctgatactggcatctgcgggcgccgcaccctgccccgatgcctgctgcccccacggctcctcgggactgcgatgcacccgggatggggccctggatagcctccaccacctgcccggcgcagagaacctgactgagctctacatcgagaaccagcagcatctgcagcatctggagctccgtgatctgaggggcctgggggagctgagaaacctcaccatcgtgaagagtggtctccgtttcgtggcgccagatgccttccatttcactcctcggctcagtcgcctgaatctctccttcaacgctctggagtctctctcctggaaaactgtgcagggcctctccttacaggaactggtcctgtcggggaaccctctgcactgttcttgtgccctgcgctggctacagcgctgggaggaggagggactgggcggagtgcctgaacagaagctgcagtgtcatgggcaagggcccctggcccacatgcccaatgccagctgtggtgtgcccacgctgaaggtccaggtgcccaatgcctcggtggatgtgggggacgacgtgctgctgcggtgccaggtggaggggcggggcctggagcaggccggctggatcctcacagagctggagcagtcagccacggtgatgaaatctgggggtctgccatccctggggctgaccctggccaatgtcaccagtgacctcaacaggaagaacgtgacgtgctgggcagagaacgatgtgggccgggcagaggtctctgttcaggtcaacgtctccttcccggccagtgtgcagctgcacacggcggtggagatgcaccactggtgcatccccttctctgtggatgggcagccggcaccgtctctgcgctggctcttcaatggctccgtgctcaatgagaccagcttcatcttcactgagttcctggagccggcagccaatgagaccgtgcggcacgggtgtctgcgcctcaaccagcccacccacgtcaacaacggcaactacacgctgctggctgccaaccccttcggccaggcctccgcctccatcatggctgccttcatggacaaccctttcgagttcaaccccgaggaccccatccctgacactaacagcacatctggagacccggtggagaagaaggacgaaacaccttttggggtctcggtggctgtgggcctggccgtctttgcctgcctcttcctttctacgctgctccttgtgctcaacaaatgtggacggagaaacaagtttgggatcaaccgcccggctgtgctggctccagaggatgggctggccatgtccctgcatttcatgacattgggtggcagctccctgtcccccaccgagggcaaaggctctgggctccaaggccacatcatcgagaacccacaatacttcagtgatgcctccccctcaggtgttcaccacatcaagcgccgggacatcgtgctcaagtgggagctgggggagggcgcctttgggaaggtcttccttgctgagtgccacaacctcctgcctgagcaggacaagatgctggtggctgtcaaggcactgaaggaggcgtccgagagtgctcggcaggacttccagcgtgaggctgagctgctcaccatgctgcagcaccagcacatcgtgcgcttcttcggcgtctgcaccgagggccgccccctgctcatggtctttgagtatatgcggcacggggacctcaaccgcttcctccgatcccatggacctgatgccaagctgctggctggtggggaggatgtggctccaggccccctgggtctggggcagctgctggccgtggctagccaggtcgctgcggggatggtgtacctggcgggtctgcattttgtgcaccgggacctggccacacgcaactgtctagtgggccagggactggtggtcaagattggtgattttggcatgagcagggatatctacagcaccgactattaccgtgtgggaggccgcaccatgctgcccattcgctggatgccgcccgagagcatcctgtaccgtaagttcaccaccgagagcgacgtgtggagcttcggcgtggtgctctgggagatcttcacctacggcaagcagccctggtaccagctctccaacacggaggcaatcgactgcatcacgcagggacgtgagttggagcggccacgtgcctgcccaccagaggtctacgccatcatgcggggctgctggcagcgggagccccagcaacgccacagcatcaaggatgtgcacgcccggctgcaagccctggcccaggcacctcctgtctacctggatgtcctgggctagggggccggcccaggggctgggagtggttagccggaatactggggcctgccctcagcatcccccatagct

SEQ ID NO: 159137 - DNA, 2701 bp, Homo sapiens
  Payload ID: 11145
  Gene Symbol: NTRK1
  Gene Name: neurotrophic tyrosine kinase, receptor, type 1
  Uniprot ID: P04629
  ENST ID: ENST00000368196
  CDS Start-End: 121-2493
gccctttcctggcggctgggtctttaacaccgcccagcgcacatgtcgggggaggcctggcagctgcagctgggagcgcacagacggctgccccgcctgagcgaggcgggcgccgccgcgatgctgcgaggcggacggcgcgggcagcttggctggcacagctgggctgcggggccgggcagcctgctggcttggctgatactggcatctgcgggcgccgcaccctgccccgatgcctgctgcccccacggctcctcgggactgcgatgcacccgggatggggccctggatagcctccaccacctgcccggcgcagagaacctgactgagctctacatcgagaaccagcagcatctgcagcatctggagctccgtgatctgaggggcctgggggagctgagaaacctcaccatcgtgaagagtggtctccgtttcgtggcgccagatgccttccatttcactcctcggctcagtcgcctgaatctctccttcaacgctctggagtctctctcctggaaaactgtgcagggcctctccttacaggaactggtcctgtcggggaaccctctgcactgttcttgtgccctgcgctggctacagcgctgggaggaggagggactgggcggagtgcctgaacagaagctgcagtgtcatgggcaagggcccctggcccacatgcccaatgccagctgtggtgtgcccacgctgaaggtccaggtgcccaatgcctcggtggatgtgggggacgacgtgctgctgcggtgccaggtggaggggcggggcctggagcaggccggctggatcctcacagagctggagcagtcagccacggtgatgaaatctgggggtctgccatccctggggctgaccctggccaatgtcaccagtgacctcaacaggaagaacgtgacgtgctgggcagagaacgatgtgggccgggcagaggtctctgttcaggtcaacgtctccttcccggccagtgtgcagctgcacacggcggtggagatgcaccactggtgcatccccttctctgtggatgggcagccggcaccgtctctgcgctggctcttcaatggctccgtgctcaatgagaccagcttcatcttcactgagttcctggagccggcagccaatgagaccgtgcggcacgggtgtctgcgcctcaaccagcccacccacgtcaacaacggcaactacacgctgctggctgccaaccccttcggccaggcctccgcctccatcatggctgccttcatggacaaccctttcgagttcaaccccgaggaccccatccctgacactaacagcacatctggagacccggtggagaagaaggacgaaacaccttttggggtctcggtggctgtgggcctggccgtctttgcctgcctcttcctttctacgctgctccttgtgctcaacaaatgtggacggagaaacaagtttgggatcaaccgcccggctgtgctggctccagaggatgggctggccatgtccctgcatttcatgacattgggtggcagctccctgtcccccaccgagggcaaaggctctgggctccaaggccacatcatcgagaacccacaatacttcagtgatgcctgtgttcaccacatcaagcgccgggacatcgtgctcaagtgggagctgggggagggcgcctttgggaaggtcttccttgctgagtgccacaacctcctgcctgagcaggacaagatgctggtggctgtcaaggcactgaaggaggcgtccgagagtgctcggcaggacttccagcgtgaggctgagctgctcaccatgctgcagcaccagcacatcgtgcgcttcttcggcgtctgcaccgagggccgccccctgctcatggtctttgagtatatgcggcacggggacctcaaccgcttcctccgatcccatggacctgatgccaagctgctggctggtggggaggatgtggctccaggccccctgggtctggggcagctgctggccgtggctagccaggtcgctgcggggatggtgtacctggcgggtctgcattttgtgcaccgggacctggccacacgcaactgtctagtgggccagggactggtggtcaagattggtgattttggcatgagcagggatatctacagcaccgactattaccgtgtgggaggccgcaccatgctgcccattcgctggatgccgcccgagagcatcctgtaccgtaagttcaccaccgagagcgacgtgtggagcttcggcgtggtgctctgggagatcttcacctacggcaagcagccctggtaccagctctccaacacggaggcaatcgactgcatcacgcagggacgtgagttggagcggccacgtgcctgcccaccagaggtctacgccatcatgcggggctgctggcagcgggagccccagcaacgccacagcatcaaggatgtgcacgcccggctgcaagccctggcccaggcacctcctgtctacctggatgtcctgggctagggggccggcccaggggctgggagtggttagccggaatactggggcctgccctcagcatcccccatagctcccagcagccccagggtgatctcaaagtatctaattcaccctcagcatgtgggaagggacaggtgggggctgggagtagaggatgttcctgcttctctaggcaaggtcccgtcatagcaattatatttattatcccttg

SEQ ID NO: 159138 - DNA, 2609 bp, Homo sapiens
  Payload ID: 11145
  Gene Symbol: NTRK1
  Gene Name: neurotrophic tyrosine kinase, receptor, type 1
  Uniprot ID: P04629
  ENST ID: ENST00000392302
  CDS Start-End: 175-2457
caggagagaaggactgagacgggaatgtggaatgcactgggcaaatggtcactgacacagagtgcagatgcctgcttctgggactcaatgcactgcaccctggtcatctgcggactcagcctgagcttccagagggcctaggagcagtaagggagtgagtgggcaactcggcgcatgaaggaggccgccctcatctgcctggcaccctctgtacccccgatcttgacggtgaagtcctgggacaccatgcagttgcgggctgctagatctcggtgcacaaacttgttggcagcaagctacatcgagaaccagcagcatctgcagcatctggagctccgtgatctgaggggcctgggggagctgagaaacctcaccatcgtgaagagtggtctccgtttcgtggcgccagatgccttccatttcactcctcggctcagtcgcctgaatctctccttcaacgctctggagtctctctcctggaaaactgtgcagggcctctccttacaggaactggtcctgtcggggaaccctctgcactgttcttgtgccctgcgctggctacagcgctgggaggaggagggactgggcggagtgcctgaacagaagctgcagtgtcatgggcaagggcccctggcccacatgcccaatgccagctgtggtgtgcccacgctgaaggtccaggtgcccaatgcctcggtggatgtgggggacgacgtgctgctgcggtgccaggtggaggggcggggcctggagcaggccggctggatcctcacagagctggagcagtcagccacggtgatgaaatctgggggtctgccatccctggggctgaccctggccaatgtcaccagtgacctcaacaggaagaacgtgacgtgctgggcagagaacgatgtgggccgggcagaggtctctgttcaggtcaacgtctccttcccggccagtgtgcagctgcacacggcggtggagatgcaccactggtgcatccccttctctgtggatgggcagccggcaccgtctctgcgctggctcttcaatggctccgtgctcaatgagaccagcttcatcttcactgagttcctggagccggcagccaatgagaccgtgcggcacgggtgtctgcgcctcaaccagcccacccacgtcaacaacggcaactacacgctgctggctgccaaccccttcggccaggcctccgcctccatcatggctgccttcatggacaaccctttcgagttcaaccccgaggaccccatccctgacactaacagcacatctggagacccggtggagaagaaggacgaaacaccttttggggtctcggtggctgtgggcctggccgtctttgcctgcctcttcctttctacgctgctccttgtgctcaacaaatgtggacggagaaacaagtttgggatcaaccgcccggctgtgctggctccagaggatgggctggccatgtccctgcatttcatgacattgggtggcagctccctgtcccccaccgagggcaaaggctctgggctccaaggccacatcatcgagaacccacaatacttcagtgatgcctgtgttcaccacatcaagcgccgggacatcgtgctcaagtgggagctgggggagggcgcctttgggaaggtcttccttgctgagtgccacaacctcctgcctgagcaggacaagatgctggtggctgtcaaggcactgaaggaggcgtccgagagtgctcggcaggacttccagcgtgaggctgagctgctcaccatgctgcagcaccagcacatcgtgcgcttcttcggcgtctgcaccgagggccgccccctgctcatggtctttgagtatatgcggcacggggacctcaaccgcttcctccgatcccatggacctgatgccaagctgctggctggtggggaggatgtggctccaggccccctgggtctggggcagctgctggccgtggctagccaggtcgctgcggggatggtgtacctggcgggtctgcattttgtgcaccgggacctggccacacgcaactgtctagtgggccagggactggtggtcaagattggtgattttggcatgagcagggatatctacagcaccgactattaccgtgtgggaggccgcaccatgctgcccattcgctggatgccgcccgagagcatcctgtaccgtaagttcaccaccgagagcgacgtgtggagcttcggcgtggtgctctgggagatcttcacctacggcaagcagccctggtaccagctctccaacacggaggcaatcgactgcatcacgcagggacgtgagttggagcggccacgtgcctgcccaccagaggtctacgccatcatgcggggctgctggcagcgggagccccagcaacgccacagcatcaaggatgtgcacgcccggctgcaagccctggcccaggcacctcctgtctacctggatgtcctgggctagggggccggcccaggggctgggagtggttagccggaatactggggcctgccctcagcatcccccatagctcccagcagccccagggtgatctcaaagtatctaattcaccctcagcatgtgggaagggacaggtgggggctgggagtagagga

SEQ ID NO: 159139 - DNA, 2432 bp, Homo sapiens
  Payload ID: 11145
  Gene Symbol: NTRK1
  Gene Name: neurotrophic tyrosine kinase, receptor, type 1
  Uniprot ID: P04629
  ENST ID: ENST00000524377
  CDS Start-End: 42-2432
acagacggctgccccgcctgagcgaggcgggcgccgccgcgatgctgcgaggcggacggcgcgggcagcttggctggcacagctgggctgcggggccgggcagcctgctggcttggctgatactggcatctgcgggcgccgcaccctgccccgatgcctgctgcccccacggctcctcgggactgcgatgcacccgggatggggccctggatagcctccaccacctgcccggcgcagagaacctgactgagctctacatcgagaaccagcagcatctgcagcatctggagctccgtgatctgaggggcctgggggagctgagaaacctcaccatcgtgaagagtggtctccgtttcgtggcgccagatgccttccatttcactcctcggctcagtcgcctgaatctctccttcaacgctctggagtctctctcctggaaaactgtgcagggcctctccttacaggaactggtcctgtcggggaaccctctgcactgttcttgtgccctgcgctggctacagcgctgggaggaggagggactgggcggagtgcctgaacagaagctgcagtgtcatgggcaagggcccctggcccacatgcccaatgccagctgtggtgtgcccacgctgaaggtccaggtgcccaatgcctcggtggatgtgggggacgacgtgctgctgcggtgccaggtggaggggcggggcctggagcaggccggctggatcctcacagagctggagcagtcagccacggtgatgaaatctgggggtctgccatccctggggctgaccctggccaatgtcaccagtgacctcaacaggaagaacgtgacgtgctgggcagagaacgatgtgggccgggcagaggtctctgttcaggtcaacgtctccttcccggccagtgtgcagctgcacacggcggtggagatgcaccactggtgcatccccttctctgtggatgggcagccggcaccgtctctgcgctggctcttcaatggctccgtgctcaatgagaccagcttcatcttcactgagttcctggagccggcagccaatgagaccgtgcggcacgggtgtctgcgcctcaaccagcccacccacgtcaacaacggcaactacacgctgctggctgccaaccccttcggccaggcctccgcctccatcatggctgccttcatggacaaccctttcgagttcaaccccgaggaccccatccctgtctccttctcgccggtggacactaacagcacatctggagacccggtggagaagaaggacgaaacaccttttggggtctcggtggctgtgggcctggccgtctttgcctgcctcttcctttctacgctgctccttgtgctcaacaaatgtggacggagaaacaagtttgggatcaaccgcccggctgtgctggctccagaggatgggctggccatgtccctgcatttcatgacattgggtggcagctccctgtcccccaccgagggcaaaggctctgggctccaaggccacatcatcgagaacccacaatacttcagtgatgcctgtgttcaccacatcaagcgccgggacatcgtgctcaagtgggagctgggggagggcgcctttgggaaggtcttccttgctgagtgccacaacctcctgcctgagcaggacaagatgctggtggctgtcaaggcactgaaggaggcgtccgagagtgctcggcaggacttccagcgtgaggctgagctgctcaccatgctgcagcaccagcacatcgtgcgcttcttcggcgtctgcaccgagggccgccccctgctcatggtctttgagtatatgcggcacggggacctcaaccgcttcctccgatcccatggacctgatgccaagctgctggctggtggggaggatgtggctccaggccccctgggtctggggcagctgctggccgtggctagccaggtcgctgcggggatggtgtacctggcgggtctgcattttgtgcaccgggacctggccacacgcaactgtctagtgggccagggactggtggtcaagattggtgattttggcatgagcagggatatctacagcaccgactattaccgtgtgggaggccgcaccatgctgcccattcgctggatgccgcccgagagcatcctgtaccgtaagttcaccaccgagagcgacgtgtggagcttcggcgtggtgctctgggagatcttcacctacggcaagcagccctggtaccagctctccaacacggaggcaatcgactgcatcacgcagggacgtgagttggagcggccacgtgcctgcccaccagaggtctacgccatcatgcggggctgctggcagcgggagccccagcaacgccacagcatcaaggatgtgcacgcccggctgcaagccctggcccaggcacctcctgtctacctggatgtcctgggctag

SEQ ID NO: 159140 - DNA, 2508 bp, Homo sapiens
  Payload ID: 11145
  Gene Symbol: NTRK1
  Gene Name: neurotrophic tyrosine kinase, receptor, type 1
  ENST ID: ENST00000497019
  CDS Start-End: 152-1318
aatgtggaatgcactgggcaaatggtcactgacacagagtgcagatgcctgcttctgggactcaatgcactgcaccctggtcatctgcggactcagcctgagcttccagagggcctaggagcagtaagggagtgagtgggcaactcggcgcatgaaggaggccgccctcatctgcctggcaccctctgtacccccgatcttgacggtgaagtcctgggacaccatgcagttgcgggctgctagatctcggtgcacaaacttgttggcagcaagctacatcgagaaccagcagcatctgcagcatctggagctccgtgatctgaggggcctgggggagctgagaaacctcaccatcgtgaagagtggtctccgtttcgtggcgccagatgccttccatttcactcctcggctcagtcgcctgaatctctccttcaacgctctggagtctctctcctggaaaactgtgcagggcctctccttacaggaactggtcctgtcggggaaccctctgcactgttcttgtgccctgcgctggctacagcgctgggaggaggagggactgggcggagtgcctgaacagaagctgcagtgtcatgggcaagggcccctggcccacatgcccaatgccagctgtggtgtgcccacgctgaaggtccaggtgcccaatgcctcggtggatgtgggggacgacgtgctgctgcggtgccaggtggaggggcggggcctggagcaggccggctggatcctcacagagctggagcagtcagccacggtgatgtcccggccagtgtgcagctgcacacggcggtggagatgcaccactggtgcatccccttctctgtggatgggcagccggcaccgtctctgcgctggctcttcaatggctccgtgctcaatgagaccagcttcatcttcactgagttcctggagccggcagccaatgagaccgtgcggcacgggtgtctgcgcctcaaccagcccacccacgtcaacaacggcaactacacgctgctggctgccaaccccttcggccaggcctccgcctccatcatggctgccttcatggacaaccctttcgagttcaaccccgaggaccccatccctgacactaacagcacatctggagacccggtggagaagaaggacgaaacaccttttggggtctcggtggctgtgggcctggccgtctttgcctgcctcttcctttctacgctgctccttgtgctcaacaaatgtggacggagaaacaagtttgggatcaaccgcccggctgtgctggctccagaggatgggctggccatgtccctgcatttcatgacattgggtggcagctccctgtcccccaccgagggcaaaggctctgggctccaaggccacatcatcgagaacccacaatacttcagtgatgcctgtgttcaccacatcaagcgccgggacatcgtgctcaagtgggagctgggggagggcgcctttgggaaggtcttccttgctgagtgccacaacctcctgcctgagcaggacaagatgctggtggctgtcaaggcactgaaggaggcgtccgagagtgctcggcaggacttccagcgtgaggctgagctgctcaccatgctgcagcaccagcacatcgtgcgcttcttcggcgtctgcaccgagggccgccccctgctcatggtctttgagtatatgcggcacggggacctcaaccgcttcctccgatcccatggacctgatgccaagctgctggctggtggggaggatgtggctccaggccccctgggtctggggcagctgctggccgtggctagccaggtcgctgcggggatggtgtacctggcgggtctgcattttgtgcaccgggacctggccacacgcaactgtctagtgggccagggactggtggtcaagattggtgattttggcatgagcagggatatctacagcaccgactattaccgtgtgggaggccgcaccatgctgcccattcgctggatgccgcccgagagcatcctgtaccgtaagttcaccaccgagagcgacgtgtggagcttcggcgtggtgctctgggagatcttcacctacggcaagcagccctggtaccagctctccaacacggaggcaatcgactgcatcacgcagggacgtgagttggagcggccacgtgcctgcccaccagaggtctacgccatcatgcggggctgctggcagcgggagccccagcaacgccacagcatcaaggatgtgcacgcccggctgcaagccctggcccaggcacctcctgtctacctggatgtcctgggctagggggccggcccaggggctgggagtggttagccggaatactggggcctgccctcagcatcccccatagctcccagcagccccagggtgatctcaaagtatctaattcaccctcagcatgtgggaagggacaggtgggggctgggagtagaggatgttcctgcttctctaggcaaggtcccgtcatagcaattatatttattatccctt

SEQ ID NO: 159141 - DNA, 8633 bp, Homo sapiens
  Payload ID: 11146
  Gene Symbol: NTRK2
  Gene Name: neurotrophic tyrosine kinase, receptor, type 2
  Uniprot ID: Q16620
  ENST ID: ENST00000277120
  CDS Start-End: 484-3000
ggagcaggagcctcgctggctgcttcgctcgcgctctacgcgctcagtccccggcggtagcaggagcctggacccaggcgccgccggcgggcgtgaggcgccggagcccggcctcgaggtgcataccggacccccattcgcatctaacaaggaatctgcgccccagagagtcccgggagcgccgccggtcggtgcccggcgcgccgggccatgcagcgacggccgccgcggagctccgagcagcggtagcgcccccctgtaaagcggttcgctatgccggggccactgtgaaccctgccgcctgccggaacactcttcgctccggaccagctcagcctctgataagctggactcggcacgcccgcaacaagcaccgaggagttaagagagccgcaagcgcagggaaggcctccccgcacgggtgggggaaagcggccggtgcagcgcggggacaggcactcgggctggcactggctgctagggatgtcgtcctggataaggtggcatggacccgccatggcgcggctctggggcttctgctggctggttgtgggcttctggagggccgctttcgcctgtcccacgtcctgcaaatgcagtgcctctcggatctggtgcagcgacccttctcctggcatcgtggcatttccgagattggagcctaacagtgtagatcctgagaacatcaccgaaattttcatcgcaaaccagaaaaggttagaaatcatcaacgaagatgatgttgaagcttatgtgggactgagaaatctgacaattgtggattctggattaaaatttgtggctcataaagcatttctgaaaaacagcaacctgcagcacatcaattttacccgaaacaaactgacgagtttgtctaggaaacatttccgtcaccttgacttgtctgaactgatcctggtgggcaatccatttacatgctcctgtgacattatgtggatcaagactctccaagaggctaaatccagtccagacactcaggatttgtactgcctgaatgaaagcagcaagaatattcccctggcaaacctgcagatacccaattgtggtttgccatctgcaaatctggccgcacctaacctcactgtggaggaaggaaagtctatcacattatcctgtagtgtggcaggtgatccggttcctaatatgtattgggatgttggtaacctggtttccaaacatatgaatgaaacaagccacacacagggctccttaaggataactaacatttcatccgatgacagtgggaagcagatctcttgtgtggcggaaaatcttgtaggagaagatcaagattctgtcaacctcactgtgcattttgcaccaactatcacatttctcgaatctccaacctcagaccaccactggtgcattccattcactgtgaaaggcaaccccaaaccagcgcttcagtggttctataacggggcaatattgaatgagtccaaatacatctgtactaaaatacatgttaccaatcacacggagtaccacggctgcctccagctggataatcccactcacatgaacaatggggactacactctaatagccaagaatgagtatgggaaggatgagaaacagatttctgctcacttcatgggctggcctggaattgacgatggtgcaaacccaaattatcctgatgtaatttatgaagattatggaactgcagcgaatgacatcggggacaccacgaacagaagtaatgaaatcccttccacagacgtcactgataaaaccggtcgggaacatctctcggtctatgctgtggtggtgattgcgtctgtggtgggattttgccttttggtaatgctgtttctgcttaagttggcaagacactccaagtttggcatgaaagatttctcatggtttggatttgggaaagtaaaatcaagacaaggtgttggcccagcctccgttatcagcaatgatgatgactctgccagcccactccatcacatctccaatgggagtaacactccatcttcttcggaaggtggcccagatgctgtcattattggaatgaccaagatccctgtcattgaaaatccccagtactttggcatcaccaacagtcagctcaagccagacacatttgttcagcacatcaagcgacataacattgttctgaaaagggagctaggcgaaggagcctttggaaaagtgttcctagctgaatgctataacctctgtcctgagcaggacaagatcttggtggcagtgaagaccctgaaggatgccagtgacaatgcacgcaaggacttccaccgtgaggccgagctcctgaccaacctccagcatgagcacatcgtcaagttctatggcgtctgcgtggagggcgaccccctcatcatggtctttgagtacatgaagcatggggacctcaacaagttcctcagggcacacggccctgatgccgtgctgatggctgagggcaacccgcccacggaactgacgcagtcgcagatgctgcatatagcccagcagatcgccgcgggcatggtctacctggcgtcccagcacttcgtgcaccgcgatttggccaccaggaactgcctggtcggggagaacttgctggtgaaaatcggggactttgggatgtcccgggacgtgtacagcactgactactacagggtcggtggccacacaatgctgcccattcgctggatgcctccagagagcatcatgtacaggaaattcacgacggaaagcgacgtctggagcctgggggtcgtgttgtgggagattttcacctatggcaaacagccctggtaccagctgtcaaacaatgaggtgatagagtgtatcactcagggccgagtcctgcagcgaccccgcacgtgcccccaggaggtgtatgagctgatgctggggtgctggcagcgagagccccacatgaggaagaacatcaagggcatccataccctccttcagaacttggccaaggcatctccggtctacctggacattctaggctagggcccttttccccagaccgatccttcccaacgtactcctcagacgggctgagaggatgaacatcttttaactgccgctggaggccaccaagctgctctccttcactctgacagtattaacatcaaagactccgagaagctctcgagggaagcagtgtgtacttcttcatccatagacacagtattgacttctttttggcattatctctttctctctttccatctcccttggttgttcctttttctttttttaaattttctttttcttttttttttcgtcttccctgcttcacgattcttaccctttcttttgaatcaatctggcttctgcattactattaactctgcatagacaaaggccttaacaaacgtaatttgttatatcagcagacactccagtttgcccaccacaactaacaatgccttgttgtattcctgcctttgatgtggatgaaaaaaagggaaaacaaatatttcacttaaactttgtcacttctgctgtacagatatcgagagtttctatggattcacttctatttatttattattattactgttcttattgtttttggatggcttaagcctgtgtataaaaaagaaaacttgtgttcaatctgtgaagcctttatctatgggagattaaaaccagagagaaagaagatttattatgaaccgcaatatgggaggaacaaagacaaccactgggatcagctggtgtcagtccctacttaggaaatactcagcaactgttagctgggaagaatgtattcggcaccttcccctgaggacctttctgaggagtaaaaagactactggcctctgtgccatggatgattcttttcccatcaccagaaatgatagcgtgcagtagagagcaaagatggcttccgtgagacacaagatggcgcatagtgtgctcggacacagttttgtcttcgtaggttgtgatgatagcactggtttgtttctcaagcgctatccacagaacctttgtcaacttcagttgaaaagaggtggattcatgtccagagctcatttcggggtcaggtgggaaagccaagaacttggaaaagataagacaagctataaattcggaggcaagtttcttttacaatgaacttttcagatctcacttccctccgacccctaacttccatgcccacccgtccttttaactgtgcaagcaaaattgtgcatggtcttcgtcgattaataccttgtgtgcagacactactgctccagacgtcgtttccctgataggtagagcagatccataaaaaggtatgacttatacaattaggggaagctaatggagtttattagctgagtatcaatgtctctgcgttgtacggtggtgatgggttttaatgaatatggaccctgaagcctggaaatcctcatccacgtcgaacccacaggactgtgggaagggcagaatcaatccctaagggaaaggaaacctcaccctgagggcatcacatgcactcatgttcagtgtacacaggtcaagtcccttgctctgggctctagttgggagagtggtttcattccaagtgtactccattgtcagtatgctgtttttgtttccttcactccattcaaaaagtcaaaatacaaaatttggcacagcatgccaacgggaggctgtgcccagaccaagcactggaagtgtgcttctaggcatagtcattggttttgcaaaaagagggctcaaatttaaatagaaatttacagctatttgaatggtcagatataccaagaaagaaaaatatttctgttcctcaagaaaacttgctaccctctgtgaggggaattttgctaaacttgacatctttataacatgagccagattgaaagggagtgattttcattcatcttaggtcatgttatttcatatttgtttctgaaggtgcgatagctctgttttaggttttgcttgcgcctgttaattactggaacaccttatttttcattaaaggctttgaaagccaattctcaaaaattcaaaagtgcaaattaacagaacaaaaggaaatccagtagcaactgcagtcaagcgagggagttgacaagataaaccttacgtccattcaagttatatgctggcctatgagagatgagagttgggtcgtttgttctctttgttgatgattttaaaaaaaccctctagaatacacataataacataatgaaagccatatctccatgatatatatgtgcacatatatatacatacatgtgcatgtatgtatcatattaaggacccatggtactcttaaaacactgtagaactctgtgacgcagtaaggaaggggcagatttgtacaaaaacttttctagattccatcagcaaaaaccaacacaggtttgtcacgctgcatgtctggccagctaatctcgggggaaaagctacaagttatttattttattttaagagaataaagtaggtaataatttaagggatcaaattcaaggaggaatgtgcaattttagagcaaagatttgtttaaggcaaatgagactttgggagcatcccattccagttttgtcttttttttctctgaaagaaaaaagcaaaaaataaaataaaattccacttataccttctgacaagtccctaaaggtcttgaaataaaaggttctatgcaagtgcaaagttttatagttatttttattgctgattattactattactatctctgttgtcttaagagtatgtgctgatttcagagacatctcaaattgaaagaatatcagattgcttttaaagtagctgaacgagccacagaatatctgaaattattcattgttgttcctccaccaccccctttctcatggtctgatttttagaagagtggcatcctcgttctaaaatgtaatgatcaccaaatacggccttccatcaaatttgtgaaaactacaacagtataacagtgacaaacctaattctctagcccaaacctggtctgacaatcatttccatttagaagtcattgaatagttttccaaacactttccatgtgtgttagcaaattattcctattttgtgtagatgaggacgttgagactcagagacattcagaggcacgctagaggtctccagcctagcttccagcaccattgggactgaatccaagtactctcactctgaacttcgtggttctgtccactagagactctaatatgcaaacaagcagttcaggaaagaaagcatgctaacacattcatgaagcagtatatgaagttagaagaacaaaaggaaatacaggagatgacaagcaactgagatattgtgatatataatcatgctcttagcttcagctaaattcagctaaattcttgtacactgaaccaatgtcataatcaggcttatttagaaaacactttgaactatgctataaaagattatatcagaattcatattatacatgtgttcacatcagcgctacctgtgatgttttcatgtatttatgtatgtgttataaatacttgatttatacatatacaaatgcacatacgtagtgtgtttgtgtgtttatgtataaatttataggcacacaataatagaggtaattataagtaggatgcggtatgaataatttgcttaaaatatgctaaataaccaaaactgtttaacgtcatgttgctgttagtgcttccatactccacgtgggtaggactacatcacacttttcaactctgtgcagtactgcatgggtggaagacatatttaagataatgtgcttcccaaaacaactgaataaaagccatcccactacattgagtgctttctctggctccttgcaaagaaagatactttttgtaatggtccaggaaaggaacattgctttctttttgtctttcagcacatttgtattatgctcaccttgtctctgtctcactgtgacccctttacacttgagttcagagttcaagcattccaaatataaattggaatgttggcagcccagtggcttgaaggccaatgatgagcagtccaagaccccacagcgagatgagcaactcttaggaattcccacatcctagagtgaatgcaccaactaacagtatagaatgctgtccttttcaaagcgtcctaacagcaggattacctggtcaagtatggactttctttgaatctttcttttcacaaattggactgcctgtaataccaataacattgttgtatctaactaaataaatgactgcatatacacacataccctcaattctcttgcttccccattttctttttcatcccctgtctcaggacttttattttcaatgttgacctttggtttggccatatatcactgttataggaaatctcatgagaggaatggctagtgacccaactctccaaatgtctaagttagtagttacagctgattttttatgatgcataattggaatgtggagcctctgaggttgtgatagcttgtacatgaatttcaaatgtcattctaaagaatgaggggtgggagggatttatagttagaaacgacagtgcaggaaggggtattttcttgttgtcagggctggaatgaatcactgctgctcaagtcaaaggttcttgaatatccttagtttttgcatttcccctccttttcctttgacctttatttatttaattatgtatttatttatttatttatatacttttgctccattcagcacaaacacaaagcaaagcaaaaaaaaaaatatatatatatatatctgtatatgtgttgtaggcaaaacactgtgaatttcacaacaaccaccaccaagcaactattttgccatcttaacatacatctcaggagacgaaatgagaaaagatggggatgtcattttttagtctatgcgtttgaggccaggtccatgtttatttatttctttagtctatgcattaatgaaaatgatcctgagtggaggttagctgaacgttcaatgtactggagcaagcatcataaaagctgctagtagccatgtgtttgaacaggaaaaatattacagaaaatgaaatgtaaaggcctatatcttgcagcttgtatatcttactattgcttaaaaaatgtataaagcagctggaaatgttttaaatacaaggtctttgaattaaatgtggattttaaatatgtaatcccttgacaaatgaccaaattatggtgaactattgctccctgcgttctttgatcattacctatgacttacaaatctgcctggagatgtggacattctgcatttgcttctgtatctggagagatgtttgtatatatccaggccgtatacacacacatttccatatctctctacagatatatttccccttcaatcgtgacctggtatttggaactctccttttcatttggcttatcttccttttaatgtgatgtctctgtgctaatacttaccagttcttgttttgcaatctgttttgaggtccattgctttactaagacccactgcatcttggctgatttcaaagtgacacctgaatacagtgtttaaaaaaaaaaaagttttgtttgtaaatcatgtgaccagcttctctcaacctgacatggaaagtctcttgtactacagtgtatttaataaaaatgatgtcttacaataaataacatactccaaaagagagactaaaaatga

SEQ ID NO: 159142 - DNA, 8226 bp, Homo sapiens
  Payload ID: 11146
  Gene Symbol: NTRK2
  Gene Name: neurotrophic tyrosine kinase, receptor, type 2
  Uniprot ID: Q16620
  ENST ID: ENST00000304053
  CDS Start-End: 484-2145
ggagcaggagcctcgctggctgcttcgctcgcgctctacgcgctcagtccccggcggtagcaggagcctggacccaggcgccgccggcgggcgtgaggcgccggagcccggcctcgaggtgcataccggacccccattcgcatctaacaaggaatctgcgccccagagagtcccgggagcgccgccggtcggtgcccggcgcgccgggccatgcagcgacggccgccgcggagctccgagcagcggtagcgcccccctgtaaagcggttcgctatgccggggccactgtgaaccctgccgcctgccggaacactcttcgctccggaccagctcagcctctgataagctggactcggcacgcccgcaacaagcaccgaggagttaagagagccgcaagcgcagggaaggcctccccgcacgggtgggggaaagcggccggtgcagcgcggggacaggcactcgggctggcactggctgctagggatgtcgtcctggataaggtggcatggacccgccatggcgcggctctggggcttctgctggctggttgtgggcttctggagggccgctttcgcctgtcccacgtcctgcaaatgcagtgcctctcggatctggtgcagcgacccttctcctggcatcgtggcatttccgagattggagcctaacagtgtagatcctgagaacatcaccgaaattttcatcgcaaaccagaaaaggttagaaatcatcaacgaagatgatgttgaagcttatgtgggactgagaaatctgacaattgtggattctggattaaaatttgtggctcataaagcatttctgaaaaacagcaacctgcagcacatcaattttacccgaaacaaactgacgagtttgtctaggaaacatttccgtcaccttgacttgtctgaactgatcctggtgggcaatccatttacatgctcctgtgacattatgtggatcaagactctccaagaggctaaatccagtccagacactcaggatttgtactgcctgaatgaaagcagcaagaatattcccctggcaaacctgcagatacccaattgtggtttgccatctgcaaatctggccgcacctaacctcactgtggaggaaggaaagtctatcacattatcctgtagtgtggcaggtgatccggttcctaatatgtattgggatgttggtaacctggtttccaaacatatgaatgaaacaagccacacacagggctccttaaggataactaacatttcatccgatgacagtgggaagcagatctcttgtgtggcggaaaatcttgtaggagaagatcaagattctgtcaacctcactgtgcattttgcaccaactatcacatttctcgaatctccaacctcagaccaccactggtgcattccattcactgtgaaaggcaaccccaaaccagcgcttcagtggttctataacggggcaatattgaatgagtccaaatacatctgtactaaaatacatgttaccaatcacacggagtaccacggctgcctccagctggataatcccactcacatgaacaatggggactacactctaatagccaagaatgagtatgggaaggatgagaaacagatttctgctcacttcatgggctggcctggaattgacgatggtgcaaacccaaattatcctgatgtaatttatgaagattatggaactgcagcgaatgacatcggggacaccacgaacagaagtaatgaaatcccttccacagacgtcactgataaaaccggtcgggaacatctctcggtctatgctgtggtggtgattgcgtctgtggtgggattttgccttttggtaatgctgtttctgcttaagttggcaagacactccaagtttggcatgaaagatttctcatggtttggatttgggaaagtaaaatcaagacaaggtgttggcccagcctccgttatcagcaatgatgatgactctgccagcccactccatcacatctccaatgggagtaacactccatcttcttcggaaggtggcccagatgctgtcattattggaatgaccaagatccctgtcattgaaaatccccagtactttggcatcaccaacagtcagctcaagccagacacatggcccagaggttcccccaagaccgcctgataataatttggtatttggaggctcctgtgtcactgcaggaactaaaggaggctaaatccatgcctgatggaggagaagagttctatggttatctgcaaattctggccagacaacatcttgacgtcactccttagcttccataacctagccaagcaagaagttgcctttccaagacaaagcagtgtgctctaatgactaacccctcaaagtactatgccactttaactatagacccatctcctcgatcaatcaggatggcaagatggagctgaggagctcagcaacatcaagtctggagttggtctttaactcaactagctcgtttagacgtgtctgaacaccacatcacctgacagcacggggtggtttcccagtaaaatttacaaactcagctcaagggcagctgtgttgctttcctttccttgactgctgagaaactttttgacagggaacaatggaaacacaccttctgagctgaaacaaacaaacagaaacaaaacatactaaccagcaaaatccccaaatcatcaatcttgggttctcttgaagggcaggagtgtgttttatcttctcccgtcggagcaaacactatagatgtcctccctaaaattctgtcttccctagagcagccttgtaaattagctagggtcctagggttgaggcctaaatcaacttaaaattgtctctaaatatgtacctggatgtgtttgtacttgcagagcatgccctcttcatgtgcctagggctagtaactccctgtggcagaggcatgtaaagtattctgactttttttttttcaacttaattccatttccaatgaaatggatttttaaaaattttctccagagtgtgccatacttctccagctattatagttaatgtgtgtgtatccttgtgtatatgtgtgtttgtgtgtgcatatgtgttttcctagtggttacatgcttactaggcaattatgtaaataagcacagattcataggccagctaggcctgaggaaagaagacattataaagggagggagtattttaacattagctaaagctatcacacaaggcacccattctgctcccctcaacagccacagcccacttcgtccttgtcttaccaataaggggaaaggctggaggtgatatttttcacagaaccgcagaggttttgaacatatttgcaacattactttgagtacacatgagcaaaaattctgaattacatccaggaccccagaagctcattagatcaaagagtgcggggcccctcagagttaccagagattatctgcagacttcagtgcaatcgaatgaccatggtccattttgatggtcagaggtaggactgaaaaacgggtagaaacaattgctttagcgcttccttctgtactttgcctattaatgttttgtctttcaaaaatatattttctcctaattgtttaattggccaaataatggctgctttgggagttgtttgtatgccttggaaggccatggcctgcactttaaaaataagctaagtccattctgcccagcacgagcattaggacagagaatgcacttattttaggatccttaaaaattgcttcttttatggcacactgggttgacgactcatctcgtgggagccttcatggcacattgctgctgttctgcaggtcccaatacaattccttccccctctcagtgccacggcccccccattgctagctacaacaatttgatatcatattcccttttcaactccaaaggagatgataagaagctatcaaataatgctttaaaaaagcaacttgagtttcttaaaagaaaggaaatgaatacatgctgcataattacatttaaaatgtaagccatgttattataagccgcactgagatgaagatttgttagcaaaccagtttcaagcacactcacagtgaagtaaaatcatgtttttagcatctgaccattgggtaatattattctttgttatcaaaagagaaatatcacccaagtatagtatacttagacctcctagaggaaacactccagtcctaagcttggtgtctgaaaagaaaaacaaaaataaagattatggatttaggtcagggagacagagtgatattctgaagactgtgtttactccctcatcatcggccaaccaagatggagttctgcatcctgcacatatcagacatttcagtccaatttcaccaaagcatcagtgatgttctagaagcatcccagcagatggaggatcctaatgtatttgttctgggtatttcccaaggcccagcctgactggagtgtgtgtaccaacaggatgaatccaatcaagctacgcccccattttggtttcggattggccactcttgcatgtgctagtagattgtggaccaggaccagctgagcaaacacagttgcagagtagcctcctatgttgctaagaagctcctgctacccaggtgctttgaacaattgagtgctccctctggttaagtagagatggcaccaccggagtttttcttggatgtgaggctcaatcctttacggcagctattataacaaagtgaaggttttctccctgggaaatgcagcttttctctgtctttactaattctgccagcctgtgagagtaaccaccgtagctgggcttcttctcagattaattgtcatgccaggtctccttcctggggagctgtgatgctgctctgaggttgattgctgaggttgtagtgggtttttgtttgtttttgtttagtttttcttgattgttcttctttctcttgaatggcaagagaagaaacactttctctaacccacggccaggaaggaaatggggagagagctacttcttagttcaacctggttgccacataaaggaatctctctccttggactcagcccctaactggaagcaagagccactgccctctgagactgagagagcagcccgaggaggagatgaatccattctgccctttgtttgggtttgcttcctgtcagtgagagaatgctgaggcagttcctgttatgtgaaactttcatttttaaaaccaggacagtcctaaacagactggaatgagttggtcaatcccagttggtataggcccaatgatttttgctagtaagataggattgtcttcctcacccaaaatgccttcaagtgccctaaaatgggtattttaaaataagaataaataatgtagatttagtagaaaacctggaaaacataagaaacaaagatgaaacgaaaagtcccatgtaattccaccagttagagttaaccactgatatcgtttggatatatggctttctagtcttgtggatatccttttaatctcttgtaatataaagtctgaccatatgtgtccttgcatttgtttgtactggactctgttaatatttctatagtaatggctcactttggggagattgtgctgcacagtgtgtaggaagcacattgggtgtattattcccagttttgtattttgtatttccttggagatgtgcaggggttaagagcgggggtctggccatagctggccacgtcagactctcatatggtaagtatcacagagcacatgaggcctgtgttatgcgctggaaagactcaggaaatgagaggctctcttgttctgacaaggcaggctgagagctctcatttagggtcatcactccagataactccaaatgcagtttattgctcaactgaagcagatgatcactttttgcctccaagttcttcaccctagctagctcctttcaaagagccgagtatgctggatcttaaagggccaaactagttacatctcatacatttcctgatgtttagggatgccttcacttccatcaaggataccttggctgtgcaaggacctctgatagctggagtctccttttggtcactcccagctttgcttaaacttgatggagtttgctgtccagtgatccccggatctttcatcatgaaagccttccttcctctcctgatgtctcaggcctctagacctagactggggttctggcaaggaggcctctatcaatagtatgacatccaataatatgttagtgttgatattttgcacagtaatattaagtttaagagattataaaaatgagttcaaatgaataagttcctgtgatgtaagagattagatatgtgtgatttcagaaccaaaggcaggggggaatcccagaaagaaaacaataatataatcctagtttctatatattatttttattcattactgtatatgggtagagatcaatattctttcttatgctgttactattaattaacacattttttaaccatgccattgaacttttgggtgcattaaagtggaacccaagctcctcattagataataatggcatttggactgagtgccatattcctaaatttccaataaagtggttgatatagagaggacaggataaagccctatagtgtgcagttatatcaaaacagctagtctccactttagggaatgcctttactagagattacatgaaatgtctgcttataaaataagcagagatggcaccactaagcagccacctgaattgttttcctacaggaatgattacttttcagatccatttatgttttcatgctcaatacttactccccttccctgcaacacccaaagagtttacttttgcaagtcatttggtcttcagtctactactgaggaatagagaggcactaactgctttacccaggatcagaactcatgttcttaccttctattaatagagtacttgagccagatggactaactggtctcacattttctctatcttggttttacttccataaacatcaatatctttacccacatgatttttccatcctcccatttttttccatatgtattagggttcaggaactatgatgctaatgatcacatttcttcctagttcctaatttcattagtgccatttcctgatatctacagaaacaattatcaatacatgtagctgcttgagccttatttagaaggctagcctttcttttccaagtgctgtcagaatgtatacatttagtctgtctttttcccttttaggagtctttgttctgggttgatggcaaaattcctctttttacatgtgagatttttgatttcactgaattctacctagatttttatggacattggattttaaagaggaaaacactcattttcttagtaagatattggtgatacatagctatgccattgatttccatactcctgagctttggggagggagacagtggccaagtagcaggcagaataagatcatcactcatgtcctgaatcaatcacactttccttctcggattgtgtatatgctctgccacttcctacatattacatcctgagtttttaagtaaagtggatcttagccagatttgagtctaatggctgattcatcggcatagttcttggcgttaacatctcagtgtcctctttagttctctttgaggattcatgtcattgagggcctttgtgcctccacttgtctcagtatgaggaagaactttggtgtgagggcggagctatgtgaagggttgctgggttgggggattagttcatatggtccccatgccatctatttacttttggagagaggggactttgagtgggtgggtatggatagatgttcctcaaggaaaccctgctggctaatgggcactacatctgtgtattactgtgattctctctgtaagctccccatgtggccaaggacccccctcctaccagggcacttcctgccacctcattgcactggtctcaaccattcagcctgctgctgctgcaccatgttgggctgcggtaggatagggaaggggttctgttgattgctaaatgttgcctaactttatttccctctcccacatttcatgcaagggagcggacctaacacatgacttgcattctcttcctatgttcagaaactccagggcttgcccacgtgtatgtatgagtgaccaatggagcttggaattctttatctatatgatctgtccgaaaatgagatcttttgtactggaatttgtgatgtagttgatcattcagagccaaacgcatataccaataaagacaagactgtcatata

SEQ ID NO: 159143 - DNA, 3708 bp, Homo sapiens
  Payload ID: 11146
  Gene Symbol: NTRK2
  Gene Name: neurotrophic tyrosine kinase, receptor, type 2
  Uniprot ID: Q16620
  ENST ID: ENST00000323115
  CDS Start-End: 354-2822
cccccattcgcatctaacaaggaatctgcgccccagagagtcccgggagcgccgccggtcggtgcccggcgcgccgggccatgcagcgacggccgccgcggagctccgagcagcggtagcgcccccctgtaaagcggttcgctatgccggggccactgtgaaccctgccgcctgccggaacactcttcgctccggaccagctcagcctctgataagctggactcggcacgcccgcaacaagcaccgaggagttaagagagccgcaagcgcagggaaggcctccccgcacgggtgggggaaagcggccggtgcagcgcggggacaggcactcgggctggcactggctgctagggatgtcgtcctggataaggtggcatggacccgccatggcgcggctctggggcttctgctggctggttgtgggcttctggagggccgctttcgcctgtcccacgtcctgcaaatgcagtgcctctcggatctggtgcagcgacccttctcctggcatcgtggcatttccgagattggagcctaacagtgtagatcctgagaacatcaccgaaattttcatcgcaaaccagaaaaggttagaaatcatcaacgaagatgatgttgaagcttatgtgggactgagaaatctgacaattgtggattctggattaaaatttgtggctcataaagcatttctgaaaaacagcaacctgcagcacatcaattttacccgaaacaaactgacgagtttgtctaggaaacatttccgtcaccttgacttgtctgaactgatcctggtgggcaatccatttacatgctcctgtgacattatgtggatcaagactctccaagaggctaaatccagtccagacactcaggatttgtactgcctgaatgaaagcagcaagaatattcccctggcaaacctgcagatacccaattgtggtttgccatctgcaaatctggccgcacctaacctcactgtggaggaaggaaagtctatcacattatcctgtagtgtggcaggtgatccggttcctaatatgtattgggatgttggtaacctggtttccaaacatatgaatgaaacaagccacacacagggctccttaaggataactaacatttcatccgatgacagtgggaagcagatctcttgtgtggcggaaaatcttgtaggagaagatcaagattctgtcaacctcactgtgcattttgcaccaactatcacatttctcgaatctccaacctcagaccaccactggtgcattccattcactgtgaaaggcaaccccaaaccagcgcttcagtggttctataacggggcaatattgaatgagtccaaatacatctgtactaaaatacatgttaccaatcacacggagtaccacggctgcctccagctggataatcccactcacatgaacaatggggactacactctaatagccaagaatgagtatgggaaggatgagaaacagatttctgctcacttcatgggctggcctggaattgacgatggtgcaaacccaaattatcctgatgtaatttatgaagattatggaactgcagcgaatgacatcggggacaccacgaacagaagtaatgaaatcccttccacagacgtcactgataaaaccggtcgggaacatctctcggtctatgctgtggtggtgattgcgtctgtggtgggattttgccttttggtaatgctgtttctgcttaagttggcaagacactccaagtttggcatgaaaggcccagcctccgttatcagcaatgatgatgactctgccagcccactccatcacatctccaatgggagtaacactccatcttcttcggaaggtggcccagatgctgtcattattggaatgaccaagatccctgtcattgaaaatccccagtactttggcatcaccaacagtcagctcaagccagacacatttgttcagcacatcaagcgacataacattgttctgaaaagggagctaggcgaaggagcctttggaaaagtgttcctagctgaatgctataacctctgtcctgagcaggacaagatcttggtggcagtgaagaccctgaaggatgccagtgacaatgcacgcaaggacttccaccgtgaggccgagctcctgaccaacctccagcatgagcacatcgtcaagttctatggcgtctgcgtggagggcgaccccctcatcatggtctttgagtacatgaagcatggggacctcaacaagttcctcagggcacacggccctgatgccgtgctgatggctgagggcaacccgcccacggaactgacgcagtcgcagatgctgcatatagcccagcagatcgccgcgggcatggtctacctggcgtcccagcacttcgtgcaccgcgatttggccaccaggaactgcctggtcggggagaacttgctggtgaaaatcggggactttgggatgtcccgggacgtgtacagcactgactactacagggtcggtggccacacaatgctgcccattcgctggatgcctccagagagcatcatgtacaggaaattcacgacggaaagcgacgtctggagcctgggggtcgtgttgtgggagattttcacctatggcaaacagccctggtaccagctgtcaaacaatgaggtgatagagtgtatcactcagggccgagtcctgcagcgaccccgcacgtgcccccaggaggtgtatgagctgatgctggggtgctggcagcgagagccccacatgaggaagaacatcaagggcatccataccctccttcagaacttggccaaggcatctccggtctacctggacattctaggctagggcccttttccccagaccgatccttcccaacgtactcctcagacgggctgagaggatgaacatcttttaactgccgctggaggccaccaagctgctctccttcactctgacagtattaacatcaaagactccgagaagctctcgagggaagcagtgtgtacttcttcatccatagacacagtattgacttctttttggcattatctctttctctctttccatctcccttggttgttcctttttctttttttaaattttctttttcttttttttttcgtcttccctgcttcacgattcttaccctttcttttgaatcaatctggcttctgcattactattaactctgcatagacaaaggccttaacaaacgtaatttgttatatcagcagacactccagtttgcccaccacaactaacaatgccttgttgtattcctgcctttgatgtggatgaaaaaaagggaaaacaaatatttcacttaaactttgtcacttctgctgtacagatatcgagagtttctatggattcacttctatttatttattattattactgttcttattgtttttggatggcttaagcctgtgtataaaaaagaaaacttgtgttcaatctgtgaagcctttatctatgggagattaaaaccagagagaaagaagatttattatgaaccgcaatatgggaggaacaaagacaaccactgggatcagctggtgtcagtccctacttaggaaatactcagcaactgttagctgggaagaatgtattcggcaccttcccctgaggacctttctgaggagtaaaaagactactggcctctgtgccatggatgattcttttcccatcaccagaaatgatagcgtgcagtagagagcaaagatggctt

SEQ ID NO: 159144 - DNA, 6646 bp, Homo sapiens
  Payload ID: 11146
  Gene Symbol: NTRK2
  Gene Name: neurotrophic tyrosine kinase, receptor, type 2
  Uniprot ID: Q16620
  ENST ID: ENST00000359847
  CDS Start-End: 90-1523
aagcgcagggaaggcctccccgcacgggtgggggaaagcggccggtgcagcgcggggacaggcactcgggctggcactggctgctagggatgtcgtcctggataaggtggcatggacccgccatggcgcggctctggggcttctgctggctggttgtgggcttctggagggccgctttcgcctgtcccacgtcctgcaaatgcagtgcctctcggatctggtgcagcgacccttctcctggcatcgtggcatttccgagattggagcctaacagtgtagatcctgagaacatcaccgaaattttcatcgcaaaccagaaaaggttagaaatcatcaacgaagatgatgttgaagcttatgtgggactgagaaatctgacaattgtggattctggattaaaatttgtggctcataaagcatttctgaaaaacagcaacctgcagcacatcaattttacccgaaacaaactgacgagtttgtctaggaaacatttccgtcaccttgacttgtctgaactgatcctggtgggcaatccatttacatgctcctgtgacattatgtggatcaagactctccaagaggctaaatccagtccagacactcaggatttgtactgcctgaatgaaagcagcaagaatattcccctggcaaacctgcagatacccaattgtggtttgccatctgcaaatctggccgcacctaacctcactgtggaggaaggaaagtctatcacattatcctgtagtgtggcaggtgatccggttcctaatatgtattgggatgttggtaacctggtttccaaacatatgaatgaaacaagccacacacagggctccttaaggataactaacatttcatccgatgacagtgggaagcagatctcttgtgtggcggaaaatcttgtaggagaagatcaagattctgtcaacctcactgtgcattttgcaccaactatcacatttctcgaatctccaacctcagaccaccactggtgcattccattcactgtgaaaggcaaccccaaaccagcgcttcagtggttctataacggggcaatattgaatgagtccaaatacatctgtactaaaatacatgttaccaatcacacggagtaccacggctgcctccagctggataatcccactcacatgaacaatggggactacactctaatagccaagaatgagtatgggaaggatgagaaacagatttctgctcacttcatgggctggcctggaattgacgatggtgcaaacccaaattatcctgatgtaatttatgaagattatggaactgcagcgaatgacatcggggacaccacgaacagaagtaatgaaatcccttccacagacgtcactgataaaaccggtcgggaacatctctcggtctatgctgtggtggtgattgcgtctgtggtgggattttgccttttggtaatgctgtttctgcttaagttggcaagacactccaagtttggcatgaaaggttttgttttgtttcataagatcccactggatgggtagctgaaataaaggaaaagacagagaaaggggctgtggtgcttgttggttgatgctgccatgtaagctggactcctgggactgctgttggcttatcccgggaagtgctgcttatctggggttttctggtagatgtgggcggtgtttggaggctgtactatatgaagcctgcatatactgtgagctgtgattggggaacaccaatgcagaggtaactctcaggcagctaagcagcacctcaagaaaacatgttaaattaatgcttctcttcttacagtagttcaaatacaaaactgaaatgaaatcccattggattgtacttctcttctgaaaagtgtgctttttgaccctactggacatttattgacttaattgcttctgtttattaaaattgacctgcaaagttaaaaaaaaattaaagttgagaacaggtataagtgcacactgaatagtctaatctacatgtaacacatattttagtgtgattttctatactctaatcagcactgaattcagagggtttgactttttcatctataacacagtgactaaaagagttaagggtatatataccatcactttgggacttggtagtattattaaaaggttatttccttcactgtcaataaaagtccaaatgtttagcttaggtctgagagtcaaacaatgttaaggattgtcttaaagttccttagccagcaaaacaaaacaaaacaaaacaaacaaatgaaaaacgtttaaaaagaagaagaagaaaaaaaacaagaacaagcagcaacagctgttttgttggggctatagatttaagttaggcatagtcaatttcagaataactaagagtggaatatatgcatatggtgaaattataaccttgcccttttttatttgccctctgcgatccacctgctttttagaagtctgccgagtgagaaggccacagtatctcatgctgtttgcattacagaactgcagcttttctactctgaaaaggcctgggagcagaatggctggcctgctgtgagcaggagaggagattctaagaaggatagtcccccctacaacatactgtcatactgctgggttttcatgggtaggaaagcttgtcctgaccccagcagcaaagaggtggcaggtcgctaatgaatatatgctttataatgtccttcttcattgctgagagggcagccttagagctgtggatttctgcatcccccctgagtctgacccatggacacctgtttcattcactttagcatcacagtgacctttgtatgctctgttcagtctgtgtcaggcagtatgcttgtcctgaagagaggtttggctatccccaccccaccccaccccaccctgttccttttttatcaggaggacttcagagccaggcctgcagcattttgtttgaaaacacaatcagctctgacagttagacatgcacacagacgccatagctggattggaaacattgatgttttaaaaatttattttttttggaaatagttgcacaaatgctgcaatttagctttaaggttctatagatttttaactagtccaacacagtcagaaacattgttttgaatcctctgtaaaccaaggcattaatcttaataaaccaggatccatttaggtaccacttgatataaaaaggatatccataatgaatattttatactgcatcctttacattagccactaaatacgttattgcttgatgaagacctttcacagaatcctatggattgcagcatttcacttggctacttcatacccatgccttaaagaggggcagtttctcaaaagcagaaacatgccgccagttctcaagttttcctcctaactccatttgaatgtaagggcagctggcccccaatgtggggaggtccgaacattttctgaattcccattttcttgttcgcggctaaatgacagtttctgtcattacttagattccgatctttcccaaaggtgttgatttacaaagaggccagctaatagcagaaatcatgaccctgaaagagagatgaaattcaagctgtgagccaggcaggagctcagtatggcaaaggttcttgagaatcagccatttggtacaaaaaagatttttaaagcttttatgttataccatggagccatagaaaggctatggattgtttaagaactattttaaagtgttccagacccaaaaaggaaaaataaaaaaaaaggaatatttgtacccaacagctagaaggattgcaaggtagatttttgttttaaaatggagagaagtggacagataaggccatttaatatatcaaagatcagttgacatctcctagggaatgatgaaaacagcaggctattagaaaattatttcatatagttctcgtgttcttttcttttttttaatccctgaagggatgatcagtaacatagcttctcttttctgtactctagaccaccccttttcatcattttgctttttatgtctcccataagaaatgtgctttttagagcttcctaatgcatgtgttgcattattgcagcattagaaaaggagaggtagcatttttgctgaaatcgggcctgtcactctccaataaaggttctggcacttcaatgccaggcaggtctcctaaatgaacagaatgatctgtgtgagccgatgcctgcccttccagaggggccactgtccccagccgcagccaactgtgtcccacaggaatgggagcctaggtttccaaatcttgtgattctttaggagaaacatgaaacctggatttcgtgtgaaatgtcccgattgttaaaaagttggctcaattatttttaaaacattttgtaagccaacaaaagtctgtgggctgccagtttattacttttgtcttaaaacatgatcattgttctctcacggtatccttctgtcttcccgttgcaaattcacttttctttcttcctgacattgccattgagggctttgttaccacaagctaagaaactgagtttaacagcccagttatctgcaacatgtcaattacctttgctcctctcctgtgattcccaccatgctgtgaccctcagctgtctccctttgctgggaattctgcaccaatgtctcccctcaacccattccctggttggtcctactcccgtgtggccagagacatcctagcaaatccttcctcctattatatctgacactaatttcttttcaacagcgctcatgtctcttggcccagtcaggtgctgccaggtttagataggaaagtacatgtcccattttcatgggtgcccttaatgtggtccacgtcctatatcttattatatttactcatggctcaatgggggcctccagagaccctctcaggctgctgagctagactaaggaatgcatccaccgtcatcacatgagacactgactctgtgacgacaaaagtacaaacagtctgaggctaagaaaggttcatctcacaacaggaaaaacaaatctcaacacacattagagataattgattcaggggttttctctcccagtctcccagcagggactgatttcatttctgacccactaggttttctttccagaaataggtagcaaggacaagaactaaacaatcccagccccacccagcaacacagaacacaggagtttgcttttggcttctcactctccaagtaaccctgaattaggcccagaatggctgaggcttggagcatctcctcagacagagcagaggcgacacctcttcaggggtgtgtggagtaaatagctcgaagagctgaagacagaaaaccagtttcacgccaggtgcgagagagagcataatggagggaagcccgctttctctctcctcttcttttctctttatttctttagagcacttgacttttttttctctctctctctagtattctaaactgaccccatgaccaactgagaatttatttttgtttcattggttgtttcacagaattagaacacacacgactttttattcctccattgcaaaatggaatcaagatactacacaagacctgtgctttcttcctttgcatgatttacacctccgcctgttttggtgctagctgtctagaacttctctcttggtttgaatctgattccttcacactacactagaagtttatttcatcttgttttgtctagactccagatacagagggacagctggactgaggacaagcaattccatctagcatagggtctctcagggttggtgcatccagccacatgggcagggccagtcacatctagtctatgtccccagagcccttggagttgcgcagcttagctgacttgactccaaggaaattagtacagaagtaaccactctattaagtgtgttctgctatgttcacatgcctgtagtacctgcaaaccatgccaggttcatctaaagacataggggaagattaaggactcttttggacagaccatgaattgaatttgctgccaggtgctgccagactgaatttggctgacagaactcccagcccaggaaagttccatgacaatgactgtcgcagaaggaaatttcccactaaagtcagtccattttcaagttttggtcttcagagacaaaagaacgtcccagccacctgattttgatggtgaggtaactctaagttgaattcaggctagtgttgcagtatagctttggcatgttcatgagtgagcacccagaatgtgttgaaccaacccccacccctaactactgactatgactgcagtgggtttttatggggaaaaaaagtgtgaaaagcaaaaagaaaggaacagagattttttatcacctttattgtaagacagtccatttatgaattgagtataaacacatacaaagtaacaagagattcctaagaaacgcaaatccttgagtttcacgcacttcatgttcaaccatttgctgtaatccagaggcagcctgtgaatcattctcatgccctgttttttttttttttttcctataatgttctgggtttaaaagccatcttttccacattttctgtaaataatggataatcattttaaaaatttttatttttagtgctgttttaacaatgtagatagatcataaatgtacttgctgaattcaatcatttttaacaagccaataaagtttgataattca

SEQ ID NO: 159145 - DNA, 8178 bp, Homo sapiens
  Payload ID: 11146
  Gene Symbol: NTRK2
  Gene Name: neurotrophic tyrosine kinase, receptor, type 2
  Uniprot ID: Q16620
  ENST ID: ENST00000376208
  CDS Start-End: 484-2097
ggagcaggagcctcgctggctgcttcgctcgcgctctacgcgctcagtccccggcggtagcaggagcctggacccaggcgccgccggcgggcgtgaggcgccggagcccggcctcgaggtgcataccggacccccattcgcatctaacaaggaatctgcgccccagagagtcccgggagcgccgccggtcggtgcccggcgcgccgggccatgcagcgacggccgccgcggagctccgagcagcggtagcgcccccctgtaaagcggttcgctatgccggggccactgtgaaccctgccgcctgccggaacactcttcgctccggaccagctcagcctctgataagctggactcggcacgcccgcaacaagcaccgaggagttaagagagccgcaagcgcagggaaggcctccccgcacgggtgggggaaagcggccggtgcagcgcggggacaggcactcgggctggcactggctgctagggatgtcgtcctggataaggtggcatggacccgccatggcgcggctctggggcttctgctggctggttgtgggcttctggagggccgctttcgcctgtcccacgtcctgcaaatgcagtgcctctcggatctggtgcagcgacccttctcctggcatcgtggcatttccgagattggagcctaacagtgtagatcctgagaacatcaccgaaattttcatcgcaaaccagaaaaggttagaaatcatcaacgaagatgatgttgaagcttatgtgggactgagaaatctgacaattgtggattctggattaaaatttgtggctcataaagcatttctgaaaaacagcaacctgcagcacatcaattttacccgaaacaaactgacgagtttgtctaggaaacatttccgtcaccttgacttgtctgaactgatcctggtgggcaatccatttacatgctcctgtgacattatgtggatcaagactctccaagaggctaaatccagtccagacactcaggatttgtactgcctgaatgaaagcagcaagaatattcccctggcaaacctgcagatacccaattgtggtttgccatctgcaaatctggccgcacctaacctcactgtggaggaaggaaagtctatcacattatcctgtagtgtggcaggtgatccggttcctaatatgtattgggatgttggtaacctggtttccaaacatatgaatgaaacaagccacacacagggctccttaaggataactaacatttcatccgatgacagtgggaagcagatctcttgtgtggcggaaaatcttgtaggagaagatcaagattctgtcaacctcactgtgcattttgcaccaactatcacatttctcgaatctccaacctcagaccaccactggtgcattccattcactgtgaaaggcaaccccaaaccagcgcttcagtggttctataacggggcaatattgaatgagtccaaatacatctgtactaaaatacatgttaccaatcacacggagtaccacggctgcctccagctggataatcccactcacatgaacaatggggactacactctaatagccaagaatgagtatgggaaggatgagaaacagatttctgctcacttcatgggctggcctggaattgacgatggtgcaaacccaaattatcctgatgtaatttatgaagattatggaactgcagcgaatgacatcggggacaccacgaacagaagtaatgaaatcccttccacagacgtcactgataaaaccggtcgggaacatctctcggtctatgctgtggtggtgattgcgtctgtggtgggattttgccttttggtaatgctgtttctgcttaagttggcaagacactccaagtttggcatgaaaggcccagcctccgttatcagcaatgatgatgactctgccagcccactccatcacatctccaatgggagtaacactccatcttcttcggaaggtggcccagatgctgtcattattggaatgaccaagatccctgtcattgaaaatccccagtactttggcatcaccaacagtcagctcaagccagacacatggcccagaggttcccccaagaccgcctgataataatttggtatttggaggctcctgtgtcactgcaggaactaaaggaggctaaatccatgcctgatggaggagaagagttctatggttatctgcaaattctggccagacaacatcttgacgtcactccttagcttccataacctagccaagcaagaagttgcctttccaagacaaagcagtgtgctctaatgactaacccctcaaagtactatgccactttaactatagacccatctcctcgatcaatcaggatggcaagatggagctgaggagctcagcaacatcaagtctggagttggtctttaactcaactagctcgtttagacgtgtctgaacaccacatcacctgacagcacggggtggtttcccagtaaaatttacaaactcagctcaagggcagctgtgttgctttcctttccttgactgctgagaaactttttgacagggaacaatggaaacacaccttctgagctgaaacaaacaaacagaaacaaaacatactaaccagcaaaatccccaaatcatcaatcttgggttctcttgaagggcaggagtgtgttttatcttctcccgtcggagcaaacactatagatgtcctccctaaaattctgtcttccctagagcagccttgtaaattagctagggtcctagggttgaggcctaaatcaacttaaaattgtctctaaatatgtacctggatgtgtttgtacttgcagagcatgccctcttcatgtgcctagggctagtaactccctgtggcagaggcatgtaaagtattctgactttttttttttcaacttaattccatttccaatgaaatggatttttaaaaattttctccagagtgtgccatacttctccagctattatagttaatgtgtgtgtatccttgtgtatatgtgtgtttgtgtgtgcatatgtgttttcctagtggttacatgcttactaggcaattatgtaaataagcacagattcataggccagctaggcctgaggaaagaagacattataaagggagggagtattttaacattagctaaagctatcacacaaggcacccattctgctcccctcaacagccacagcccacttcgtccttgtcttaccaataaggggaaaggctggaggtgatatttttcacagaaccgcagaggttttgaacatatttgcaacattactttgagtacacatgagcaaaaattctgaattacatccaggaccccagaagctcattagatcaaagagtgcggggcccctcagagttaccagagattatctgcagacttcagtgcaatcgaatgaccatggtccattttgatggtcagaggtaggactgaaaaacgggtagaaacaattgctttagcgcttccttctgtactttgcctattaatgttttgtctttcaaaaatatattttctcctaattgtttaattggccaaataatggctgctttgggagttgtttgtatgccttggaaggccatggcctgcactttaaaaataagctaagtccattctgcccagcacgagcattaggacagagaatgcacttattttaggatccttaaaaattgcttcttttatggcacactgggttgacgactcatctcgtgggagccttcatggcacattgctgctgttctgcaggtcccaatacaattccttccccctctcagtgccacggcccccccattgctagctacaacaatttgatatcatattcccttttcaactccaaaggagatgataagaagctatcaaataatgctttaaaaaagcaacttgagtttcttaaaagaaaggaaatgaatacatgctgcataattacatttaaaatgtaagccatgttattataagccgcactgagatgaagatttgttagcaaaccagtttcaagcacactcacagtgaagtaaaatcatgtttttagcatctgaccattgggtaatattattctttgttatcaaaagagaaatatcacccaagtatagtatacttagacctcctagaggaaacactccagtcctaagcttggtgtctgaaaagaaaaacaaaaataaagattatggatttaggtcagggagacagagtgatattctgaagactgtgtttactccctcatcatcggccaaccaagatggagttctgcatcctgcacatatcagacatttcagtccaatttcaccaaagcatcagtgatgttctagaagcatcccagcagatggaggatcctaatgtatttgttctgggtatttcccaaggcccagcctgactggagtgtgtgtaccaacaggatgaatccaatcaagctacgcccccattttggtttcggattggccactcttgcatgtgctagtagattgtggaccaggaccagctgagcaaacacagttgcagagtagcctcctatgttgctaagaagctcctgctacccaggtgctttgaacaattgagtgctccctctggttaagtagagatggcaccaccggagtttttcttggatgtgaggctcaatcctttacggcagctattataacaaagtgaaggttttctccctgggaaatgcagcttttctctgtctttactaattctgccagcctgtgagagtaaccaccgtagctgggcttcttctcagattaattgtcatgccaggtctccttcctggggagctgtgatgctgctctgaggttgattgctgaggttgtagtgggtttttgtttgtttttgtttagtttttcttgattgttcttctttctcttgaatggcaagagaagaaacactttctctaacccacggccaggaaggaaatggggagagagctacttcttagttcaacctggttgccacataaaggaatctctctccttggactcagcccctaactggaagcaagagccactgccctctgagactgagagagcagcccgaggaggagatgaatccattctgccctttgtttgggtttgcttcctgtcagtgagagaatgctgaggcagttcctgttatgtgaaactttcatttttaaaaccaggacagtcctaaacagactggaatgagttggtcaatcccagttggtataggcccaatgatttttgctagtaagataggattgtcttcctcacccaaaatgccttcaagtgccctaaaatgggtattttaaaataagaataaataatgtagatttagtagaaaacctggaaaacataagaaacaaagatgaaacgaaaagtcccatgtaattccaccagttagagttaaccactgatatcgtttggatatatggctttctagtcttgtggatatccttttaatctcttgtaatataaagtctgaccatatgtgtccttgcatttgtttgtactggactctgttaatatttctatagtaatggctcactttggggagattgtgctgcacagtgtgtaggaagcacattgggtgtattattcccagttttgtattttgtatttccttggagatgtgcaggggttaagagcgggggtctggccatagctggccacgtcagactctcatatggtaagtatcacagagcacatgaggcctgtgttatgcgctggaaagactcaggaaatgagaggctctcttgttctgacaaggcaggctgagagctctcatttagggtcatcactccagataactccaaatgcagtttattgctcaactgaagcagatgatcactttttgcctccaagttcttcaccctagctagctcctttcaaagagccgagtatgctggatcttaaagggccaaactagttacatctcatacatttcctgatgtttagggatgccttcacttccatcaaggataccttggctgtgcaaggacctctgatagctggagtctccttttggtcactcccagctttgcttaaacttgatggagtttgctgtccagtgatccccggatctttcatcatgaaagccttccttcctctcctgatgtctcaggcctctagacctagactggggttctggcaaggaggcctctatcaatagtatgacatccaataatatgttagtgttgatattttgcacagtaatattaagtttaagagattataaaaatgagttcaaatgaataagttcctgtgatgtaagagattagatatgtgtgatttcagaaccaaaggcaggggggaatcccagaaagaaaacaataatataatcctagtttctatatattatttttattcattactgtatatgggtagagatcaatattctttcttatgctgttactattaattaacacattttttaaccatgccattgaacttttgggtgcattaaagtggaacccaagctcctcattagataataatggcatttggactgagtgccatattcctaaatttccaataaagtggttgatatagagaggacaggataaagccctatagtgtgcagttatatcaaaacagctagtctccactttagggaatgcctttactagagattacatgaaatgtctgcttataaaataagcagagatggcaccactaagcagccacctgaattgttttcctacaggaatgattacttttcagatccatttatgttttcatgctcaatacttactccccttccctgcaacacccaaagagtttacttttgcaagtcatttggtcttcagtctactactgaggaatagagaggcactaactgctttacccaggatcagaactcatgttcttaccttctattaatagagtacttgagccagatggactaactggtctcacattttctctatcttggttttacttccataaacatcaatatctttacccacatgatttttccatcctcccatttttttccatatgtattagggttcaggaactatgatgctaatgatcacatttcttcctagttcctaatttcattagtgccatttcctgatatctacagaaacaattatcaatacatgtagctgcttgagccttatttagaaggctagcctttcttttccaagtgctgtcagaatgtatacatttagtctgtctttttcccttttaggagtctttgttctgggttgatggcaaaattcctctttttacatgtgagatttttgatttcactgaattctacctagatttttatggacattggattttaaagaggaaaacactcattttcttagtaagatattggtgatacatagctatgccattgatttccatactcctgagctttggggagggagacagtggccaagtagcaggcagaataagatcatcactcatgtcctgaatcaatcacactttccttctcggattgtgtatatgctctgccacttcctacatattacatcctgagtttttaagtaaagtggatcttagccagatttgagtctaatggctgattcatcggcatagttcttggcgttaacatctcagtgtcctctttagttctctttgaggattcatgtcattgagggcctttgtgcctccacttgtctcagtatgaggaagaactttggtgtgagggcggagctatgtgaagggttgctgggttgggggattagttcatatggtccccatgccatctatttacttttggagagaggggactttgagtgggtgggtatggatagatgttcctcaaggaaaccctgctggctaatgggcactacatctgtgtattactgtgattctctctgtaagctccccatgtggccaaggacccccctcctaccagggcacttcctgccacctcattgcactggtctcaaccattcagcctgctgctgctgcaccatgttgggctgcggtaggatagggaaggggttctgttgattgctaaatgttgcctaactttatttccctctcccacatttcatgcaagggagcggacctaacacatgacttgcattctcttcctatgttcagaaactccagggcttgcccacgtgtatgtatgagtgaccaatggagcttggaattctttatctatatgatctgtccgaaaatgagatcttttgtactggaatttgtgatgtagttgatcattcagagccaaacgcatataccaataaagacaagactgtcatata

SEQ ID NO: 159146 - DNA, 5560 bp, Homo sapiens
  Payload ID: 11146
  Gene Symbol: NTRK2
  Gene Name: neurotrophic tyrosine kinase, receptor, type 2
  Uniprot ID: Q16620
  ENST ID: ENST00000376213
  CDS Start-End: 939-3407
aagacggattctcagacaaggcttgcaaatgccccgcagccatcatttaactgcacccgcagaatagttacggtttgtcacccgaccctcccggatcgcctaatttgtccctagtgagaccccgaggctctgcccgcgcctggcttcttcgtagctggatgcatatcgtgctccgggcagcgcgggcgcagggcacgcgttcgcgcacaccctagcacacatgaacacgcgcaagagctgaaccaagcacggtttccatttcaaaaagggagacagcctctaccgcgattgtagaagagactgtggtgtgaattagggaccgggaggcgtcgaacggaggaacggttcatcttagagactaattttctggagtttctgcccctgctctgcgtcagccctcacgtcacttcgccagcagtagcagaggcggcggcggcggctcccggaattgggttggagcaggagcctcgctggctgcttcgctcgcgctctacgcgctcagtccccggcggtagcaggagcctggacccaggcgccgccggcgggcgtgaggcgccggagcccggcctcgaggtgcataccggacccccattcgcatctaacaaggaatctgcgccccagagagtcccgggagcgccgccggtcggtgcccggcgcgccgggccatgcagcgacggccgccgcggagctccgagcagcggtagcgcccccctgtaaagcggttcgctatgccggggccactgtgaaccctgccgcctgccggaacactcttcgctccggaccagctcagcctctgataagctggactcggcacgcccgcaacaagcaccgaggagttaagagagccgcaagcgcagggaaggcctccccgcacgggtgggggaaagcggccggtgcagcgcggggacaggcactcgggctggcactggctgctagggatgtcgtcctggataaggtggcatggacccgccatggcgcggctctggggcttctgctggctggttgtgggcttctggagggccgctttcgcctgtcccacgtcctgcaaatgcagtgcctctcggatctggtgcagcgacccttctcctggcatcgtggcatttccgagattggagcctaacagtgtagatcctgagaacatcaccgaaattttcatcgcaaaccagaaaaggttagaaatcatcaacgaagatgatgttgaagcttatgtgggactgagaaatctgacaattgtggattctggattaaaatttgtggctcataaagcatttctgaaaaacagcaacctgcagcacatcaattttacccgaaacaaactgacgagtttgtctaggaaacatttccgtcaccttgacttgtctgaactgatcctggtgggcaatccatttacatgctcctgtgacattatgtggatcaagactctccaagaggctaaatccagtccagacactcaggatttgtactgcctgaatgaaagcagcaagaatattcccctggcaaacctgcagatacccaattgtggtttgccatctgcaaatctggccgcacctaacctcactgtggaggaaggaaagtctatcacattatcctgtagtgtggcaggtgatccggttcctaatatgtattgggatgttggtaacctggtttccaaacatatgaatgaaacaagccacacacagggctccttaaggataactaacatttcatccgatgacagtgggaagcagatctcttgtgtggcggaaaatcttgtaggagaagatcaagattctgtcaacctcactgtgcattttgcaccaactatcacatttctcgaatctccaacctcagaccaccactggtgcattccattcactgtgaaaggcaaccccaaaccagcgcttcagtggttctataacggggcaatattgaatgagtccaaatacatctgtactaaaatacatgttaccaatcacacggagtaccacggctgcctccagctggataatcccactcacatgaacaatggggactacactctaatagccaagaatgagtatgggaaggatgagaaacagatttctgctcacttcatgggctggcctggaattgacgatggtgcaaacccaaattatcctgatgtaatttatgaagattatggaactgcagcgaatgacatcggggacaccacgaacagaagtaatgaaatcccttccacagacgtcactgataaaaccggtcgggaacatctctcggtctatgctgtggtggtgattgcgtctgtggtgggattttgccttttggtaatgctgtttctgcttaagttggcaagacactccaagtttggcatgaaaggcccagcctccgttatcagcaatgatgatgactctgccagcccactccatcacatctccaatgggagtaacactccatcttcttcggaaggtggcccagatgctgtcattattggaatgaccaagatccctgtcattgaaaatccccagtactttggcatcaccaacagtcagctcaagccagacacatttgttcagcacatcaagcgacataacattgttctgaaaagggagctaggcgaaggagcctttggaaaagtgttcctagctgaatgctataacctctgtcctgagcaggacaagatcttggtggcagtgaagaccctgaaggatgccagtgacaatgcacgcaaggacttccaccgtgaggccgagctcctgaccaacctccagcatgagcacatcgtcaagttctatggcgtctgcgtggagggcgaccccctcatcatggtctttgagtacatgaagcatggggacctcaacaagttcctcagggcacacggccctgatgccgtgctgatggctgagggcaacccgcccacggaactgacgcagtcgcagatgctgcatatagcccagcagatcgccgcgggcatggtctacctggcgtcccagcacttcgtgcaccgcgatttggccaccaggaactgcctggtcggggagaacttgctggtgaaaatcggggactttgggatgtcccgggacgtgtacagcactgactactacagggtcggtggccacacaatgctgcccattcgctggatgcctccagagagcatcatgtacaggaaattcacgacggaaagcgacgtctggagcctgggggtcgtgttgtgggagattttcacctatggcaaacagccctggtaccagctgtcaaacaatgaggtgatagagtgtatcactcagggccgagtcctgcagcgaccccgcacgtgcccccaggaggtgtatgagctgatgctggggtgctggcagcgagagccccacatgaggaagaacatcaagggcatccataccctccttcagaacttggccaaggcatctccggtctacctggacattctaggctagggcccttttccccagaccgatccttcccaacgtactcctcagacgggctgagaggatgaacatcttttaactgccgctggaggccaccaagctgctctccttcactctgacagtattaacatcaaagactccgagaagctctcgagggaagcagtgtgtacttcttcatccatagacacagtattgacttctttttggcattatctctttctctctttccatctcccttggttgttcctttttctttttttaaattttctttttcttttttttttcgtcttccctgcttcacgattcttaccctttcttttgaatcaatctggcttctgcattactattaactctgcatagacaaaggccttaacaaacgtaatttgttatatcagcagacactccagtttgcccaccacaactaacaatgccttgttgtattcctgcctttgatgtggatgaaaaaaagggaaaacaaatatttcacttaaactttgtcacttctgctgtacagatatcgagagtttctatggattcacttctatttatttattattattactgttcttattgtttttggatggcttaagcctgtgtataaaaaagaaaacttgtgttcaatctgtgaagcctttatctatgggagattaaaaccagagagaaagaagatttattatgaaccgcaatatgggaggaacaaagacaaccactgggatcagctggtgtcagtccctacttaggaaatactcagcaactgttagctgggaagaatgtattcggcaccttcccctgaggacctttctgaggagtaaaaagactactggcctctgtgccatggatgattcttttcccatcaccagaaatgatagcgtgcagtagagagcaaagatggcttccgtgagacacaagatggcgcatagtgtgctcggacacagttttgtcttcgtaggttgtgatgatagcactggtttgtttctcaagcgctatccacagaacctttgtcaacttcagttgaaaagaggtggattcatgtccagagctcatttcggggtcaggtgggaaagccaagaacttggaaaagataagacaagctataaattcggaggcaagtttcttttacaatgaacttttcagatctcacttccctccgacccctaacttccatgcccacccgtccttttaactgtgcaagcaaaattgtgcatggtcttcgtcgattaataccttgtgtgcagacactactgctccagacgtcgtttccctgataggtagagcagatccataaaaaggtatgacttatacaattaggggaagctaatggagtttattagctgagtatcaatgtctctgcgttgtacggtggtgatgggttttaatgaatatggaccctgaagcctggaaatcctcatccacgtcgaacccacaggactgtgggaagggcagaatcaatccctaagggaaaggaaacctcaccctgagggcatcacatgcactcatgttcagtgtacacaggtcaagtcccttgctctgggctctagttgggagagtggtttcattccaagtgtactccattgtcagtatgctgtttttgtttccttcactccattcaaaaagtcaaaatacaaaatttggcacagcatgccaacgggaggctgtgcccagaccaagcactggaagtgtgcttctaggcatagtcattggttttgcaaaaagagggctcaaatttaaatagaaatttacagctatttgaatggtcagatataccaagaaagaaaaatatttctgttcctcaagaaaacttgctaccctctgtgaggggaattttgctaaacttgacatctttataacatgagccagattgaaagggagtgattttcattcatcttaggtcatgttatttcatatttgtttctgaaggtgcgatagctctgttttaggttttgcttgcgcctgttaattactggaacaccttatttttcattaaaggctttgaaagccaattctcaaaaattcaaaagtgcaaattaacagaacaaaaggaaatccagtagcaactgcagtcaagcgagggagttgacaagataaaccttacgtccattcaagttatatgctggcctatgagagatgagagttgggtcgtttgttctctttgttgatgattt

SEQ ID NO: 159147 - DNA, 5608 bp, Homo sapiens
  Payload ID: 11146
  Gene Symbol: NTRK2
  Gene Name: neurotrophic tyrosine kinase, receptor, type 2
  Uniprot ID: Q16620
  ENST ID: ENST00000376214
  CDS Start-End: 939-3455
aagacggattctcagacaaggcttgcaaatgccccgcagccatcatttaactgcacccgcagaatagttacggtttgtcacccgaccctcccggatcgcctaatttgtccctagtgagaccccgaggctctgcccgcgcctggcttcttcgtagctggatgcatatcgtgctccgggcagcgcgggcgcagggcacgcgttcgcgcacaccctagcacacatgaacacgcgcaagagctgaaccaagcacggtttccatttcaaaaagggagacagcctctaccgcgattgtagaagagactgtggtgtgaattagggaccgggaggcgtcgaacggaggaacggttcatcttagagactaattttctggagtttctgcccctgctctgcgtcagccctcacgtcacttcgccagcagtagcagaggcggcggcggcggctcccggaattgggttggagcaggagcctcgctggctgcttcgctcgcgctctacgcgctcagtccccggcggtagcaggagcctggacccaggcgccgccggcgggcgtgaggcgccggagcccggcctcgaggtgcataccggacccccattcgcatctaacaaggaatctgcgccccagagagtcccgggagcgccgccggtcggtgcccggcgcgccgggccatgcagcgacggccgccgcggagctccgagcagcggtagcgcccccctgtaaagcggttcgctatgccggggccactgtgaaccctgccgcctgccggaacactcttcgctccggaccagctcagcctctgataagctggactcggcacgcccgcaacaagcaccgaggagttaagagagccgcaagcgcagggaaggcctccccgcacgggtgggggaaagcggccggtgcagcgcggggacaggcactcgggctggcactggctgctagggatgtcgtcctggataaggtggcatggacccgccatggcgcggctctggggcttctgctggctggttgtgggcttctggagggccgctttcgcctgtcccacgtcctgcaaatgcagtgcctctcggatctggtgcagcgacccttctcctggcatcgtggcatttccgagattggagcctaacagtgtagatcctgagaacatcaccgaaattttcatcgcaaaccagaaaaggttagaaatcatcaacgaagatgatgttgaagcttatgtgggactgagaaatctgacaattgtggattctggattaaaatttgtggctcataaagcatttctgaaaaacagcaacctgcagcacatcaattttacccgaaacaaactgacgagtttgtctaggaaacatttccgtcaccttgacttgtctgaactgatcctggtgggcaatccatttacatgctcctgtgacattatgtggatcaagactctccaagaggctaaatccagtccagacactcaggatttgtactgcctgaatgaaagcagcaagaatattcccctggcaaacctgcagatacccaattgtggtttgccatctgcaaatctggccgcacctaacctcactgtggaggaaggaaagtctatcacattatcctgtagtgtggcaggtgatccggttcctaatatgtattgggatgttggtaacctggtttccaaacatatgaatgaaacaagccacacacagggctccttaaggataactaacatttcatccgatgacagtgggaagcagatctcttgtgtggcggaaaatcttgtaggagaagatcaagattctgtcaacctcactgtgcattttgcaccaactatcacatttctcgaatctccaacctcagaccaccactggtgcattccattcactgtgaaaggcaaccccaaaccagcgcttcagtggttctataacggggcaatattgaatgagtccaaatacatctgtactaaaatacatgttaccaatcacacggagtaccacggctgcctccagctggataatcccactcacatgaacaatggggactacactctaatagccaagaatgagtatgggaaggatgagaaacagatttctgctcacttcatgggctggcctggaattgacgatggtgcaaacccaaattatcctgatgtaatttatgaagattatggaactgcagcgaatgacatcggggacaccacgaacagaagtaatgaaatcccttccacagacgtcactgataaaaccggtcgggaacatctctcggtctatgctgtggtggtgattgcgtctgtggtgggattttgccttttggtaatgctgtttctgcttaagttggcaagacactccaagtttggcatgaaagatttctcatggtttggatttgggaaagtaaaatcaagacaaggtgttggcccagcctccgttatcagcaatgatgatgactctgccagcccactccatcacatctccaatgggagtaacactccatcttcttcggaaggtggcccagatgctgtcattattggaatgaccaagatccctgtcattgaaaatccccagtactttggcatcaccaacagtcagctcaagccagacacatttgttcagcacatcaagcgacataacattgttctgaaaagggagctaggcgaaggagcctttggaaaagtgttcctagctgaatgctataacctctgtcctgagcaggacaagatcttggtggcagtgaagaccctgaaggatgccagtgacaatgcacgcaaggacttccaccgtgaggccgagctcctgaccaacctccagcatgagcacatcgtcaagttctatggcgtctgcgtggagggcgaccccctcatcatggtctttgagtacatgaagcatggggacctcaacaagttcctcagggcacacggccctgatgccgtgctgatggctgagggcaacccgcccacggaactgacgcagtcgcagatgctgcatatagcccagcagatcgccgcgggcatggtctacctggcgtcccagcacttcgtgcaccgcgatttggccaccaggaactgcctggtcggggagaacttgctggtgaaaatcggggactttgggatgtcccgggacgtgtacagcactgactactacagggtcggtggccacacaatgctgcccattcgctggatgcctccagagagcatcatgtacaggaaattcacgacggaaagcgacgtctggagcctgggggtcgtgttgtgggagattttcacctatggcaaacagccctggtaccagctgtcaaacaatgaggtgatagagtgtatcactcagggccgagtcctgcagcgaccccgcacgtgcccccaggaggtgtatgagctgatgctggggtgctggcagcgagagccccacatgaggaagaacatcaagggcatccataccctccttcagaacttggccaaggcatctccggtctacctggacattctaggctagggcccttttccccagaccgatccttcccaacgtactcctcagacgggctgagaggatgaacatcttttaactgccgctggaggccaccaagctgctctccttcactctgacagtattaacatcaaagactccgagaagctctcgagggaagcagtgtgtacttcttcatccatagacacagtattgacttctttttggcattatctctttctctctttccatctcccttggttgttcctttttctttttttaaattttctttttcttttttttttcgtcttccctgcttcacgattcttaccctttcttttgaatcaatctggcttctgcattactattaactctgcatagacaaaggccttaacaaacgtaatttgttatatcagcagacactccagtttgcccaccacaactaacaatgccttgttgtattcctgcctttgatgtggatgaaaaaaagggaaaacaaatatttcacttaaactttgtcacttctgctgtacagatatcgagagtttctatggattcacttctatttatttattattattactgttcttattgtttttggatggcttaagcctgtgtataaaaaagaaaacttgtgttcaatctgtgaagcctttatctatgggagattaaaaccagagagaaagaagatttattatgaaccgcaatatgggaggaacaaagacaaccactgggatcagctggtgtcagtccctacttaggaaatactcagcaactgttagctgggaagaatgtattcggcaccttcccctgaggacctttctgaggagtaaaaagactactggcctctgtgccatggatgattcttttcccatcaccagaaatgatagcgtgcagtagagagcaaagatggcttccgtgagacacaagatggcgcatagtgtgctcggacacagttttgtcttcgtaggttgtgatgatagcactggtttgtttctcaagcgctatccacagaacctttgtcaacttcagttgaaaagaggtggattcatgtccagagctcatttcggggtcaggtgggaaagccaagaacttggaaaagataagacaagctataaattcggaggcaagtttcttttacaatgaacttttcagatctcacttccctccgacccctaacttccatgcccacccgtccttttaactgtgcaagcaaaattgtgcatggtcttcgtcgattaataccttgtgtgcagacactactgctccagacgtcgtttccctgataggtagagcagatccataaaaaggtatgacttatacaattaggggaagctaatggagtttattagctgagtatcaatgtctctgcgttgtacggtggtgatgggttttaatgaatatggaccctgaagcctggaaatcctcatccacgtcgaacccacaggactgtgggaagggcagaatcaatccctaagggaaaggaaacctcaccctgagggcatcacatgcactcatgttcagtgtacacaggtcaagtcccttgctctgggctctagttgggagagtggtttcattccaagtgtactccattgtcagtatgctgtttttgtttccttcactccattcaaaaagtcaaaatacaaaatttggcacagcatgccaacgggaggctgtgcccagaccaagcactggaagtgtgcttctaggcatagtcattggttttgcaaaaagagggctcaaatttaaatagaaatttacagctatttgaatggtcagatataccaagaaagaaaaatatttctgttcctcaagaaaacttgctaccctctgtgaggggaattttgctaaacttgacatctttataacatgagccagattgaaagggagtgattttcattcatcttaggtcatgttatttcatatttgtttctgaaggtgcgatagctctgttttaggttttgcttgcgcctgttaattactggaacaccttatttttcattaaaggctttgaaagccaattctcaaaaattcaaaagtgcaaattaacagaacaaaaggaaatccagtagcaactgcagtcaagcgagggagttgacaagataaaccttacgtccattcaagttatatgctggcctatgagagatgagagttgggtcgtttgttctctttgttgatgattt

SEQ ID NO: 159148 - DNA, 7111 bp, Homo sapiens
  Payload ID: 11146
  Gene Symbol: NTRK2
  Gene Name: neurotrophic tyrosine kinase, receptor, type 2
  Uniprot ID: Q16620
  ENST ID: ENST00000395882
  CDS Start-End: 551-1984
gcgtcagccctcacgtcacttcgccagcagtagcagaggcggcggcggcggctcccggaattgggttggagcaggagcctcgctggctgcttcgctcgcgctctacgcgctcagtccccggcggtagcaggagcctggacccaggcgccgccggcgggcgtgaggcgccggagcccggcctcgaggtgcataccggacccccattcgcatctaacaaggaatctgcgccccagagagtcccgggagcgccgccggtcggtgcccggcgcgccgggccatgcagcgacggccgccgcggagctccgagcagcggtagcgcccccctgtaaagcggttcgctatgccggggccactgtgaaccctgccgcctgccggaacactcttcgctccggaccagctcagcctctgataagctggactcggcacgcccgcaacaagcaccgaggagttaagagagccgcaagcgcagggaaggcctccccgcacgggtgggggaaagcggccggtgcagcgcggggacaggcactcgggctggcactggctgctagggatgtcgtcctggataaggtggcatggacccgccatggcgcggctctggggcttctgctggctggttgtgggcttctggagggccgctttcgcctgtcccacgtcctgcaaatgcagtgcctctcggatctggtgcagcgacccttctcctggcatcgtggcatttccgagattggagcctaacagtgtagatcctgagaacatcaccgaaattttcatcgcaaaccagaaaaggttagaaatcatcaacgaagatgatgttgaagcttatgtgggactgagaaatctgacaattgtggattctggattaaaatttgtggctcataaagcatttctgaaaaacagcaacctgcagcacatcaattttacccgaaacaaactgacgagtttgtctaggaaacatttccgtcaccttgacttgtctgaactgatcctggtgggcaatccatttacatgctcctgtgacattatgtggatcaagactctccaagaggctaaatccagtccagacactcaggatttgtactgcctgaatgaaagcagcaagaatattcccctggcaaacctgcagatacccaattgtggtttgccatctgcaaatctggccgcacctaacctcactgtggaggaaggaaagtctatcacattatcctgtagtgtggcaggtgatccggttcctaatatgtattgggatgttggtaacctggtttccaaacatatgaatgaaacaagccacacacagggctccttaaggataactaacatttcatccgatgacagtgggaagcagatctcttgtgtggcggaaaatcttgtaggagaagatcaagattctgtcaacctcactgtgcattttgcaccaactatcacatttctcgaatctccaacctcagaccaccactggtgcattccattcactgtgaaaggcaaccccaaaccagcgcttcagtggttctataacggggcaatattgaatgagtccaaatacatctgtactaaaatacatgttaccaatcacacggagtaccacggctgcctccagctggataatcccactcacatgaacaatggggactacactctaatagccaagaatgagtatgggaaggatgagaaacagatttctgctcacttcatgggctggcctggaattgacgatggtgcaaacccaaattatcctgatgtaatttatgaagattatggaactgcagcgaatgacatcggggacaccacgaacagaagtaatgaaatcccttccacagacgtcactgataaaaccggtcgggaacatctctcggtctatgctgtggtggtgattgcgtctgtggtgggattttgccttttggtaatgctgtttctgcttaagttggcaagacactccaagtttggcatgaaaggttttgttttgtttcataagatcccactggatgggtagctgaaataaaggaaaagacagagaaaggggctgtggtgcttgttggttgatgctgccatgtaagctggactcctgggactgctgttggcttatcccgggaagtgctgcttatctggggttttctggtagatgtgggcggtgtttggaggctgtactatatgaagcctgcatatactgtgagctgtgattggggaacaccaatgcagaggtaactctcaggcagctaagcagcacctcaagaaaacatgttaaattaatgcttctcttcttacagtagttcaaatacaaaactgaaatgaaatcccattggattgtacttctcttctgaaaagtgtgctttttgaccctactggacatttattgacttaattgcttctgtttattaaaattgacctgcaaagttaaaaaaaaattaaagttgagaacaggtataagtgcacactgaatagtctaatctacatgtaacacatattttagtgtgattttctatactctaatcagcactgaattcagagggtttgactttttcatctataacacagtgactaaaagagttaagggtatatataccatcactttgggacttggtagtattattaaaaggttatttccttcactgtcaataaaagtccaaatgtttagcttaggtctgagagtcaaacaatgttaaggattgtcttaaagttccttagccagcaaaacaaaacaaaacaaaacaaacaaatgaaaaacgtttaaaaagaagaagaagaaaaaaaacaagaacaagcagcaacagctgttttgttggggctatagatttaagttaggcatagtcaatttcagaataactaagagtggaatatatgcatatggtgaaattataaccttgcccttttttatttgccctctgcgatccacctgctttttagaagtctgccgagtgagaaggccacagtatctcatgctgtttgcattacagaactgcagcttttctactctgaaaaggcctgggagcagaatggctggcctgctgtgagcaggagaggagattctaagaaggatagtcccccctacaacatactgtcatactgctgggttttcatgggtaggaaagcttgtcctgaccccagcagcaaagaggtggcaggtcgctaatgaatatatgctttataatgtccttcttcattgctgagagggcagccttagagctgtggatttctgcatcccccctgagtctgacccatggacacctgtttcattcactttagcatcacagtgacctttgtatgctctgttcagtctgtgtcaggcagtatgcttgtcctgaagagaggtttggctatccccaccccaccccaccccaccctgttccttttttatcaggaggacttcagagccaggcctgcagcattttgtttgaaaacacaatcagctctgacagttagacatgcacacagacgccatagctggattggaaacattgatgttttaaaaatttattttttttggaaatagttgcacaaatgctgcaatttagctttaaggttctatagatttttaactagtccaacacagtcagaaacattgttttgaatcctctgtaaaccaaggcattaatcttaataaaccaggatccatttaggtaccacttgatataaaaaggatatccataatgaatattttatactgcatcctttacattagccactaaatacgttattgcttgatgaagacctttcacagaatcctatggattgcagcatttcacttggctacttcatacccatgccttaaagaggggcagtttctcaaaagcagaaacatgccgccagttctcaagttttcctcctaactccatttgaatgtaagggcagctggcccccaatgtggggaggtccgaacattttctgaattcccattttcttgttcgcggctaaatgacagtttctgtcattacttagattccgatctttcccaaaggtgttgatttacaaagaggccagctaatagcagaaatcatgaccctgaaagagagatgaaattcaagctgtgagccaggcaggagctcagtatggcaaaggttcttgagaatcagccatttggtacaaaaaagatttttaaagcttttatgttataccatggagccatagaaaggctatggattgtttaagaactattttaaagtgttccagacccaaaaaggaaaaataaaaaaaaaggaatatttgtacccaacagctagaaggattgcaaggtagatttttgttttaaaatggagagaagtggacagataaggccatttaatatatcaaagatcagttgacatctcctagggaatgatgaaaacagcaggctattagaaaattatttcatatagttctcgtgttcttttcttttttttaatccctgaagggatgatcagtaacatagcttctcttttctgtactctagaccaccccttttcatcattttgctttttatgtctcccataagaaatgtgctttttagagcttcctaatgcatgtgttgcattattgcagcattagaaaaggagaggtagcatttttgctgaaatcgggcctgtcactctccaataaaggttctggcacttcaatgccaggcaggtctcctaaatgaacagaatgatctgtgtgagccgatgcctgcccttccagaggggccactgtccccagccgcagccaactgtgtcccacaggaatgggagcctaggtttccaaatcttgtgattctttaggagaaacatgaaacctggatttcgtgtgaaatgtcccgattgttaaaaagttggctcaattatttttaaaacattttgtaagccaacaaaagtctgtgggctgccagtttattacttttgtcttaaaacatgatcattgttctctcacggtatccttctgtcttcccgttgcaaattcacttttctttcttcctgacattgccattgagggctttgttaccacaagctaagaaactgagtttaacagcccagttatctgcaacatgtcaattacctttgctcctctcctgtgattcccaccatgctgtgaccctcagctgtctccctttgctgggaattctgcaccaatgtctcccctcaacccattccctggttggtcctactcccgtgtggccagagacatcctagcaaatccttcctcctattatatctgacactaatttcttttcaacagcgctcatgtctcttggcccagtcaggtgctgccaggtttagataggaaagtacatgtcccattttcatgggtgcccttaatgtggtccacgtcctatatcttattatatttactcatggctcaatgggggcctccagagaccctctcaggctgctgagctagactaaggaatgcatccaccgtcatcacatgagacactgactctgtgacgacaaaagtacaaacagtctgaggctaagaaaggttcatctcacaacaggaaaaacaaatctcaacacacattagagataattgattcaggggttttctctcccagtctcccagcagggactgatttcatttctgacccactaggttttctttccagaaataggtagcaaggacaagaactaaacaatcccagccccacccagcaacacagaacacaggagtttgcttttggcttctcactctccaagtaaccctgaattaggcccagaatggctgaggcttggagcatctcctcagacagagcagaggcgacacctcttcaggggtgtgtggagtaaatagctcgaagagctgaagacagaaaaccagtttcacgccaggtgcgagagagagcataatggagggaagcccgctttctctctcctcttcttttctctttatttctttagagcacttgacttttttttctctctctctctagtattctaaactgaccccatgaccaactgagaatttatttttgtttcattggttgtttcacagaattagaacacacacgactttttattcctccattgcaaaatggaatcaagatactacacaagacctgtgctttcttcctttgcatgatttacacctccgcctgttttggtgctagctgtctagaacttctctcttggtttgaatctgattccttcacactacactagaagtttatttcatcttgttttgtctagactccagatacagagggacagctggactgaggacaagcaattccatctagcatagggtctctcagggttggtgcatccagccacatgggcagggccagtcacatctagtctatgtccccagagcccttggagttgcgcagcttagctgacttgactccaaggaaattagtacagaagtaaccactctattaagtgtgttctgctatgttcacatgcctgtagtacctgcaaaccatgccaggttcatctaaagacataggggaagattaaggactcttttggacagaccatgaattgaatttgctgccaggtgctgccagactgaatttggctgacagaactcccagcccaggaaagttccatgacaatgactgtcgcagaaggaaatttcccactaaagtcagtccattttcaagttttggtcttcagagacaaaagaacgtcccagccacctgattttgatggtgaggtaactctaagttgaattcaggctagtgttgcagtatagctttggcatgttcatgagtgagcacccagaatgtgttgaaccaacccccacccctaactactgactatgactgcagtgggtttttatggggaaaaaaagtgtgaaaagcaaaaagaaaggaacagagattttttatcacctttattgtaagacagtccatttatgaattgagtataaacacatacaaagtaacaagagattcctaagaaacgcaaatccttgagtttcacgcacttcatgttcaaccatttgctgtaatccagaggcagcctgtgaatcattctcatgccctgttttttttttttttttcctataatgttctgggtttaaaagccatcttttccacattttctgtaaataatggataatcattttaaaaatttttatttttagtgctgttttaacaatgtagatagatcataaatgtacttgctgaattcaatcatttttaacaagccaataaagtttgataattcatctc

SEQ ID NO: 159149 - DNA, 3826 bp, Homo sapiens
  Payload ID: 11147
  Gene Symbol: NTRK3
  Gene Name: neurotrophic tyrosine kinase, receptor, type 3
  Uniprot ID: Q16288
  ENST ID: ENST00000317501
  CDS Start-End: 7-1845
tcggagatggatgtctctctttgcccagccaagtgtagtttctggcggattttcttgctgggaagcgtctggctggactatgtgggctccgtgctggcttgccctgcaaattgtgtctgcagcaagactgagatcaattgccggcggccggacgatgggaacctcttccccctcctggaagggcaggattcagggaacagcaatgggaacgccagtatcaacatcacggacatctcaaggaatatcacttccatacacatagagaactggcgcagtcttcacacgctcaacgccgtggacatggagctctacaccggacttcaaaagctgaccatcaagaactcaggacttcggagcattcagcccagagcctttgccaagaacccccatttgcgttatataaacctgtcaagtaaccggctcaccacactctcgtggcagctcttccagacgctgagtcttcgggaattgcagttggagcagaactttttcaactgcagctgtgacatccgctggatgcagctctggcaggagcagggggaggccaagctcaacagccagaacctctactgcatcaacgctgatggctcccagcttcctctcttccgcatgaacatcagtcagtgtgaccttcctgagatcagcgtgagccacgtcaacctgaccgtacgagagggtgacaacgctgttatcacttgcaatggctctggatcaccccttcctgatgtggactggatagtcactgggctgcagtccatcaacactcaccagaccaatctgaactggaccaatgttcatgccatcaacttgacgctggtgaatgtgacgagtgaggacaatggcttcaccctgacgtgcattgcagagaacgtggtgggcatgagcaatgccagtgttgccctcactgtctactatcccccacgtgtggtgagcctggaggagcctgagctgcgcctggagcactgcatcgagtttgtggtgcgtggcaaccccccaccaacgctgcactggctgcacaatgggcagcctctgcgggagtccaagatcatccatgtggaatactaccaagagggagagatttccgagggctgcctgctcttcaacaagcccacccactacaacaatggcaactataccctcattgccaaaaacccactgggcacagccaaccagaccatcaatggccacttcctcaaggagccctttccagagagcacggataactttatcttgtttgacgaagtgagtcccacacctcctatcactgtgacccacaaaccagaagaagacacttttggggtatccatagcagttggacttgctgcttttgcctgtgtcctgttggtggttctcttcgtcatgatcaacaaatatggtcgacggtccaaatttggaatgaagggtcccgtggctgtcatcagtggtgaggaggactcagccagcccactgcaccacatcaaccacggcatcaccacgccctcgtcactggatgccgggcccgacactgtggtcattggcatgactcgcatccctgtcattgagaacccccagtacttccgtcagggacacaactgccacaagccggacacgtgggtcttttcaaacatagacaatcatgggatattaaacttgaaggacaatagagatcatctagtcccatcaactcactatatatatgaggaacctgaggtccagagtggggaagtgtcttacccaaggtcacatggtttcagagaaattatgttgaatccaataagccttcccggacattccaagcctcttaaccatggcatctatgttgaggatgtcaatgtttatttcagcaaaggacgtcatggcttttaaaaactccttttaagcctccttgttttgatgtcaccttggtaggctgggccctctgagaggttggaagctctaggcattgttctctttggatccagggatgctaagtagaaactgcatgagccaccagtgccccggcaccctttaacaccaccagatgggtgttttcccccatccaccactggcagggttgccccttccctccaatcatcactgtgctccttttttcccggcctacgaggcagctcctgccactatctttagagccaataaagagaattaaaaacctgtgcaccaggagcatcttttaaatacactagccattctcttgctttacaaaaacaacctaaccatcacaagaaagcctgatgaagtccagccgtgctccagcctcactttccctgcttggaagcgtggggtctccctggctctcccaggataccatgctgtcctcttagtgacctcgtcgccctgcaacctccagtggggaagagtcacagagagcacctaagcagaggtggagacggcgcggtaagaggagggggagccaggctcaagtattggcaccaagttaggtctcagaggaaagaatggaaaccaatcactttacatttttatttttattttcggtggaaaaatcatccttttttgggacatacttgccccctacttcctcttctctctggaacggctcacaatgagtgtgacattagaaaactccttgcagaggagagtttctccaggctcttcctgggcccttagatctgcagttccgacaagctttggctgcaggaggttttacccatgaactggccatcctactaggaccacaagggaccaagggaatcagggacaaaggcccttcctgccagcccatgatcccgggattggctctcttcccctacttccacttattcttgactctgagaacttttggaacccaatggaatcagcatttcaaggtcaagatgaactgaaggggaagagaagtaaaacttggcctcctccagcccctctcatggcaccaatggaagtgtcctcctgttctctggtcaatatgtgtgtttactttgcttgctttgactcatgccttactccatggccaccctctcccaaagagggggctcgcttcccccattttcaacttgatccactgaggagagggaagggggtgactttcccttcttcagtaggaaaggcacatttgtagggcctgaaactctcccgtatttgctgactcattggtggagtagacttctggctcccagctccactggcccatggggcctccattgtatgaagtcagcataggctgcccacctaatggtggagagcatgaaactgggagcatcctgtggggggcttgtgggggaaaaaggtggttgttttaacccaccgttgttttggggtggtgttgcacactagtagagaatagagtctatgcctttggcaaatttaactgggagtttggattcccacttaagggttttacttcttgggtcctgtggatggtggttcttcgtgtcaggatcccagcccgattctgcaaatgcctccatggggtttaaaaacatgaggctttccaagttcttgcccagtatctggggcagcctccagagtatcacctgggagttcaggttctctccagggctccaggtgtgtgtttatctcgccccctccagctctcctcatcctgctccccattgctccatgtcaggctgttccccattgtgccctgctgatgctttgggtccagggcctcctcccaagtgtggctttaaggagtaagcttgaggatgatgttttttaattattgtaaatcattacctcatttccagcctcccaggctccatccatcccagcatcttttattctgccattttcctcaccttgtgctatgacaatggggcgttgtgtttccacagagacttataggagtgttcagtgtatagtttcttaataaacactttattttctaatgaaa

SEQ ID NO: 159150 - DNA, 2938 bp, Homo sapiens
  Payload ID: 11147
  Gene Symbol: NTRK3
  Gene Name: neurotrophic tyrosine kinase, receptor, type 3
  Uniprot ID: Q16288
  ENST ID: ENST00000355254
  CDS Start-End: 307-2760
acatttctgcagccgcgcggcgagccattcgcggcggctgctgcagctcctactgcatcttccttctcttcctttcctcgggctccggtctcggagtcggagagcgcgcctcgcttccagagcccccggacccggcgagtcagcgatcgccgagccggccaccatgcccggcagaccgcgccactaggcgctcctcgcggctcccacccggcggcggcggcggcggcggcggcgtccgcgatggtttcagacgctgaaggattttgcatctgatcgctcggcgtttcaaagaagcagcgatcggagatggatgtctctctttgcccagccaagtgtagtttctggcggattttcttgctgggaagcgtctggctggactatgtgggctccgtgctggcttgccctgcaaattgtgtctgcagcaagactgagatcaattgccggcggccggacgatgggaacctcttccccctcctggaagggcaggattcagggaacagcaatgggaacgccagtatcaacatcacggacatctcaaggaatatcacttccatacacatagagaactggcgcagtcttcacacgctcaacgccgtggacatggagctctacaccggacttcaaaagctgaccatcaagaactcaggacttcggagcattcagcccagagcctttgccaagaacccccatttgcgttatataaacctgtcaagtaaccggctcaccacactctcgtggcagctcttccagacgctgagtcttcgggaattgcagttggagcagaactttttcaactgcagctgtgacatccgctggatgcagctctggcaggagcagggggaggccaagctcaacagccagaacctctactgcatcaacgctgatggctcccagcttcctctcttccgcatgaacatcagtcagtgtgaccttcctgagatcagcgtgagccacgtcaacctgaccgtacgagagggtgacaacgctgttatcacttgcaatggctctggatcaccccttcctgatgtggactggatagtcactgggctgcagtccatcaacactcaccagaccaatctgaactggaccaatgttcatgccatcaacttgacgctggtgaatgtgacgagtgaggacaatggcttcaccctgacgtgcattgcagagaacgtggtgggcatgagcaatgccagtgttgccctcactgtctactatcccccacgtgtggtgagcctggaggagcctgagctgcgcctggagcactgcatcgagtttgtggtgcgtggcaaccccccaccaacgctgcactggctgcacaatgggcagcctctgcgggagtccaagatcatccatgtggaatactaccaagagggagagatttccgagggctgcctgctcttcaacaagcccacccactacaacaatggcaactataccctcattgccaaaaacccactgggcacagccaaccagaccatcaatggccacttcctcaaggagccctttccagttgacgaagtgagtcccacacctcctatcactgtgacccacaaaccagaagaagacacttttggggtatccatagcagttggacttgctgcttttgcctgtgtcctgttggtggttctcttcgtcatgatcaacaaatatggtcgacggtccaaatttggaatgaagggtcccgtggctgtcatcagtggtgaggaggactcagccagcccactgcaccacatcaaccacggcatcaccacgccctcgtcactggatgccgggcccgacactgtggtcattggcatgactcgcatccctgtcattgagaacccccagtacttccgtcagggacacaactgccacaagccggacacgtatgtgcagcacattaagaggagagacatcgtgctgaagcgagaactgggtgagggagcctttggaaaggtcttcctggccgagtgctacaacctcagcccgaccaaggacaagatgcttgtggctgtgaaggccctgaaggatcccaccctggctgcccggaaggatttccagagggaggccgagctgctcaccaacctgcagcatgagcacattgtcaagttctatggagtgtgcggcgatggggaccccctcatcatggtctttgaatacatgaagcatggagacctgaataagttcctcagggcccatgggccagatgcaatgatccttgtggatggacagccacgccaggccaagggtgagctggggctctcccaaatgctccacattgccagtcagatcgcctcgggtatggtgtacctggcctcccagcactttgtgcaccgagacctggccaccaggaactgcctggttggagcgaatctgctagtgaagattggggacttcggcatgtccagagatgtctacagcacggattattacagggtgggaggacacaccatgctccccattcgctggatgcctcctgaaagcatcatgtaccggaagttcactacagagagtgatgtatggagcttcggggtgatcctctgggagatcttcacctatggaaagcagccatggttccaactctcaaacacggaggtcattgagtgcattacccaaggtcgtgttttggagcggccccgagtctgccccaaagaggtgtacgatgtcatgctggggtgctggcagagggaaccacagcagcggttgaacatcaaggagatctacaaaatcctccatgctttggggaaggccaccccaatctacctggacattcttggctagtggtggctggtggtcatgaattcatactctgttgcctcctctctccctgcctcacatctcccttccacctcacaactccttccatccttgactgaagcgaacatcttcatataaactcaagtgcctgctacacatacaacactgaaaaaaggaaaaaaaaagaaagaaaaaaaaaccc

SEQ ID NO: 159151 - DNA, 2980 bp, Homo sapiens
  Payload ID: 11147
  Gene Symbol: NTRK3
  Gene Name: neurotrophic tyrosine kinase, receptor, type 3
  Uniprot ID: Q16288
  ENST ID: ENST00000357724
  CDS Start-End: 307-2802
acatttctgcagccgcgcggcgagccattcgcggcggctgctgcagctcctactgcatcttccttctcttcctttcctcgggctccggtctcggagtcggagagcgcgcctcgcttccagagcccccggacccggcgagtcagcgatcgccgagccggccaccatgcccggcagaccgcgccactaggcgctcctcgcggctcccacccggcggcggcggcggcggcggcggcgtccgcgatggtttcagacgctgaaggattttgcatctgatcgctcggcgtttcaaagaagcagcgatcggagatggatgtctctctttgcccagccaagtgtagtttctggcggattttcttgctgggaagcgtctggctggactatgtgggctccgtgctggcttgccctgcaaattgtgtctgcagcaagactgagatcaattgccggcggccggacgatgggaacctcttccccctcctggaagggcaggattcagggaacagcaatgggaacgccagtatcaacatcacggacatctcaaggaatatcacttccatacacatagagaactggcgcagtcttcacacgctcaacgccgtggacatggagctctacaccggacttcaaaagctgaccatcaagaactcaggacttcggagcattcagcccagagcctttgccaagaacccccatttgcgttatataaacctgtcaagtaaccggctcaccacactctcgtggcagctcttccagacgctgagtcttcgggaattgcagttggagcagaactttttcaactgcagctgtgacatccgctggatgcagctctggcaggagcagggggaggccaagctcaacagccagaacctctactgcatcaacgctgatggctcccagcttcctctcttccgcatgaacatcagtcagtgtgaccttcctgagatcagcgtgagccacgtcaacctgaccgtacgagagggtgacaacgctgttatcacttgcaatggctctggatcaccccttcctgatgtggactggatagtcactgggctgcagtccatcaacactcaccagaccaatctgaactggaccaatgttcatgccatcaacttgacgctggtgaatgtgacgagtgaggacaatggcttcaccctgacgtgcattgcagagaacgtggtgggcatgagcaatgccagtgttgccctcactgtctactatcccccacgtgtggtgagcctggaggagcctgagctgcgcctggagcactgcatcgagtttgtggtgcgtggcaaccccccaccaacgctgcactggctgcacaatgggcagcctctgcgggagtccaagatcatccatgtggaatactaccaagagggagagatttccgagggctgcctgctcttcaacaagcccacccactacaacaatggcaactataccctcattgccaaaaacccactgggcacagccaaccagaccatcaatggccacttcctcaaggagccctttccagttgacgaagtgagtcccacacctcctatcactgtgacccacaaaccagaagaagacacttttggggtatccatagcagttggacttgctgcttttgcctgtgtcctgttggtggttctcttcgtcatgatcaacaaatatggtcgacggtccaaatttggaatgaagggtcccgtggctgtcatcagtggtgaggaggactcagccagcccactgcaccacatcaaccacggcatcaccacgccctcgtcactggatgccgggcccgacactgtggtcattggcatgactcgcatccctgtcattgagaacccccagtacttccgtcagggacacaactgccacaagccggacacgtatgtgcagcacattaagaggagagacatcgtgctgaagcgagaactgggtgagggagcctttggaaaggtcttcctggccgagtgctacaacctcagcccgaccaaggacaagatgcttgtggctgtgaaggccctgaaggatcccaccctggctgcccggaaggatttccagagggaggccgagctgctcaccaacctgcagcatgagcacattgtcaagttctatggagtgtgcggcgatggggaccccctcatcatggtctttgaatacatgaagcatggagacctgaataagttcctcagggcccatgggccagatgcaatgatccttgtggatggacagccacgccaggccaagggtgagctggggctctcccaaatgctccacattgccagtcagatcgcctcgggtatggtgtacctggcctcccagcactttgtgcaccgagacctggccaccaggaactgcctggttggagcgaatctgctagtgaagattggggacttcggcatgtccagagatgtctacagcacggattattacaggctctttaatccatctggaaatgatttttgtatatggtgtgaggtgggaggacacaccatgctccccattcgctggatgcctcctgaaagcatcatgtaccggaagttcactacagagagtgatgtatggagcttcggggtgatcctctgggagatcttcacctatggaaagcagccatggttccaactctcaaacacggaggtcattgagtgcattacccaaggtcgtgttttggagcggccccgagtctgccccaaagaggtgtacgatgtcatgctggggtgctggcagagggaaccacagcagcggttgaacatcaaggagatctacaaaatcctccatgctttggggaaggccaccccaatctacctggacattcttggctagtggtggctggtggtcatgaattcatactctgttgcctcctctctccctgcctcacatctcccttccacctcacaactccttccatccttgactgaagcgaacatcttcatataaactcaagtgcctgctacacatacaacactgaaaaaaggaaaaaaaaagaaagaaaaaaaaaccc

SEQ ID NO: 159152 - DNA, 3004 bp, Homo sapiens
  Payload ID: 11147
  Gene Symbol: NTRK3
  Gene Name: neurotrophic tyrosine kinase, receptor, type 3
  Uniprot ID: Q16288
  ENST ID: ENST00000360948
  CDS Start-End: 307-2826
acatttctgcagccgcgcggcgagccattcgcggcggctgctgcagctcctactgcatcttccttctcttcctttcctcgggctccggtctcggagtcggagagcgcgcctcgcttccagagcccccggacccggcgagtcagcgatcgccgagccggccaccatgcccggcagaccgcgccactaggcgctcctcgcggctcccacccggcggcggcggcggcggcggcggcgtccgcgatggtttcagacgctgaaggattttgcatctgatcgctcggcgtttcaaagaagcagcgatcggagatggatgtctctctttgcccagccaagtgtagtttctggcggattttcttgctgggaagcgtctggctggactatgtgggctccgtgctggcttgccctgcaaattgtgtctgcagcaagactgagatcaattgccggcggccggacgatgggaacctcttccccctcctggaagggcaggattcagggaacagcaatgggaacgccagtatcaacatcacggacatctcaaggaatatcacttccatacacatagagaactggcgcagtcttcacacgctcaacgccgtggacatggagctctacaccggacttcaaaagctgaccatcaagaactcaggacttcggagcattcagcccagagcctttgccaagaacccccatttgcgttatataaacctgtcaagtaaccggctcaccacactctcgtggcagctcttccagacgctgagtcttcgggaattgcagttggagcagaactttttcaactgcagctgtgacatccgctggatgcagctctggcaggagcagggggaggccaagctcaacagccagaacctctactgcatcaacgctgatggctcccagcttcctctcttccgcatgaacatcagtcagtgtgaccttcctgagatcagcgtgagccacgtcaacctgaccgtacgagagggtgacaacgctgttatcacttgcaatggctctggatcaccccttcctgatgtggactggatagtcactgggctgcagtccatcaacactcaccagaccaatctgaactggaccaatgttcatgccatcaacttgacgctggtgaatgtgacgagtgaggacaatggcttcaccctgacgtgcattgcagagaacgtggtgggcatgagcaatgccagtgttgccctcactgtctactatcccccacgtgtggtgagcctggaggagcctgagctgcgcctggagcactgcatcgagtttgtggtgcgtggcaaccccccaccaacgctgcactggctgcacaatgggcagcctctgcgggagtccaagatcatccatgtggaatactaccaagagggagagatttccgagggctgcctgctcttcaacaagcccacccactacaacaatggcaactataccctcattgccaaaaacccactgggcacagccaaccagaccatcaatggccacttcctcaaggagccctttccagagagcacggataactttatcttgtttgacgaagtgagtcccacacctcctatcactgtgacccacaaaccagaagaagacacttttggggtatccatagcagttggacttgctgcttttgcctgtgtcctgttggtggttctcttcgtcatgatcaacaaatatggtcgacggtccaaatttggaatgaagggtcccgtggctgtcatcagtggtgaggaggactcagccagcccactgcaccacatcaaccacggcatcaccacgccctcgtcactggatgccgggcccgacactgtggtcattggcatgactcgcatccctgtcattgagaacccccagtacttccgtcagggacacaactgccacaagccggacacgtatgtgcagcacattaagaggagagacatcgtgctgaagcgagaactgggtgagggagcctttggaaaggtcttcctggccgagtgctacaacctcagcccgaccaaggacaagatgcttgtggctgtgaaggccctgaaggatcccaccctggctgcccggaaggatttccagagggaggccgagctgctcaccaacctgcagcatgagcacattgtcaagttctatggagtgtgcggcgatggggaccccctcatcatggtctttgaatacatgaagcatggagacctgaataagttcctcagggcccatgggccagatgcaatgatccttgtggatggacagccacgccaggccaagggtgagctggggctctcccaaatgctccacattgccagtcagatcgcctcgggtatggtgtacctggcctcccagcactttgtgcaccgagacctggccaccaggaactgcctggttggagcgaatctgctagtgaagattggggacttcggcatgtccagagatgtctacagcacggattattacaggctctttaatccatctggaaatgatttttgtatatggtgtgaggtgggaggacacaccatgctccccattcgctggatgcctcctgaaagcatcatgtaccggaagttcactacagagagtgatgtatggagcttcggggtgatcctctgggagatcttcacctatggaaagcagccatggttccaactctcaaacacggaggtcattgagtgcattacccaaggtcgtgttttggagcggccccgagtctgccccaaagaggtgtacgatgtcatgctggggtgctggcagagggaaccacagcagcggttgaacatcaaggagatctacaaaatcctccatgctttggggaaggccaccccaatctacctggacattcttggctagtggtggctggtggtcatgaattcatactctgttgcctcctctctccctgcctcacatctcccttccacctcacaactccttccatccttgactgaagcgaacatcttcatataaactcaagtgcctgctacacatacaacactgaaaaaaggaaaaaaaaagaaagaaaaaaaaaccc

SEQ ID NO: 159153 - DNA, 19984 bp, Homo sapiens
  Payload ID: 11147
  Gene Symbol: NTRK3
  Gene Name: neurotrophic tyrosine kinase, receptor, type 3
  Uniprot ID: Q16288
  ENST ID: ENST00000394480
  CDS Start-End: 323-2800
ggctcggagcacttgtacatttctgcagccgcgcggcgagccattcgcggcggctgctgcagctcctactgcatcttccttctcttcctttcctcgggctccggtctcggagtcggagagcgcgcctcgcttccagagcccccggacccggcgagtcagcgatcgccgagccggccaccatgcccggcagaccgcgccactaggcgctcctcgcggctcccacccggcggcggcggcggcggcggcggcgtccgcgatggtttcagacgctgaaggattttgcatctgatcgctcggcgtttcaaagaagcagcgatcggagatggatgtctctctttgcccagccaagtgtagtttctggcggattttcttgctgggaagcgtctggctggactatgtgggctccgtgctggcttgccctgcaaattgtgtctgcagcaagactgagatcaattgccggcggccggacgatgggaacctcttccccctcctggaagggcaggattcagggaacagcaatgggaacgccagtatcaacatcacggacatctcaaggaatatcacttccatacacatagagaactggcgcagtcttcacacgctcaacgccgtggacatggagctctacaccggacttcaaaagctgaccatcaagaactcaggacttcggagcattcagcccagagcctttgccaagaacccccatttgcgttatataaacctgtcaagtaaccggctcaccacactctcgtggcagctcttccagacgctgagtcttcgggaattgcagttggagcagaactttttcaactgcagctgtgacatccgctggatgcagctctggcaggagcagggggaggccaagctcaacagccagaacctctactgcatcaacgctgatggctcccagcttcctctcttccgcatgaacatcagtcagtgtgaccttcctgagatcagcgtgagccacgtcaacctgaccgtacgagagggtgacaacgctgttatcacttgcaatggctctggatcaccccttcctgatgtggactggatagtcactgggctgcagtccatcaacactcaccagaccaatctgaactggaccaatgttcatgccatcaacttgacgctggtgaatgtgacgagtgaggacaatggcttcaccctgacgtgcattgcagagaacgtggtgggcatgagcaatgccagtgttgccctcactgtctactatcccccacgtgtggtgagcctggaggagcctgagctgcgcctggagcactgcatcgagtttgtggtgcgtggcaaccccccaccaacgctgcactggctgcacaatgggcagcctctgcgggagtccaagatcatccatgtggaatactaccaagagggagagatttccgagggctgcctgctcttcaacaagcccacccactacaacaatggcaactataccctcattgccaaaaacccactgggcacagccaaccagaccatcaatggccacttcctcaaggagccctttccagagagcacggataactttatcttgtttgacgaagtgagtcccacacctcctatcactgtgacccacaaaccagaagaagacacttttggggtatccatagcagttggacttgctgcttttgcctgtgtcctgttggtggttctcttcgtcatgatcaacaaatatggtcgacggtccaaatttggaatgaagggtcccgtggctgtcatcagtggtgaggaggactcagccagcccactgcaccacatcaaccacggcatcaccacgccctcgtcactggatgccgggcccgacactgtggtcattggcatgactcgcatccctgtcattgagaacccccagtacttccgtcagggacacaactgccacaagccggacacgtatgtgcagcacattaagaggagagacatcgtgctgaagcgagaactgggtgagggagcctttggaaaggtcttcctggccgagtgctacaacctcagcccgaccaaggacaagatgcttgtggctgtgaaggccctgaaggatcccaccctggctgcccggaaggatttccagagggaggccgagctgctcaccaacctgcagcatgagcacattgtcaagttctatggagtgtgcggcgatggggaccccctcatcatggtctttgaatacatgaagcatggagacctgaataagttcctcagggcccatgggccagatgcaatgatccttgtggatggacagccacgccaggccaagggtgagctggggctctcccaaatgctccacattgccagtcagatcgcctcgggtatggtgtacctggcctcccagcactttgtgcaccgagacctggccaccaggaactgcctggttggagcgaatctgctagtgaagattggggacttcggcatgtccagagatgtctacagcacggattattacagggtgggaggacacaccatgctccccattcgctggatgcctcctgaaagcatcatgtaccggaagttcactacagagagtgatgtatggagcttcggggtgatcctctgggagatcttcacctatggaaagcagccatggttccaactctcaaacacggaggtcattgagtgcattacccaaggtcgtgttttggagcggccccgagtctgccccaaagaggtgtacgatgtcatgctggggtgctggcagagggaaccacagcagcggttgaacatcaaggagatctacaaaatcctccatgctttggggaaggccaccccaatctacctggacattcttggctagtggtggctggtggtcatgaattcatactctgttgcctcctctctccctgcctcacatctcccttccacctcacaactccttccatccttgactgaagcgaacatcttcatataaactcaagtgcctgctacacatacaacactgaaaaaaggaaaaaaaaagaaagaaaaaaaaaccctgtaaggcagtttggcaaatatatatatatatatatatatttatatatctaactatctatcaatctatatctacagagagttaccttctctagtacacagagaagctgctgatacagaaaaccacaagactttaacaactcagaaactctaaaatattaataatacaaaggaaaattccctttgacttaagctgtggcccatgcttctaatgctacggctctttggagcagaagacctggaccatgcagagagacaatctttgggatgagagctctgggacgggaggagttaaggtggtgctcagtcgctgctgtgtgtgtctgttaccccggaagctcaccacaggcacatgtggggactgcatggctgtgctcagcaaagaaatgatgcctgagcagggtccttgcctccacttcttccccatttcctccacttcaggacaatgttctaatttgtccattctaaaaagtgtaatcttgatgcttttgggaatcaatgatggcacctacgggtaaacacagaacagacaaccccacaacacaaaaccatgacaagagctgacagcatccatcctgggtgtaagcttcttgctggagttgcaaaggatgtgtctttctattctcagaacttaaagaactggactttctggagtaaaagaaccacagaagaaaaaatagctgaaacctgaaccctgccaagacactgccacctgtcttttccatcattgcaaagattccttggcctcacctcccactttcaggcccctgggaagcttagggggttaggaaacaggtccccatgttatctttgaatgtagacacagcacgctttagggttgcaatagcaagagacttggttgcttgtaggtcattataacgaatgccccctggtcctctcagtttctcatcctgcttccctagatcctagaccccacttcctgggtctctactgagtcccaggtaaaccccactgccaaggaagggagccaggtctagtgagaggctgcagcagtgagtgtttcaggaaagcaagcagtggagtgggtgagagccagcaggggagaatctacttggcacctgtgccaggccccttggcattctcctcacgtttccagcccctgggaggattgatgcatctgcctttgagctgttgtgaaaacgcaggggctgagaaatcacttttgtgggctggggtagggggaagggctgaggcttctctgggagatgtccaatgagcggccagtgctgcaggcttggaatcttaatgaggcctgagccctgaccggagagagggaaggaaacatctgtgctggggcctgctccctctgccccagcactggggaatcactgccttcctggctgctgccacataccacagtggggccgacctctgggcctccctgtcacatgaaacatggaagccaacagcctggccccacagatctcctctgctggagaggagaggatgtgttcctcccaggccacggggcccctctgccttgccccaagcacagagctacctaagggactgacctttgccacactggagctcacctcccgggggcctctggcctacccttttccctgccagctgaagagactgccggcagcctggacgtcctggttagctgaaggcagctgaaatgtgggcctccctatgtggggtttagtactgaattatgtgtttgtggttttgcttctttttgtagacccacaaatatttttatttgaatagtaaagagctgtgctcagattgtagccatggttgggatttgggatcaacgaggctggttagctggactgggaggggaggcaggtgagatgggaatttggtgttggttttctcactgtgctgtgctcctagcccctgaggactttgcaggaaagctgtttggattgaccacctcaaggaactcctttgctgtcctatgacaattactcctcttgtctttccacctagaggaccgttatgccggggctgtgagttctggctgaagctgcacaatctggctttgatctgggtagctaagaacaggtgttcagggagggcatggtctggaggcgcctgagggaaaagtatcttctggttagaagtgaagcaccaatgctcctgttgcttcccttctcccatatcctctcctgaacaaacactgtgtggcttctgtcttcttggctgtgtgtttcaaaactgatagtcactgatgggctgggaagaagcaggagaagaactgggttggagatgggtggaaaactgggaataaggaccatgctatggttttatcttcagggcactgattcatcatggcctaatgaaagaaggtgattccttgggggaacaagaagcactgaaggagaccgcagttgtcagattgctgccaccttaggcccacgggctttcacgctgatcttggggtcatgttcttactgtgtccattgtaagcagctggctgtggaagagtgccagagagagaggggcagagcagggaagggtagcgagggaagatatattactttgatatattagccttggcagattaaaaaaaaaagatttattttggagagtaaaggaggcagaaaatagggccatggaaattgcagggtacactatggctctggggagtgtggcatgtactgggacacacctgtccctcctatattgggacaggactgataaggcttagtacactgtatcttaatttccccatctgcagaataaggggtacacctgctaatctctggccccttctagctctgagttcttagattctgacaacgttgtgtcactgtgccatttttctcaataccattctggaatggcaggacagccttgcataggtggggggcagttgccgctgaaggctcactgggcctgggcaaggctgagttccaataagacactcctctccttctttgccccttgtctcaacatttcggagtctgaagtgtctgagacgactgtaagccaggaggggagcatttggtcggcttcccatcctggcattcctacataccagaaaagcactgtcgacggtccatttatttatttatttatgaagagcctaatgtgatgaaatgtgttgtgaaatgacatcctattagccaatatggccactccagttcatttcaccctcattttcccataccaaagtccaccttttagaagaccatgtcacatcgcctctgagagcttagctttgaagtgagctcttttgtgtcttttgatgaacgctccagggcacccaggctggtctctctgccatgccaacctcaccggatcctctcctggactgagtgagagtgacctgctgttgggtgtccaccttggagtagggtgttgtggccatgggacctcccaattcttctttctttggatgtgaacctaactctgccctctaatgatatccctgaactctgaggggaccttgggcatcactgaacctcctctagtcaagagacaagaaaaaggaggtgctgcttcctccattcagcagatcatgcacaaattactcctagacagaggcttcccacttgaggcaaaggatctttggtccttctgggttcaggttgaacattaatgttcttctctagtgatgcctactttgcggaatacactagtgcaagtcattttggtgctaaatactgcagaaaccaacaccaacgggagagctgtcagccagcttctggggctgcacgagactcaactcagaagtagaagtgagtcagccatgccgggagagtacagggtgcattggaagttaagtagaaaagtggcagggtgaaaagaccagcaaaatttctgattttgctattagttatccacgtggccttggccaaatcagcttatttctcatttgagacgtttaagaggtttgtatagatatttttagagtccttttcatttttttaaagctaggttctggtcccacctgatatatatgtacttgcttgttaaaaataagagatgaagtgaaagataaggaaggagacgaagaaaagttaccaatggcaaaggattgattatagaagacaatgaaagaaggcctggtgactggtagatttgaggaatattgtacagggagccaggcagacaagccagagacttcatttttatgctcttcacaggaggtcactggcctagccacttgcctgcgtttcaccaggctgttcccctcagctagtcaaccttccctgttcaaaaccaacatgctaacacttggcagaaactattccaagatatggagagaggcctgcccatctctcatgcaggccactggaaatcaactctgggtcaaaaccgacaagatttttatcttttaatgcttattgtaagaggccgggatgtttgaaagagggcagcgtcttaagttgcagactattcaccaaagtccttttctattcaggaatgactaatgactttctttgttccccttttccaaaccaaacagcagcagtattaccttgactccaaagtacagtgattgcaatggacagtcttgagattaagggtctttttagtgctttgctcggaatctggagcaaggaaatgtctagggatgtttgttgaatgaacccacctgccagcagtccagagagctgtcccaaaggcccctgagatgtctattgtctgctttggtagggagccaacctgctagaagactcaagggcatttgccttagagagaaaaaaaaatggcacatttagttccgggcttgggtgctgaagtcactgtgtttttggctcctgaagctccactttcttttttcataccaaataaattgttttggccaatatttaaggatttaaatatttaaggttttgaaggaaaattccaagtttatgcatcattattaagacatcaatatgggcttgggaaaatgttttggtgttgcttaataatactgggagtgtcttctaaagaaagtatacatatatgtacgttgtgtgtttatttctatatattggattggaatggcttcaaagaaggcctgtttgaagtcagcaaattgatttcaatttgggattctcttttagccttaccgttcttggggataagaaatctggagatgaactggcctcagaaacattcaggaagattacgatgggaaatctgtcatcttgtaaagttggatcatttggtgctctctgaactaaattatgctgactaacattctgagcatctgaaaatcattcttcctggttgcctgatagatgaccacacaggagtcatttctatcacatcttatttgggggttggtatagacgccaccagcactgcagggaaaaccaccccctaggaggggtgagacagagagaatgtgagattttgatcattgattgctctttctgaaaggcactgctgaccatagtaggtgtggtgaatgtttgtgtcactgcattgggtattagaacttttgctctgagcatgggctgccctaccctgaagagctgaatcttggcttctgacagaagctctgcatgactcattctcctcaagcatattttccttattttcctatgaaagtatctatagtttgcaacaagaactgtctttggttcaagtgtcagtgtactagaatagatgcttttctgtgagacctgtggaggttggattggggtggggggtgttccttcaaagtacttggaattctttatcaaagaaataaaactcagattctcttctttctagtttacttctaagttccaaatttaaaacaagacccagtttgacatttgcagtaggagataatgtcttgaaccagtgagcttggctatctttctttcatcatagggaggcagggcagtaagttgtattaatttttcctaatcacccaggcaaatattgctttttgttcagtgtcgtgacccacattcatagcttgcaggggatacttctagctgacaaagctggaagtttctaatagaagatgtatcaagataacagaggtgaggaaaggcctgttgaacatctacttctgagaatcattgaggcactcaggtcttgcttttcagtttagtatcttacaaaaggagttggtttcttctcattttagcaatgataaatttagacatcttttttgaaaggccaaaggtagattgagagctcaaatacttacggtgtactctgacagtcttttattctatttttcaagacttattttatatatacatattttttatttccataggttattggggaacaggtagtgtttggttacatgagtaagttctttggtggtgatttgtgagattttggcacacccatcacccaggcagtatgcaccatatttgtagtcttttatccctcactcccttcccacactttccccctgagtccgcagagtccattgtgtcattcttataccttgacatcctcacagcttagctcccacatatcagtgagaacgtacgatgtttggttttctattcctgaattgcttcacttagaatagtggtctccaatctcacccaggccgcttcgaatgccattaattcattcctttttatggatgagtagtattccatcatacatatatatgtttgtgtgtgtgtgtgtgtgtgtgtgtgtgtgtgtgtgtaccacagtttctttatctgctcattgattgatgggcatttgggttgattccactttttgcaattgcaaattgtgctgctataaacatatgtgtgcaagtatctctatctcttatgtataatgacttcttttcctctgggcagatacccagtaatagggctgcgggattactgacattcttttacatgcaacatccctaaaacccaacaagacgtgtaaacactgaagtccaagtctgataattattctttcatttaagaagaacacatgggagtttcacatattatttttaaaaactaattttgtaatatgttaaatggtaggacacattcaattttttttcctcattggagatctgtccatgttctgtctcaatttaatagctacctggcatgtaactgatgcctctgagcctacctctggagtgaataaataaacgtggtccaggtgatttgatttctgccatttgtagtggagaagtaaatctcagtgaagaagattttttttcatatttcttcttttttctttttcttttggcttctatcctcctgcttccatgggactgacaatccagcttctcaaactccacgaaagtcttaatacaaggtgaatcccagagccacaaacagtttggacttcaaacagtgagaaaattggaccgaatgattcggcacacaaagcagaaaactttcatttcctgtaggcaggatggaattgactgttatattaagacttctgaagaagccctgccctggagtaatttcagtgctgtcagacgatgttgacatctagattaacctctgtgcagtgaattttactgcaaagctcattgagatgcatgtgatgtgtctccacaaatcccatctggaacccgtggtggcccaccctcagcaaccctcctctccccactgactctgctttctctgtccataaacttttagcctccaggagcagaggagccgtggctgagatctgaccctaggagagggagtttgggccttctctgaccatgatgctgagccaggctttctgcttagagtgacagagattgtcattgtattgggtttcccctgagggaactgcaaattaaggcatgaaaaacactctgctgatgacagtttcacagcatatcttaatgctgcacaaagtgaaatggtttaaaaggaattagtgtgtcctaagtcattgagccctgctctgggctctgcaatcctctagggattcaagatcccattgcaacaaggtcatgactgcgtctaggccggacagacggattctgaaggacaaggtgtttgtcttttgtgcaggtctttcctatggtccttacaagagaggcagccacagctcctgtttctcccaactgggacaaaagatgtagctgttttctaagcactggtttgtcatctctttaaggagtggttggctccagaatgagccagactcactctataattccacattgtggcacaacagccacatagaacctcaaagctgaaattgcaacttttctgcaaaatagggccattgattacatccaaagttttgagaaaaggccttcaggttagattcagtcaccttcagactccacagagttgctcagcatggttgcaggcgtctttggaaacttacctcagggttttagaatacgttaccctgaagtctggataacaattttctctgagattttactgattctaattccctttgaaattgtttttcctacttgcctcttgtctttcatttaaataataagaatctccttgcatattcttaggtatttctttaggagaattggaagtttccagccaaggacactgtgtttatgaattggaaagatatctttctgggctgaaaaaggtaaaaatcatacggaggcaatcttgatgactttatttaaaagcaattatcagcattgtgttttattctaggtgctcgtgctcatagtgcaaactacattcacgtttttaattatttatgttatgatacttattcgtgtgtacatatatgcgcacacacacacacaaaagcctccacaatcctactggtatacaaatccatatgccccatttgtgtcgcttccgttgatctttgtgtgcatgcatttgcaatgaagtgtgcatcacatgtgtgatttcttaaagtcatctatagctcatctttcctcttattatcgacacataccctttgactttctgcactttggagctcatgaaattaaggctttttcaagggagactacatcttgagtttctttaaaccttcatatttaaagataggactggttttcttcgagaaacaaaaacttgattcagattttatttaattaattaattttctgggggaaatggtactgaatttgttcctgagtaacaaatagtagtaagtgcaaatataaatgtgaagtagtttaagcaggttattgaacctatcttgtggctgaaacaagtagtcagatatgaagctcagacactcaaattgaattagaacgtgaaccaaaacggttagcatggggcaggagaagagcactgggctaggagcaagcctgctagattgtcacttgagtgtccttagcttaatgtgggcatctgacaactagttgcagtcctgtgcccctctaattccagagatggggcaagccaatctgtttctcatccattgctcaagttggttatcactgaaatattatataccatctcaagatcctgccctgaacaagtttgcaaacatcccccccacactgaggagtcagtcccatttttgttttatggcagtttatctcttgtgaccctcctttggaagctgtccaaactctgaacacttgctgtccattccctgctccccaccccaccctttaaggccagggaaaagccagggaaagccctattggctcatctccctctttcctagcctgcacatcaaccaagcttgggatttagcctaggttttcagagaggaaaacaagtgcgttctcccagccatcagtatctttccagccccctggaccaagtgattagtgcctcattagcgcctcatcagttgcttttgcacaagagactctgggacaacaagcctattataatgcctcagtctgtctttttgaagtcaaaccatccttctggcttggttaggaaaggggagcctttctccaaacacgttttcttttaatttcctctgttgttttctggctgttaactatatggataaatggtaaaacataattttcattttttctaggcccctatgagagtggatatgctatatttctatagatgaggagttccacatgtcagcaaagcatttatttatttagtgaagtgactataatattgacacacagatttgcagcagcatccaaatcttgagggggaaaaaaaagcctttttcaatcaaatgaaaccttttctgtgatggcaccagagaggtttatatcttaagcacagaactgaacctgataatatgcttcctttctagaaacaaagagatagaagaaattgctgaaggagctggaagaccaaaccatctattccccaaatcattatgtatcaatagatacttcaactctgttccttaaatggctctgaaaaacacaaataaccatatttactattaaaaacaaattcataatgtctaacccaatcccttattttaatatatatacatattaaaataatcccatgtatatatgattattattatatgggatatatatagtttacatatatataggggtgtgtgtgtatatatatatatatatttacatatatatgtaaatgtatactttttaatgctggggatagttccatattgtttcttttcttgattccttctaatatattcaatgagatttataatttttttcacttttatttctttaggaaagagttggggtctattatgaatgctttctaggataaaatggcaaaacagatggaaagtgtggtagagggaggataatgggaataggaggcagagaacttgcacatttctatttcctgctgagagatcttggaaaaacattgtctgccctttacctcagtttcttaacatacaaaatagaactactatcaaccccctgcatgccacagagggttatttgagccctaaatgagatcataactgttaacatactctgtgaactgtacagggccagacaaatagagcccactctctgggcagttgcatacagtcttgctgggtgctgagctgagtgactgagagccgcttttgagacacattttgaggcatatcttccctaaatttttgctggtgtctgttttttagaagttttgccattagcattttttgctttgagtatctagtgatggagaatgctctaaaaaatacaaggagacagggggattctttatctatttggcttagtcactggaaagggacaattagagtttgttttcaggcttggaactctgacattttgtagcaaaatggcatcttctgctgcatttaattccttgccatcaactcttgctttcataaggttctgtcaatttcaacataatgctttgtaaaaataggactctgtgaaactttctctataaatttggtggtataactaatttttcagggagcatctgaagggataatgatttttaagtggtaccctgttcatgccaggaccagcatttgtacatgggaaaataatcttaagatgagtgaagagcaaatgctagaccacacctttaataggcccaagtgccaacaaaaatacgtgtgagtgggattcccacggagaaatgtttctgaatgaaaatgaaacccttgataatgaatcctgaggccagaatgccaaagtcacagtattctgtcatttacagcccctaaaaaatcccaggtgtttgtgatgacaagccactattataagtactctgtattagtgactacttggcaagtaaaattttctcaaatgttatttttcatagatctccaagcaacaatcacttgcagtgtatctgacaaaatgctatacatgattttctaaaagtattttgatcactccagaaagaaatcagaataaagctgcataccccaaatcctagaaaattcacaaatattttgctcaagttcaggctctctcagcttctcttttctctttaacttttgcctcatacagaggcaatcttgatgacaaaagattgggctcaatttttgtttttcttgtgtagaaaagcaacacctctgtttcggactactgttcagtagacaaaaagcatcccagctttcgaaatgagagtccaaattgggttaccactgagattttaaattatgatgtgaaattggagaaggtgaactgtacagggccagacaaataatagagcccactctctgggcagttgcatgcagtcttgctgggtgctgagctgagagactgagagccgcttttgagacgtgttttgaggcatatcttccttaaatttttgctggtgtctgttttttagaagttttgccattagcatttttcactttgagtatctagccatggagaatgctctaaaaaatacaaggagacagggggatgctttatctatttggcttagtcactggttcagggtgaagtttcataatttattctgataatctggaggggatgacctccttcacagtactgttaaagccttccttgaacaagctcatttcactatataacttcctaaagacaaggctgattatttaaggatttcagagatatcatttggggaataactcaccaggtagagaaagtttgacctgatatgttaacaggcacaacaagaacttatttcaatgctttctcaccatctgccccttctctgagagtttagcctttcttaggatacttccttttccaggctagaaaagattgattgtattcatatcccaaagtaaaggctcctccaattctatcagatgtggaggcaacagaaaatgactcatgttatttttctctcacttcacagcatcaagaactcttcttgtttatgtgggggccatggtggattagcttgaggaactgtcaaattaaaatgaaaggaaagcaagttggggcaagaaaattctcactctgaatgtgaaagaaaatagcagtgttcttctctctggcaaagatttgtgtactgttgggggaagattcatgttatttctcaggtagactttactttttgagattctgtgtgtgtgtgtgtgtgtgtgtgtgtatgtgtgtgtgtgtgtgtgtattttgcctggtggggggttaaaggcagatagaatgtagttgtttatgagtttatactttctctttagcataatagatgccctgtttattttctcagaatgtgacaataaaattaggaaaggagaggaattcagaggcccatgttgcagttcatggcaaagttttacccaaatatttccttcagaaacatttagtcatagcaagccatataaattattgtctgcaactggtatcagaaaaagaaatcagtaggtggggactgtagaccccaatggtgcatctgtttacaatctttcttttccaaggttttaaggttcatgaataacatgagggaattttgggagagctaccacatcagtactttggcacgcattaactgttccacaggaaaactagggttgcttcagggctatttttgtttgaaatgacacacatacaaaaaaaaaaaaagacttttggaacatgttttgaggcctgtcacctgaaatcagcctttgctgaaagagtatttagtttgataagcgggatttcttgcttctcgcatcccagagtgtaaattctgcagcgaagcctgggtgtatgttttcagcaccagggacagcaaacaaccccctgaattgaaggggcccgctatcctgattgacctcccagactaggaagggcagttgttttgttttcctttatttcctatctaccggagcctcaacttggaagactttattcttaaggttcttacatctttcatttattaccaagcctagcttagctgtctctgtcacattcttgacctcctaacaaatgggtttggagtaacactcccagctctcctggctcagagaagtagaaagaaacacactagacttcatttgaagggcatgctttagagtaggctccccctacacaagtctttataacataccactgacttgtaaacccctaaatgaaggactgcttatacacaatcattttccttttaacatttctgcacatttctcacaatgtacaagtctatgtttgactcagtgtgcatctggaggcaatgtttcacagcagttgagcagaagctatgaagtttggggacagaaaaggtcccagtgatgctgctgttattcattttggagactcattgggggcacttctctgattctcagcatccacccttcaaccctgagtgctctttaacagctgtttttgccttaaacaatcacaataagaatgcaaatgactccttgtggcattcttcaggccagactgaagggtgtactgagaaaacaagggtagcagaagcacatgttgtcacattgctttgtgattggccagtttttatatagcacaatgacacacagatatcatcttagagtcatcattgtctactcttaactaattgtcagcatcttctccactcatgtcaggatgaatcctgtgttgggaaggcaagtcagtcactgcaggtttcatcataaatattgccttctatctgacagatgttagaaaacctccattttgaatgcctctgtaccatccaaggctctgaatttcccctatatcttatccctttctttccattccctttccatgttgcttatcataacatccataacatttagtggtgtaagaaaataaggggtttcttttaggaataaatgaggtggaaaaagtaggacagagccagatctcagaggagcaagttcagtggaacgatgatttctaacttgggagtgggtctaagatgtagccatccattccttccattccttgtcctcttgagtgaatctcattccagtgctcacacttgccctgcaaaaaaggccatggcacaagattctctagattatttgtatgaagactggaggtgagcagcatccaacacctctgttagagttctttagaatagaggagttttgtcttatattttaatccaggaaccttcccatatttaaaaagtttagaaataatatgtacagaaaggacctatggggataggaaagcttaataatacaagttattttcccttagaacagaggggaaggagctgcaaagtgactgctaatggaggaacgatctgctggctgggggaaatgtggcctgagactagagatgcagagcaggcatctctagaaggagagatgatgccaatagaagccccaggagggaactggccagcgaatacaattttataaagattctcagtactttttctgaaaaaattcctaaaattttcaagggcgcgtctagccctctgcctctttagaggtgagctcagtgctacttctgggttcttaaggcaaatgccctacaaacaccaaagtcttgtattttccactctcagccggcactggctaagtgggattttttttttcccttccctaagtgaaagggacttgttttcaggagaagtgtcctttaaacatccagctaaaactggaagtaattttttgcatgaatggctttttacagctaggtctacagcagaacaaaacttgtattaaactaagtgctactttacatatcttatttcaagggaaatgaaggatttattgtcgtgtaaatgatatacactgatttgtttcctactggacattacatgtccctttatctctaggctgatgttgtgcagcaaactttcaatatctggaaaatcagctggtacctacttcagtgcattattaggatattacgttccctgagaggaattttgccaatgaagtttaggtactgttgtaactgatttccatcccccctccctaagcttctgtactaagtatatgtaaagctattatatcttgtctgatcccatgtgttcatgtgtgtttcccaatgtttgcataaatatattggcaatctgaagggttagctggcttatggcaactgctgaacaatggtatgtttggcatgtgggacacctgatacctgggcacacctgttctgaggccaagctaattttacagattttggaaaagaaaaaacagcagcaacaacaacagtgtggcttgaattaaggaaagtttaacaatgaatacagtattgccaagtcatcatttatgggtggagacgttgaccacagcagttgaggtgctttcaactggatcttatgccctttattttaatcccaattgatagttcctcatttgtattttatgacttagaaatactcctacgtgatgctcgtttgtttttctcccaggcttctggaaagtgctgatcatgattgcttcctatcatttggatcccaaagttgataacttaacataagtgactgaggttttagtagaactgggttttactaatcgtatctcctccttgaggtgctgttcccttcattcctttcctttatgacaggtgaatgcattggctatgctgattttatttgcatcctggcgagtcttggagaatcaatctcgttaaaatgatgactgcatttgcctttggagaagaggtttattgtctaagtaaaactcttatgtgaaggtgtcatttatgtaaaaaaaaaaaaaaattctaacttgataagatggccacaggttagaggggtgtgttctcagttgatattaagggatatgttgaaaaggcaagtgcccaccctctattcttcatctcacccttcctttctccccaacctcaaaagaaaacaaaaaattatttttttaaattgtattagtaatttatgtttaatacaaaaggatgatttaatggtatcaccaaaggttgtttctcccattgtgcatgtccttcagtctcggccccatacccatcaccccattcttcaccctcatgcttccatcccaaggcaaacatgtgtcttcatcggaatctatgggtgttgaagttaaatgtgggggcagagatttaacaccatgacactaatacaaatcaaccattcttcactttcaaatggttaatcactacaggaaggcgaactcttttcttggtttttgtttaaaaacattttatacatatatatgtatatatgtgtgtgtatgtatggacataggtatgtatatgcacatgtacatgtatatatgtatatatccatcttcaatataaatatatcataagtgagagttgtaaatactccttggtcatatgtctgtctttctcatagtatcatatcttcaatgttatgttaacaactccatttattgattgatgaaatcgtgtgtagacctgtatcctcctgacatagtttatgtagggtctcttctcaaataaagtataaaacaacaa

SEQ ID NO: 159154 - DNA, 2287 bp, Homo sapiens
  Payload ID: 11147
  Gene Symbol: NTRK3
  Gene Name: neurotrophic tyrosine kinase, receptor, type 3
  ENST ID: ENST00000542733
  CDS Start-End: 161-2014
attaagctgtccacattcataaggcacactccaggtctgcaggagggagcatgagggattcaggggacgcccttgtcccctgtacacacctaggggccggttcgactacagtagacacatagagaactggcgcagtcttcacacgctcaacgccgtggacatggagctctacaccggacttcaaaagctgaccatcaagaactcaggacttcggagcattcagcccagagcctttgccaagaacccccatttgcgttatataaacctgtcaagtaaccggctcaccacactctcgtggcagctcttccagacgctgagtcttcgggaattgcagttggagcagaactttttcaactgcagctgtgacatccgctggatgcagctctggcaggagcagggggaggccaagctcaacagccagaacctctactgcatcaacgctgatggctcccagcttcctctcttccgcatgaacatcagtcagtgtgaccttcctgagatcagcgtgagccacgtcaacctgaccgtacgagagggtgacaacgctgttatcacttgcaatggctctggatcaccccttcctgatgtggactggatagtcactgggctgcagtccatcaacactcaccagaccaatctgaactggaccaatgttcatgccatcaacttgacgctggtgaatgtgacgagtgaggacaatggcttcaccctgacgtgcattgcagagaacgtggtgggcatgagcaatgccagtgttgccctcactgtctactatcccccacgtgtggtgagcctggaggagcctgagctgcgcctggagcactgcatcgagtttgtggtgcgtggcaaccccccaccaacgctgcactggctgcacaatgggcagcctctgcgggagtccaagatcatccatgtggaatactaccaagagggagagatttccgagggctgcctgctcttcaacaagcccacccactacaacaatggcaactataccctcattgccaaaaacccactgggcacagccaaccagaccatcaatggccacttcctcaaggagccctttccagagagcacggataactttatcttgtttgacgaagtgagtcccacacctcctatcactgtgacccacaaaccagaagaagacacttttggggtatccatagcagttggacttgctgcttttgcctgtgtcctgttggtggttctcttcgtcatgatcaacaaatatggtcgacggtccaaatttggaatgaagggtcccgtggctgtcatcagtggtgaggaggactcagccagcccactgcaccacatcaaccacggcatcaccacgccctcgtcactggatgccgggcccgacactgtggtcattggcatgactcgcatccctgtcattgagaacccccagtacttccgtcagggacacaactgccacaagccggacacgtatgtgcagcacattaagaggagagacatcgtgctgaagcgagaactgggtgagggagcctttggaaaggtcttcctggccgagtgctacaacctcagcccgaccaaggacaagatgcttgtggctgtgaaggccctgaaggatcccaccctggctgcccggaaggatttccagagggaggccgagctgctcaccaacctgcagcatgagcacattgtcaagttctatggagtgtgcggcgatggggaccccctcatcatggtctttgaatacatgaagcatggagacctgaataagttcctcagggcccatgggccagatgcaatgatccttgtggatggacagccacgccaggccaagggtgagctggggctctcccaaatgctccacattgccagtcagatcgcctcgggtatggtgtacctggcctcccagcactttgtgcaccgagacctggccaccaggaactgcctggttggagcgaatctgctagtgaagattggggacttcggcatgtccagagatgtctacagcacggattattacagggttgtgcaggcatgaggactgatactggggaaaaaagacggggaagatgccccataagaaaattctgagacgttgaagcatgcttatattggattctgtcctcgggaaaggagaggaaaaggctgaaggagaccattgaatctggtgttgagtcattcacgtctctctactcctgtggagggcccttacggatgtgtcataacaggatctccttttccttcctcaagtgcaaaaggccttttttttttttttcctgagacaaactgaatatataacataaaaagatac

SEQ ID NO: 159155 - DNA, 2145 bp, Homo sapiens
  Payload ID: 11147
  Gene Symbol: NTRK3
  Gene Name: neurotrophic tyrosine kinase, receptor, type 3
  Uniprot ID: Q16288
  ENST ID: ENST00000540489
  CDS Start-End: 307-2145
acatttctgcagccgcgcggcgagccattcgcggcggctgctgcagctcctactgcatcttccttctcttcctttcctcgggctccggtctcggagtcggagagcgcgcctcgcttccagagcccccggacccggcgagtcagcgatcgccgagccggccaccatgcccggcagaccgcgccactaggcgctcctcgcggctcccacccggcggcggcggcggcggcggcggcgtccgcgatggtttcagacgctgaaggattttgcatctgatcgctcggcgtttcaaagaagcagcgatcggagatggatgtctctctttgcccagccaagtgtagtttctggcggattttcttgctgggaagcgtctggctggactatgtgggctccgtgctggcttgccctgcaaattgtgtctgcagcaagactgagatcaattgccggcggccggacgatgggaacctcttccccctcctggaagggcaggattcagggaacagcaatgggaacgccagtatcaacatcacggacatctcaaggaatatcacttccatacacatagagaactggcgcagtcttcacacgctcaacgccgtggacatggagctctacaccggacttcaaaagctgaccatcaagaactcaggacttcggagcattcagcccagagcctttgccaagaacccccatttgcgttatataaacctgtcaagtaaccggctcaccacactctcgtggcagctcttccagacgctgagtcttcgggaattgcagttggagcagaactttttcaactgcagctgtgacatccgctggatgcagctctggcaggagcagggggaggccaagctcaacagccagaacctctactgcatcaacgctgatggctcccagcttcctctcttccgcatgaacatcagtcagtgtgaccttcctgagatcagcgtgagccacgtcaacctgaccgtacgagagggtgacaacgctgttatcacttgcaatggctctggatcaccccttcctgatgtggactggatagtcactgggctgcagtccatcaacactcaccagaccaatctgaactggaccaatgttcatgccatcaacttgacgctggtgaatgtgacgagtgaggacaatggcttcaccctgacgtgcattgcagagaacgtggtgggcatgagcaatgccagtgttgccctcactgtctactatcccccacgtgtggtgagcctggaggagcctgagctgcgcctggagcactgcatcgagtttgtggtgcgtggcaaccccccaccaacgctgcactggctgcacaatgggcagcctctgcgggagtccaagatcatccatgtggaatactaccaagagggagagatttccgagggctgcctgctcttcaacaagcccacccactacaacaatggcaactataccctcattgccaaaaacccactgggcacagccaaccagaccatcaatggccacttcctcaaggagccctttccagagagcacggataactttatcttgtttgacgaagtgagtcccacacctcctatcactgtgacccacaaaccagaagaagacacttttggggtatccatagcagttggacttgctgcttttgcctgtgtcctgttggtggttctcttcgtcatgatcaacaaatatggtcgacggtccaaatttggaatgaagggtcccgtggctgtcatcagtggtgaggaggactcagccagcccactgcaccacatcaaccacggcatcaccacgccctcgtcactggatgccgggcccgacactgtggtcattggcatgactcgcatccctgtcattgagaacccccagtacttccgtcagggacacaactgccacaagccggacacgtgggtcttttcaaacatagacaatcatgggatattaaacttgaaggacaatagagatcatctagtcccatcaactcactatatatatgaggaacctgaggtccagagtggggaagtgtcttacccaaggtcacatggtttcagagaaattatgttgaatccaataagccttcccggacattccaagcctcttaaccatggcatctatgttgaggatgtcaatgtttatttcagcaaaggacgtcatggcttttaa

SEQ ID NO: 159156 - DNA, 4670 bp, Homo sapiens
  Payload ID: 11147
  Gene Symbol: NTRK3
  Gene Name: neurotrophic tyrosine kinase, receptor, type 3
  ENST ID: ENST00000558676
  CDS Start-End: 27-2144
ctcttttttagaagcagcgatcggagatggatgtctctctttgcccagccaagtgtagtttctggcggattttcttgctgggaagcgtctggctggactatgtgggctccgtgctggcttgccctgcaaattgtgtctgcagcaagactgagatcaattgccggcggccggacgatgggaacctcttccccctcctggaagggcaggattcagggaacagcaatgggaacgccagtatcaacatcacggacatctcaaggaatatcacttccatacacatagagaactggcgcagtcttcacacgctcaacgccgtggacatggagctctacaccggacttcaaaagctgaccatcaagaactcaggacttcggagcattcagcccagagcctttgccaagaacccccatttgcgttatataaacctgtcaagtaaccggctcaccacactctcgtggcagctcttccagacgctgagtcttcgggaattgcagttggagcagaactttttcaactgcagctgtgacatccgctggatgcagctctggcaggagcagggggaggccaagctcaacagccagaacctctactgcatcaacgctgatggctcccagcttcctctcttccgcatgaacatcagtcagtgtgaccttcctgagatcagcgtgagccacgtcaacctgaccgtacgagagggtgacaacgctgttatcacttgcaatggctctggatcaccccttcctgatgtggactggatagtcactgggctgcagtccatcaacactcaccagaccaatctgaactggaccaatgttcatgccatcaacttgacgctggtgaatgtgacgagtgaggacaatggcttcaccctgacgtgcattgcagagaacgtggtgggcatgagcaatgccagtgttgccctcactgtctactatcccccacgtgtggtgagcctggaggagcctgagctgcgcctggagcactgcatcgagtttgtggtgcgtggcaaccccccaccaacgctgcactggctgcacaatgggcagcctctgcgggagtccaagatcatccatgtggaatactaccaagagggagagatttccgagggctgcctgctcttcaacaagcccacccactacaacaatggcaactataccctcattgccaaaaacccactgggcacagccaaccagaccatcaatggccacttcctcaaggagccctttccagttgacgaagtgagtcccacacctcctatcactgtgacccacaaaccagaagaagacacttttggggtatccatagcagttggacttgctgcttttgcctgtgtcctgttggtggttctcttcgtcatgatcaacaaatatggtcgacggtccaaatttggaatgaagggtcccgtggctgtcatcagtggtgaggaggactcagccagcccactgcaccacatcaaccacggcatcaccacgccctcgtcactggatgccgggcccgacactgtggtcattggcatgactcgcatccctgtcattgagaacccccagtacttccgtcagggacacaactgccacaagccggacacgtatgtgcagcacattaagaggagagacatcgtgctgaagcgagaactgggtgagggagcctttggaaaggtcttcctggccgagtgctacaacctcagcccgaccaaggacaagatgcttgtggctgtgaaggccctgaaggatcccaccctggctgcccggaaggatttccagagggaggccgagctgctcaccaacctgcagcatgagcacattgtcaagttctatggagtgtgcggcgatggggaccccctcatcatggtctttgaatacatgaagcatggagacctgaataagttcctcagggcccatgggccagatgcaatgatccttgtggatggacagccacgccaggccaagggtgagctggggctctcccaaatgctccacattgccagtcagatcgcctcgggtatggtgtacctggcctcccagcactttgtgcaccgagacctggccaccaggaactgcctggttggagcgaatctgctagtgaagattggggacttcggcatgtccagagatgtctacagcacggattattacagggtaaagtgactttcccagctgcaggactcagccacagagctagcgccttgcttacatgtctttttcattgtccattaaccctgtcactctggcacacacatatacacacccatgcccagacatgcactcaacagttatcttttggcctctcttgcatcttgacatacctgtttattatgttctcaattgcccactccttctttcttcttggacatttaactgaactgtaatctgtacattgcaataacatatgcattgtgttcttacgtgcttcaatactcattcttcatgtaaacatactcatacatgtatatgtatgtgcccaaacacacacacagacacacccaacttgatactacatttaatgtctccctacccagtcccagatctagcctcacccatgacacattttattctctgaaattatcttgtgattatgtaagaattatcttgtttccaaaagtagatcttgatgagaagaggaaacctaagtaaagtaacaaagatggctaatatattgctgagcattatccaaatgggctggaacagatgaggaaaggaagcatgttatctgttgccaactttggagagaggacaggttagatcttagaaaagctttctgattgtgagaagatccatcctgctcagttttaccttcatatagtcatctgctttacattaacaagagtcttattttgctcctagaatctttttttttccctaagtctttgggaatctttttttccatggattattgactgattctgatagtgttattatttccagggaaaggatgaatggccatgagtgtcacttatctcagcaaggggaagtatgagtgcaacctgagacacagagataacttctgcaaactgagtgagggcagattgctaaaaaatacagaagatccaaggctgggagtggtggctcatgcctgtaatcccagcactttgggaggctgaggtggatggatcacgaggtcaggagttcaagatcagcctagccaacatgctgaaaccctgtctgtactaaaaaatacaaaaattagctgggtgtggtggcatgtgcctgtagtcccagctactcgggaggttgaagcaggagaatttcttgaacctgggaggtggagattgcagtgagccaagatcacaccactgcactccagcctgggcgacagagcgagactctgtcaaaaaaaaccaaaaaaacaaaaaaacaaaaaatctatttttgggacatcaaaggaaagaggagtttggatagacattataaggagagtgtgggacaatgttttggaggtcaagggatgtcatattccttttcagctgttataacaaataccgcagatgggataggttacaaaaaactgaagtttatttctcatggttctggaggatgggaattccaagatcaaggtgcaaacaaattaattgtctggtaaaggtctgcttcctcatttatagatggccatctgcttgctgtgtcttctccatatggcagaagggttaacagatctctctggcatctcttccatatgaatgcattgccctcataacctagtaacttcccaaaggcctcacgtcctaacaccattaccttggggctgtttcaacatatgaatttggggggtacacaaacattcagtgtattgccaggatcatggcagccaattgtctcatctttggagaaatgagtgatcataccgtgagtcaaatagatatgattgtcctgttgacctgagcatagtggaccagaggctgggaatttgaggtgtgtgcaggtcagttctatcttgatgttcctgatggcctaaatgagatcactcagacgttaaaacagatcagtcaagatacttcattttagcaataggttggagaaaaatggaatgtttgagaaatgaccttggttgttagaaaatgacttgtttgttgtgcaaccaaagaatggcagatgatgtaccgttgtgagagaatataagacaaagcatacagtgtccacagcaagctgggtagcctcactagccacctgtcctatccagtattcccaggtatggaaaaggagacatgatgtggcagtagtcatagaccgatggccagggcagacctgccagaaaatatcaaagaggagtctttctttagtgtctagaccatattttttattcatttccaagagaggcattggtgtggttactaagagggggatgggtcatagatttcttagagtggggctggagctggcatcatttaattgcctttccactttgtttaatggggtttgctggtctgtctgactgtgctcagatctatgtaggtgttgatgaaaacaagggatggctcattgtttttctctgtgaaaggcagatgtttgattatgccaagctgataactactgacttcactggagtctcaggaaactatgtctgaccagaatgtgctaactggcccttcaaacttgcttctagatgtgctgttaatatttattgaaactagtttaaaagaggaaaaacaaaaaataaaaagatcacatccccaattg

SEQ ID NO: 159157 - DNA, 2622 bp, Homo sapiens
  Payload ID: 11147
  Gene Symbol: NTRK3
  Gene Name: neurotrophic tyrosine kinase, receptor, type 3
  Uniprot ID: Q16288
  ENST ID: ENST00000557856
  CDS Start-End: 25-2478
cttttttagaagcagcgatcggagatggatgtctctctttgcccagccaagtgtagtttctggcggattttcttgctgggaagcgtctggctggactatgtgggctccgtgctggcttgccctgcaaattgtgtctgcagcaagactgagatcaattgccggcggccggacgatgggaacctcttccccctcctggaagggcaggattcagggaacagcaatgggaacgccagtatcaacatcacggacatctcaaggaatatcacttccatacacatagagaactggcgcagtcttcacacgctcaacgccgtggacatggagctctacaccggacttcaaaagctgaccatcaagaactcaggacttcggagcattcagcccagagcctttgccaagaacccccatttgcgttatataaacctgtcaagtaaccggctcaccacactctcgtggcagctcttccagacgctgagtcttcgggaattgcagttggagcagaactttttcaactgcagctgtgacatccgctggatgcagctctggcaggagcagggggaggccaagctcaacagccagaacctctactgcatcaacgctgatggctcccagcttcctctcttccgcatgaacatcagtcagtgtgaccttcctgagatcagcgtgagccacgtcaacctgaccgtacgagagggtgacaacgctgttatcacttgcaatggctctggatcaccccttcctgatgtggactggatagtcactgggctgcagtccatcaacactcaccagaccaatctgaactggaccaatgttcatgccatcaacttgacgctggtgaatgtgacgagtgaggacaatggcttcaccctgacgtgcattgcagagaacgtggtgggcatgagcaatgccagtgttgccctcactgtctactatcccccacgtgtggtgagcctggaggagcctgagctgcgcctggagcactgcatcgagtttgtggtgcgtggcaaccccccaccaacgctgcactggctgcacaatgggcagcctctgcgggagtccaagatcatccatgtggaatactaccaagagggagagatttccgagggctgcctgctcttcaacaagcccacccactacaacaatggcaactataccctcattgccaaaaacccactgggcacagccaaccagaccatcaatggccacttcctcaaggagccctttccagttgacgaagtgagtcccacacctcctatcactgtgacccacaaaccagaagaagacacttttggggtatccatagcagttggacttgctgcttttgcctgtgtcctgttggtggttctcttcgtcatgatcaacaaatatggtcgacggtccaaatttggaatgaagggtcccgtggctgtcatcagtggtgaggaggactcagccagcccactgcaccacatcaaccacggcatcaccacgccctcgtcactggatgccgggcccgacactgtggtcattggcatgactcgcatccctgtcattgagaacccccagtacttccgtcagggacacaactgccacaagccggacacgtatgtgcagcacattaagaggagagacatcgtgctgaagcgagaactgggtgagggagcctttggaaaggtcttcctggccgagtgctacaacctcagcccgaccaaggacaagatgcttgtggctgtgaaggccctgaaggatcccaccctggctgcccggaaggatttccagagggaggccgagctgctcaccaacctgcagcatgagcacattgtcaagttctatggagtgtgcggcgatggggaccccctcatcatggtctttgaatacatgaagcatggagacctgaataagttcctcagggcccatgggccagatgcaatgatccttgtggatggacagccacgccaggccaagggtgagctggggctctcccaaatgctccacattgccagtcagatcgcctcgggtatggtgtacctggcctcccagcactttgtgcaccgagacctggccaccaggaactgcctggttggagcgaatctgctagtgaagattggggacttcggcatgtccagagatgtctacagcacggattattacagggtgggaggacacaccatgctccccattcgctggatgcctcctgaaagcatcatgtaccggaagttcactacagagagtgatgtatggagcttcggggtgatcctctgggagatcttcacctatggaaagcagccatggttccaactctcaaacacggaggtcattgagtgcattacccaaggtcgtgttttggagcggccccgagtctgccccaaagaggtgtacgatgtcatgctggggtgctggcagagggaaccacagcagcggttgaacatcaaggagatctacaaaatcctccatgctttggggaaggccaccccaatctacctggacattcttggctagtggtggctggtggtcatgaattcatactctgttgcctcctctctccctgcctcacatctcccttccacctcacaactccttccatccttgactgaagcgaacatcttcatataaactcaagtgcctgctacacatacaacactg

SEQ ID NO: 159158 - DNA, 717 bp, Homo sapiens
  Payload ID: 11147
  Gene Symbol: NTRK3
  Gene Name: neurotrophic tyrosine kinase, receptor, type 3
  ENST ID: ENST00000558576
  CDS Start-End: 1-440
atggagtgtgcggcgatggggaccccctcatcatggtctttgaatacatgaagcatggagacctgaataagttcctcagggcccatgggccagatgcaatgatccttgtggatggacagccacgccaggccaagggtgagctggggctctcccaaatgctccacattgccagtcagatcgcctcgggtatggtgtacctggcctcccagcactttgtgcaccgagacctggccaccaggaactgcctggttggagcgaatctgctagtgaagattggggacttcggcatgtccagagatgtctacagcacggattattacaggtatacatcggctaaggccttggaggaatgctctgatttgtcagatcgcgagaatactgtgaaggattctctctatgagctgatacccccggacaggttgtgcaggcatgaggactgatactggggaaaaaagacggggaagatgccccataagaaaattctgagacgttgaagcatgcttatattggattctgtcctcgggaaaggagaggaaaaggctgaaggagaccattgaatctggtgttgagtcattcacgtctctctactcctgtggagggcccttacggatgtgtcataacaggatctccttttccttcctcaagtgcaaaaggccttttttttttttttcctgagacaaactgaatatataacataaaaagatacataaatttcca

SEQ ID NO: 159159 - DNA, 257 bp, Homo sapiens
  Payload ID: 11147
  Gene Symbol: NTRK3
  Gene Name: neurotrophic tyrosine kinase, receptor, type 3
  ENST ID: ENST00000560017
  CDS Start-End: 1-257
gtgggcatgagcaatgccagtgttgccctcactgtctactttgacgaagtgagtcccacacctcctatcactgtgacccacaaaccagaagaagacacttttggggtatccatagcagttggacttgctgcttttgcctgtgtcctgttggtggttctcttcgtcatgatcaacaaatatggtcgacggtccaaatttggaatgaaggatggcctggagcttttggctgtcttgcttaaatgtgactcaaagcagtt

SEQ ID NO: 159160 - DNA, 535 bp, Homo sapiens
  Payload ID: 11147
  Gene Symbol: NTRK3
  Gene Name: neurotrophic tyrosine kinase, receptor, type 3
  ENST ID: ENST00000559188
  CDS Start-End: 265-535
gctttgctaggccaggcctacctggggctgggttggagtggtatggtctttagctgttagaaagaagatgaagtgggagaggatggcatggctggaccagcaccatgaggacacatagaagagggtatttacagctggatgtgacctgccgggtggcctccccagatcctatgtggacagtgtctgtactgcattggctggcaagatagagtttgaagacacatagagaactggcgcagtcttcacacgctcaacgccgtggacatggagctctacaccggacttcaaaagctgaccatcaagaactcaggacttcggagcattcagcccagagcctttgccaagaacccccatttgcgttatataaacctgtcaagtaaccggctcaccacactctcgtggcagctcttccagacgctgagtcttcgggaattgcagttggagcagaactttttcaactgcagctgtgacatccgctggatgcagctctggcaggagcagggggaggccaagctcaacagccagaacctctact

SEQ ID NO: 159161 - DNA, 629 bp, Homo sapiens
  Payload ID: 11147
  Gene Symbol: NTRK3
  Gene Name: neurotrophic tyrosine kinase, receptor, type 3
  ENST ID: ENST00000558306
  CDS Start-End: 1-150
acccacaaaccagaagaagacacttttggggtcccgtggctgtcatcagtggtgaggaggactcagccagcccactgcaccacatcaaccacggcatcaccacgccctcgtcactggatgccgggcccgacactgtggtcattggcatgactcgcatccctgtcattgagaacccccagtacttccgtcagggacacaactgccacaagccggacacgtgtttcagagaaattatgttgaatccaataagccttcccggacattccaagcctcttaaccatggcatctatgttgaggatgtcaatgtttatttcagcaaaggacgtcatggcttttaaaaactccttttaagcctccttgttttgatgtcaccttggtaggctgggccctctgagaggttggaagctctaggcattgttctctttggatccagggatgctaagtagaaactgcatgagccaccagtgccccggcaccctttaacaccaccagatgggtgttttcccccatccaccactggcagggttgccccttccctccaatcatcactgtgctccttttttcccggcctacgaggcagctcctgccactatctttagagccaataaagagaattaaaaacctgtgca

SEQ ID NO: 159162 - DNA, 2714 bp, Homo sapiens
  Payload ID: 11147
  Gene Symbol: NTRK3
  Gene Name: neurotrophic tyrosine kinase, receptor, type 3
  Uniprot ID: Q16288
  ENST ID: ENST00000629765
  CDS Start-End: 17-2536
gaagcagcgatcggagatggatgtctctctttgcccagccaagtgtagtttctggcggattttcttgctgggaagcgtctggctggactatgtgggctccgtgctggcttgccctgcaaattgtgtctgcagcaagactgagatcaattgccggcggccggacgatgggaacctcttccccctcctggaagggcaggattcagggaacagcaatgggaacgccagtatcaacatcacggacatctcaaggaatatcacttccatacacatagagaactggcgcagtcttcacacgctcaacgccgtggacatggagctctacaccggacttcaaaagctgaccatcaagaactcaggacttcggagcattcagcccagagcctttgccaagaacccccatttgcgttatataaacctgtcaagtaaccggctcaccacactctcgtggcagctcttccagacgctgagtcttcgggaattgcagttggagcagaactttttcaactgcagctgtgacatccgctggatgcagctctggcaggagcagggggaggccaagctcaacagccagaacctctactgcatcaacgctgatggctcccagcttcctctcttccgcatgaacatcagtcagtgtgaccttcctgagatcagcgtgagccacgtcaacctgaccgtacgagagggtgacaacgctgttatcacttgcaatggctctggatcaccccttcctgatgtggactggatagtcactgggctgcagtccatcaacactcaccagaccaatctgaactggaccaatgttcatgccatcaacttgacgctggtgaatgtgacgagtgaggacaatggcttcaccctgacgtgcattgcagagaacgtggtgggcatgagcaatgccagtgttgccctcactgtctactatcccccacgtgtggtgagcctggaggagcctgagctgcgcctggagcactgcatcgagtttgtggtgcgtggcaaccccccaccaacgctgcactggctgcacaatgggcagcctctgcgggagtccaagatcatccatgtggaatactaccaagagggagagatttccgagggctgcctgctcttcaacaagcccacccactacaacaatggcaactataccctcattgccaaaaacccactgggcacagccaaccagaccatcaatggccacttcctcaaggagccctttccagagagcacggataactttatcttgtttgacgaagtgagtcccacacctcctatcactgtgacccacaaaccagaagaagacacttttggggtatccatagcagttggacttgctgcttttgcctgtgtcctgttggtggttctcttcgtcatgatcaacaaatatggtcgacggtccaaatttggaatgaagggtcccgtggctgtcatcagtggtgaggaggactcagccagcccactgcaccacatcaaccacggcatcaccacgccctcgtcactggatgccgggcccgacactgtggtcattggcatgactcgcatccctgtcattgagaacccccagtacttccgtcagggacacaactgccacaagccggacacgtatgtgcagcacattaagaggagagacatcgtgctgaagcgagaactgggtgagggagcctttggaaaggtcttcctggccgagtgctacaacctcagcccgaccaaggacaagatgcttgtggctgtgaaggccctgaaggatcccaccctggctgcccggaaggatttccagagggaggccgagctgctcaccaacctgcagcatgagcacattgtcaagttctatggagtgtgcggcgatggggaccccctcatcatggtctttgaatacatgaagcatggagacctgaataagttcctcagggcccatgggccagatgcaatgatccttgtggatggacagccacgccaggccaagggtgagctggggctctcccaaatgctccacattgccagtcagatcgcctcgggtatggtgtacctggcctcccagcactttgtgcaccgagacctggccaccaggaactgcctggttggagcgaatctgctagtgaagattggggacttcggcatgtccagagatgtctacagcacggattattacaggctctttaatccatctggaaatgatttttgtatatggtgtgaggtgggaggacacaccatgctccccattcgctggatgcctcctgaaagcatcatgtaccggaagttcactacagagagtgatgtatggagcttcggggtgatcctctgggagatcttcacctatggaaagcagccatggttccaactctcaaacacggaggtcattgagtgcattacccaaggtcgtgttttggagcggccccgagtctgccccaaagaggtgtacgatgtcatgctggggtgctggcagagggaaccacagcagcggttgaacatcaaggagatctacaaaatcctccatgctttggggaaggccaccccaatctacctggacattcttggctagtggtggctggtggtcatgaattcatactctgttgcctcctctctccctgcctcacatctcccttccacctcacaactccttccatccttgactgaagcgaacatcttcatataaactcaagtgcctgctacacatacaacactgaaaaaaggaaaaaaaaagaaagaaaaaaaaaccc

SEQ ID NO: 159163 - DNA, 2741 bp, Homo sapiens
  Payload ID: 11147
  Gene Symbol: NTRK3
  Gene Name: neurotrophic tyrosine kinase, receptor, type 3
  ENST ID: ENST00000626019
  CDS Start-End: 1-2595
atggatgtctctctttgcccagccaagtgtagtttctggcggattttcttgctgggaagcgtctggctggactatgtgggctccgtgctggcttgccctgcaaattgtgtctgcagcaagactgagatcaattgccggcggccggacgatgggaacctcttccccctcctggaagggcaggattcagggaacagcaatgggaacgccagtatcaacatcacggacatctcaaggaatatcacttccatacacatagagaactggcgcagtcttcacacgctcaacgccgtggacatggagctctacaccggacttcaaaagctgaccatcaagaactcaggacttcggagcattcagcccagagcctttgccaagaacccccatttgcgttatataaacctgtcaagtaaccggctcaccacactctcgtggcagctcttccagacgctgagtcttcgggaattgcagttggagcagaactttttcaactgcagctgtgacatccgctggatgcagctctggcaggagcagggggaggccaagctcaacagccagaacctctactgcatcaacgctgatggctcccagcttcctctcttccgcatgaacatcagtcagtgtgaccttcctgagatcagcgtgagccacgtcaacctgaccgtacgagagggtgacaacgctgttatcacttgcaatggctctggatcaccccttcctgatgtggactggatagtcactgggctgcagtccatcaacactcaccagaccaatctgaactggaccaatgttcatgccatcaacttgacgctggtgaatgtgacgagtgaggacaatggcttcaccctgacgtgcattgcagagaacgtggtgggcatgagcaatgccagtgttgccctcactgtctactatcccccacgtgtggtgagcctggaggagcctgagctgcgcctggagcactgcatcgagtttgtggtgcgtggcaaccccccaccaacgctgcactggctgcacaatgggcagcctctgcgggagtccaagatcatccatgtggaatactaccaagagggagagatttccgagggctgcctgctcttcaacaagcccacccactacaacaatggcaactataccctcattgccaaaaacccactgggcacagccaaccagaccatcaatggccacttcctcaaggagccctttccagagagcacggataactttatcttgtttgacgaagtgagtcccacacctcctatcactgtgacccacaaaccagaagaagacacttttggggtatccatagcagttggacttgctgcttttgcctgtgtcctgttggtggttctcttcgtcatgatcaacaaatatggtcgacggtccaaatttggaatgaagggtcccgtggctgtcatcagtggtgaggaggactcagccagcccactgcaccacatcaaccacggcatcaccacgccctcgtcactggatgccgggcccgacactgtggtcattggcatgactcgcatccctgtcattgagaacccccagtacttccgtcagggacacaactgccacaagccggacacgtatgtgcagcacattaagaggagagacatcgtgctgaagcgagaactgggtgagggagcctttggaaaggtcttcctggccgagtgctacaacctcagcccgaccaaggacaagatgcttgtggctgtgaaggccctgaaggatcccaccctggctgcccggaaggatttccagagggaggccgagctgctcaccaacctgcagcatgagcacattgtcaagttctatggagtgtgcggcgatggggaccccctcatcatggtctttgaatacatgaagcatggagacctgaataagttcctcagggcccatgggccagatgcaatgatccttgtggatggacagccacgccaggccaagggtgagctggggctctcccaaatgctccacattgccagtcagatcgcctcgggtatggtgtacctggcctcccagcactttgtgcaccgagacctggccaccaggaactgcctggttggagcgaatctgctagtgaagattggggacttcggcatgtccagagatgtctacagcacggattattacagggaagggccatgccagaagggcccgttcagtgtggtgtggcagcggcagaggctagcagcaacggcagcttccacactctttaatccatctggaaatgatttttgtatatggtgtgaggtgggaggacacaccatgctccccattcgctggatgcctcctgaaagcatcatgtaccggaagttcactacagagagtgatgtatggagcttcggggtgatcctctgggagatcttcacctatggaaagcagccatggttccaactctcaaacacggaggtcattgagtgcattacccaaggtcgtgttttggagcggccccgagtctgccccaaagaggtgtacgatgtcatgctggggtgctggcagagggaaccacagcagcggttgaacatcaaggagatctacaaaatcctccatgctttggggaaggccaccccaatctacctggacattcttggctagtggtggctggtggtcatgaattcatactctgttgcctcctctctccctgcctcacatctcccttccacctcacaactccttccatccttgactgaagcgaacatcttcatataaactcaagtgcctgctacacatacaacactgaa

SEQ ID NO: 159164 - DNA, 1028 bp, Homo sapiens
  Payload ID: 11148
  Gene Symbol: NTF3
  Gene Name: neurotrophin 3
  Uniprot ID: P20783
  ENST ID: ENST00000331010
  CDS Start-End: 84-857
tgccagaataacacagactcagctgccagagcctgctcttaacacctgtgtttccttttcagatcttacaggtgaacaaggtgatgtccatcttgttttatgtgatatttctcgcttatctccgtggcatccaaggtaacaacatggatcaaaggagtttgccagaagactcgctcaattccctcattattaagctgatccaggcagatattttgaaaaacaagctctccaagcagatggtggacgttaaggaaaattaccagagcaccctgcccaaagctgaggctccccgagagccggagcggggagggcccgccaagtcagcattccagccggtgattgcaatggacaccgaactgctgcgacaacagagacgctacaactcaccgcgggtcctgctgagcgacagcacccccttggagcccccgcccttgtatctcatggaggattacgtgggcagccccgtggtggcgaacagaacatcacggcggaaacggtacgcggagcataagagtcaccgaggggagtactcggtatgtgacagtgagagtctgtgggtgaccgacaagtcatcggccatcgacattcggggacaccaggtcacggtgctgggggagatcaaaacgggcaactctcccgtcaaacaatatttttatgaaacgcgatgtaaggaagccaggccggtcaaaaacggttgcaggggtattgatgataaacactggaactctcagtgcaaaacatcccaaacctacgtccgagcactgacttcagagaacaataaactcgtgggctggcggtggatacggatagacacgtcctgtgtgtgtgccttgtcgagaaaaatcggaagaacatgaattggcatctctccccatatataaattattactttaaattatatgatatgcatgtagcatataaatgtttatattgtttttatatattataagttgacctttatttattaaacttcagcaaccctacagtatataagcttttttctcaataaaatcagtgtgcttgccttc
